United States Patent Application Publication US 2014/0057251 A1 - sequence listing, part 71

SEQ ID NO: 112380 - DNA, 5278 bp, Cannabis sativa
  modified_base (675)..(681): a, c, t, g, unknown or other
  modified_base (1240)..(1245): a, c, t, g, unknown or other
  modified_base (3576)..(3584): a, c, t, g, unknown or other
aaaaaaaaacaaacaatagtttaaaaaaaacagcttaaatttttgtaaaaaaaacatattaatttttatttattttaatgtttcattttttaaaaaggaaaaaagaaaaaaaaacacaaatttatagttttttactgcattccttttttataaaatgattttttttatatatatttttaagtttttttttttttttttgtaagaaataccatgttttataattaagtttttatatcatatatatcaaaacttatattttttttttcccatatatatcaaaacttattttttttcttatattgttgtaaatagcacttgttttattgattgaatatattttgtttgtttgttaagttgtaatgggagcccacttctgatttgggctttatttttctttaatctcttgggacattttcttctttcttttagggcctgttagttttacgtcccaacatatatgtaatgtcaagcaaatatagaaaagagataagttgaaaaataccacttttattaatcaattaattaaatttacttctaattttatatttagttgaaatatacctctttttatatatattgtacccaaaatacctgcacataagagagtgacatagggagtatcttgaagtgactggggtaaaattagtacaatatttaaaaaaagaggtaaaaatnnnnnnnttaaaaaaagagggtaaaaataaaaaaaataatataaaaatagtatagagtataatttcctctatagaaaagatactaaatccatccaaatttcatcaaaataatctcaaccttgtgtactacaaacaatgtcaagaaatatatcaaaatcagagcattttatacactgtctttgcctttgttttttttttgttggtaattgtagtttatagtttaatgaattatatcacaattttttcttatcgatggggatagtgggtggaggctgccgttgaaatgtacaaagagaaaagggttagctcaaatgtgaaagaaagaaaaacaaggaaagagagcgagtggaacaagttacagtaggggtattttagacatacaacattaccggagatatataataagaaattttacttacactttaaaaatttataaagacatcttattttaataatttttattttatataaattttttatttttaagtatactattttttttttaactttttttctctcatttcatattcttaattaaaaagtatacctatcaaataaaaataaannnnnntttaaatattataacaaaaaaatttacataagaaattatatgaatttttttttttaaaaaataaaatatatatatatgagttagaaaaaattataaaaataaaattaaaataagtattaaaattgatataaaataatgtgagaatttttttaaaaaaatatttagaataatttttaaaaattatttaagtttagattttttttaataataaagtataaactcaaaaattatttaagtttatattttataagatgcaaaatagaactcactatattaattatactctcctacattatccatataaactcaaatttcctttaaaaattcaaatatactcgttctagcatgttctgcaaatacatattacaataatattataatttaaataccctaaaaaaatgaatatatgtattatatagtagacatgacttgttaggtagttaagagaatataatatgatactgaagccattatccatattcgattttaatttattttttcttcccattatctaatatatttctctcttttaatttgtttgtctccatgatcttaattcgatctgtggaataattgagaaaatgaagtattctctgtcttatagagagattttttaaggatatataagaacagttattaattagtatgtaagatcgaatccaactatatatatccattataacatacatatatataatatttatattctcttacgttatatggagataccaattatagtgtccatcaagatagaaagaatttgagtgtattgattgtttaatatttaatgaataataatggtaacgcatctaattagattaatacactatctacatataatatatataatgatgtgtgattaagcaatcttaataacataattaattaaaagtgatgtgcactctacatataattttttataataaaaagagcattgttaattgaacattagtagtgtctagcactttctaaatgtatcgtcttgcgattagctagtaatatttcttaaaaattattgcattaggttatataagacccgatacttatactacaaaaaattattacttttagtgacaattttttagtcacaacataattttttatgactaaatgtgactttgaatcacaacaaaatattacttatgatgactaaaacatagtttttagataagatattgtcactaatttagttttagtcacaataagtattgtaactaaaaatacatttaatcataataaattgtaatttttgtgactaatactttgagttacgtacttattagtcacaatataaaataataatttataattagttatctttttcatttttaatcataaattttattgttactaaaaattaatttttttatattattactaatggattttaacatatttttgtgtttatagataatacccatgtgatctccaaggtctccttggtaataatcattgtatatatggattctaagctgctttcaacgtgtacattttaagagattccatctgattattattaattgatatttttgatataaattaataactattaatataaatacaaatatatattaaggtgcaacttaaataatgtgtcttagtagaaaaggaaaaagtttaattaatgccaaaaatcatcactagtagtttgactatgagtcccacttgttcgggactcttacaacatagtttcatgatcatatgactacctaatttaatatgtatgacatgcttttttttggttgctttttctctctttttaaatgggacccaatatataaattattggagcaaattgttggacaatatacattccataatgtcaaaaatgatatgctcgaatgattcatgtaaagattaatcatatagaatgggcaatgggaaaaatatatatatttgaactcttatttaaaaataaatataatacttttcaaaattaataaagaaatgtacaatttaatatatatatttgaactcttatttaaaaataaatataatacttttcaaaattaataaagaaatgtacaatttaaaaaaaaaaaaaactttttttgagttcttgagttgtttttctgtagtaattattaatattttttttattaattaaccatattaactttgagagaaatgctaaaatataatagtggtgtctaacatttttctatgtgctaatattgctattggtctacactacaaatttttttacttttagtcgcaataaaatttgtgattaaaagtataaaaattactcattataaattatcattgctactttatgactaaaaagtttgtaactaaaagtattaattacaaaaatcacaatttgttgtnnnnnnnnntatttttagtcacaatacttgttgtgattaaaactaaattatgacaacttatatctaaatattatgttttagtcataagtaactttttgttgtgactaaaaaatttattttgtgattaaaaagttatcactgaaaatgatctattttgtagtgctaactatatatcgggtctcataaaatttaatatataataatttttagagagtatcgctagccgattgtaaggcgacacgtatagcagtggtgcctaataacaatgctataactttcatcaattttcatcacattgaagatatggtatcccactccaataagatttgtctctagtttttacttttctacgggatttctacttctaccctatacctgctgaaattttatttctttacatataaaacctcataatataattattaatgcattaataaaaaataagtaaatattctttggtatatttctagtggtaatgggcaatttgaaagagaatatttcttaaacaaggtggatctctagctattcttggcgtggagattctttctatcttttacaatttgtacatgtatttatatatttttcttttttatttgtcgtcttctaggttatttgatgaaacacacaatttgggagcaacatgcattagtggttgtcattttcaaatatatgtgtacaaattatgacaaaggaatggccaagatgataataaaaaacccaaatattatttaaaagaaaaaaaggctaataatatgcatggaaaccactagagagcggtttgtgctcttaatcatgcaacaaaaataagtgttgtttctccacgtaactatcattgcacaataaatatatatatatatgttttttggttgaacctctcaattattattctacttgtatttaattatctaagctcaaattttaacggtaaagctctccaaattactgattggtagcaaatttaaggtgtcatctattttacacaattaattgtcaatataaacgatttatgtatacacttttatacacgcgtcacatttatattgatatacctaatattattgtttaaaaaaatataaaaattatttcaaaattaataatagtttttattttttttaaatatttcattttttatttttataatttatttgacttcaaaataaattttaaaaataatttttaaacaataatattaggtctattaactaatataaacgtgtcatgtgtacaaaagtgtatacataagtaatctatcgtgatacttaaccggatgacactttaaatttactacaagttaataatttggagggttttactgtttgaatttagaaggttaaaatacaaataaaatgataattgagaaagtttaaccatcaaaagctctaaatatatatgtatattatatacatattatattgccccatatatatatgtatatatgtatttgctgtgtcattgtcgtataatacggagacatgcactgaacaataatatgaagatttgaattttcccactactactttgttagatacacatgtttaaatatttatcattaataatatttttattttatgcaaattcaatagattctgtattaagttctcactactacaaaaaggggtattttcgtcgttttataagtgacatataaagattttgcgtcggtctacagaaccgacgtgtaatccgtagacgtaaatagtgtt

SEQ ID NO: 112381 - DNA, 2219 bp, Cannabis sativa
ttaaggtgtcgtctgtccagcctcattaagtcctaattttgcctacgtggcaatgacaggtcaccaaaaaattatcctacgtggccatattttattttatgtcttttgaatattattttcttattttttttacatatataattatttgttaaaaatactattattttcataaaaaaaaaactatcattcacttctctttttttctccactctctctctaaatgtttttaaaagttgtttattaaagaacataaactataaccaaaacaaagagctttgattacttttttaaaagaaaaacaaaggttgagataaagaaattctcaaatagcaaagtaaaaaaacaatgcaatattttttgtacatatctctcttctcatatcatattgacaaaaaaaataatttttttggtggatatgagtgttttgacaaataattataaaaaaaataaataaaattaaatatggacataaaatgaatacaatgacacctattaaaaaaacaactctatataaaatcatttaactacactaatgctgatatgatgtgtgttagacgtacctattttatgagccttcttacacctgctaatttacgtgccaaaaacagaatagtccaattgaataagctaaaaaagtaaatttccactaattttctttctatatatatttataaaatataagaatacacacaaatgtatgaaactaaaaaagaaggattttaaattggaatttttaccaaatattagattttggacaaaaatttaaaattttagtgtcacacgaaatttttgtaactttttataaaataatctaaaataaccgtaaaaaaaataaaaaattaaatttaaaacaacaatagatcaactaaaaaataaccgtaaaacaataataaaaccttaacacggtatacagtaagaaatttacactgtattttttaaaaaaattccgctccataataaaaaaaattaaaaatttctgtatatggtataaaaatttcttttttaatttcatacatattagttctcgaccactttttaaccggggccattattttcttacgttatgcattttttttttttctctatatctaatttaatttatttcaggtaatatttacagctctgaacctcttttgaaataaattcgaatacattaattttaatctcttttatttcaatttggaaatgatcatatttcaacattatcccttaattaaacaaacaaaagtctatcatcagaatgatgtgttgttatttcttaggaagtaatttaaattctgtatgtttatacaaatcttccttatataggcctagaagtcagaaatagcatatgtaagtttgcaatacgattacaaatatacatttggagagtgggtagcaagaaaagaactaattactgtattagccaatttcttcgtacttctctgattttggaatttttatactctagtgaacaattattagcgtctagaattcatatctacaactatacgcatctacttttaatgataataatatgatatagtgggtaataattagaggaggaaaatcactatcattgagttataacataaacccatatatttctacactgtatatatgtatataagaagaagattattctctcagaatcttaaatatagtgggtattattattacttgaacaaggttattatggcgacatatgcaactgtaagcatttcaaaagtcactaaaggggttgaaaaaaatcgcatctagaagggagcatatagtggcagctatttactaataaccacctctaaaaagaccttatttatggtgttggctatgtacaaataaccacctctaaagcagttatttgcaaatagctgccaacataagtgtttatatatatctatatagatataaatatactaagtgtttatatatatatatatatatagatatactagttactgtgggtttagaataataatttagaaaactatattgcggtcttagaataataatttatacaaaattttcatttaggacaacaccttaaataatattgtatatattaatgaggtaatttgcggcataaatacttaatgttttagattttacacacttaaataccttatttttatttttgcagacaaaaatatccaatgttacaattctcttacacctattactacaacttctgttaactcataaatatgaacacgtggagggtccaaatgcattatatttat

SEQ ID NO: 112382 - DNA, 3788 bp, Cannabis sativa
tccattttgagagagttgaaaaagcactatctcgttgaaaggttctatacatctgccctttctcaaggcatttctttagacaaagaccccgttttttcctcttttcggatggtaaatatttcttaaaacatggagtgtaaatcaaacccatatttgaattgaaattgagatattgatgcaagttcttctcttttgaatcacagattaatatttgaaagaggttgacaataaattctttcaaaattgactatttgtccccttgatagagtactattttattctcctgagactatttatattttaaagtcactagagctcctataaatagcctcttctttccatggaaaagaggttagaaaatcatcgacactcaaagcaaacaatattcatatttctacgttagagactagttcatgttctattatttactttgatattcaacccctaacttagttgataaaccgccaccattaactaaaggtaaaatatgttacaaaaaatttataaatacactatttataacaatagagttcaaatattatttttttttctcctcacctcacttcttatatctataaaaaattatttccaccaaaaaaaaaaaattataataataagttttttttttttccaaaaacacatgtagtatttatatattttctttaaaaaggaaaactggaaaagttacccatgatgtatgcttgtaaaaatagttaacgtctcgaagcaagacagcaaattttcaccatgagaaatcaaacatagcatataaaacctgaatactcaattagcttgatggatttctccatgaatacagttgtatcgtgttttagatcctaaaaagggcataccaaaatatttacaaatcaattaactatatatatgtaatactcatccttttggtgttgaaatggtggatacaacaacaaatatagggtcaagaaaatagtactctacagagttggaaaaattgtgaaagtaaattacatttcctcttcttcttctacagcattctctgtaccagcaccgttacttcttcttcggaaccgagacagaggcatgctgactgactgagagttctcagccaacatgtaaagacagaacaaacataaacctgattcatgaataaacattatccaaatgaatcgtaaatatattaatctaatggttactttgtcacaatttcatgattttcaaatgcctctagcaatcaataagattctaacttgggttatacgtagtaatgagtgaatgtattatataccaaaatataaaaagtttaatgaattagaaatcaagagggtgaagataaagcttccataacgagtaggcaaaaagatcgatgttttcacattattagcaagttctcagttactcaacgaggaaaaactcaatgatacggcactataaccaatagactcaagatctgtagacagattaccaatttaccgatatttaacagcattaagtcgtggtaaacttgataaaatctttctcaaagtaaacgtaaggctgttaaagtttttaccaagtttaccacatgacttaacgctgctaaatattggtaataatttctaatgatcttgatttagcagtcaagcaactaataaagaaagcatgagtgaaaccgaaggcccaagccaacctaataaaaactcacttgaatcttacaaattggtctatagtctacacaatctacgaatgtaaagggacatgttaaaattcaggttcaaataactcttgaaccaaaaactactgttaatgtcagtactactaattcctctacagagaagaatatcactcagagaagcagttctatcgtcatagttttataatataattaagcggcaccatgaatcatgaaaacatatcctatgtctactagtacaatctaaaactagggaaaccaacacaaagtaactgaagagtgttcttccacataaatactttacatatgaaaatggaaaatcattaatcaaatgaaaagaaaaaaagtttcacagaagaacacaatcgaaaactttattggatataaaaagttactggcccactagtacatcaacgacactaggattataacagaagtaccaaacttaccagcataagcaactgtaacaccagaaaccactcgtccaaaagctgacaaaacataaagacataagacgacctgaagaaatagaccaacaaaaaaaataataataatcaaatttccattatactattattaaagaatgctaaaaactagtgtagttttcttctcaaatgctgatcatatctccacagaaattcaaagccatctgctctttaagtaaatcatttcaaggatacaagatgatatatcagcagtcaaagggcctgaaatgaaatattcatgatcccaatgtggaatcccattaaaataaattataactttggttcagctacaactgagcaagtggcaagcaagtgcaaagggcacattcaaggaaatattgttgttgatgtaaaaacaaaagttttggcagactattagacaaagaatgagcgataagtgatttttctcatctgaagcaatacaaaaaatgattagtgccagtgctacacaactcttaaaaaccctcaacaaagaagaatcgtagtcaatgttgaccagtaaccatgatccaaaacgaaacaagagatgcacattggcatgcccagtagtcaattacattgtccaataattccatttagattcaatattgaataataccttaagaaaaagtctcttgtcatggccagtagccgcaaccctcagcacagactctgctgcaccaacggtattagctaaacacgccacaacggtattggcagtgtcctgagaaatctgccactccagtggatccacgggtaccctatacaaaattttaatacattaaaatacacatacatacatataaacacaaatttaattctttgaattttggtcctatagccaaatggggttattcaagaaaaggtcatcaatcatcactaagaatgacatgacccatataaccgtgaatcattattacttagttttgcaagtttttgccggctaattaaattcaagattctaactttcaaattctggtacgggaagaagaaattaaagaaaaccccttatacaactttcaagaaacaaacagtaaagaaagaaaagacgtacgagatgttgatttggcggaaaaggaagccaagaatggcgagagagcagaggaggacgatgatgacatcggagaaaagagtaagaaggcttttatccttataggcacagtggtaataaaccaaagaaccacataccagtaagattaccggtttccctatttctgatctgcaatccatctctctctctctctctctctctctctctctccaaacatgtatgtagaaagaactttggtcaatcatgctttggtcaatcatgcgtaatttggtcaatacatcaaaaattattttctttgcaatgaaaaattaagaatttttaattgttagcaaaaggaaaattaataattttaaattattaaaaaataatttgtcaaatattacttttttttttaatgaaagtcaaaagttttattaaataactaaatatgctattaaaatagaccgaagaagagggggaacattgctcatagtgaaaatacgatcagaccaataacaaatactgcgaataagataatgtaggggtgttcattggatcacatctaatggatttggacccatccaatccaatccaattatttattggatattggatttttccatccgatccaatccaattgaattga

SEQ ID NO: 112383 - DNA, 2010 bp, Cannabis sativa
aagccaaaattgtatcttaccaaaatgaagatacttcattgtgtaaaatattatttgtgactgacatgttgtgtgtataagctaatataaactgaaacaaagaagttaggctaagctaaggaccacccagtactaaggaattatgagatggacaaacaccagataataaataatcaagactagttcgatttagtatagcaaggatcattatcacaatatcttcgatcttcacaagcaaatgcgtataattaaaaacaaaactcaaattaagtgacgatgaaagagatgtacaaaaaactttttaaataattaaggtgtaaactactaaaatatttaaccaaagtcacaaaaaagaaaatgaaaagaaaacacaagataatgtctatggaaaaactcaacatctatatgcatcatcgtatgactctcattttcacccactcagtgatcaatcaatctcccgggtaccatatagaactactacacttattgagtgtcaagcagacaatcttgtataaacagtataaatttcaaactaaacaatttagactctaataagagagcattcaactaaataatgcaaaaccttttttgatcgttcattatccaagaaaaaaagaacaagcgaaaatcacaacaatataattaaaccaagttgaagataatcaaagaacttacttcacaggagcctccctgtccttcctcagcatcttatccatatcatcgtatggaaataccagattctgtaaacttgcagctttaatccacttgggcaagaatctcttcccaatcaaagcaaacaccctctctctcattggacccggtgactccctaggataacgctgtaagaagaactcagccaatgccagttcaagcacgtactgacccagaaagctcaacctcgaatggccagaccgaacgtgccgggttttcgtcctctcacacgccggatgttgaaatgccaaatagagcagcgtatcgaattgctttgctgggttatcgtccccaaacctatccgacggctcaagagggtacccaagggcctgtttggcctcaagcaagtactcttccatccaagtcttatccgcattgttaagccgcgaagaaggcaaacaagaacttagcaatggaaaagatttgagcgacaattgagggctattgagaaacctatctgttaatttcttgtcatccaaagggggtcttagtacgaacctcttaggaggaaccttcttcttcggagaagttgcccttttacgctcggcgagctctttaaggagtctttgtgggctgttttggggaagctcttgttgtgggtccacagcaacggcgaaaattcggaagttgtgcaaagtttggttggctaatttctggttttggggtcgaaactggaatgggaaagtggagaatgaagaagaaaaggagtagtttttacatgttggggatgaacatggtttggagagttgtatgaaggaagaagaaagttccattttttgtgtttgttcagatatatttgaaaaaaggttagtatataggggttgggatttagaagataatgggtgtttgatttagagggtgagaatgggattgggactgagctgccattgatggagggtttagctgtgagggttttagttttagaaggctggataaggtattaaggtgggaagagcccagcacacaagcttagctccagtcacttggattattatgcgtcggatcggactgcgggtcacttttttatcatattgatcgtcaaacggtgtcgtttatgttgttgttgtgttttttcattacaacaagaaaagtggctcttatcattctaatgttgattaattcgcggcataaatacttaaatttaatttctaattataaataaatacttaagtttaattttgacggtaataatacttaagttttaattctataatttgtgtagatacttgactgttaagtattaagtaaattgacaggtgacaattcctaattggtacaagtcattaaatttttattttt

SEQ ID NO: 112384 - DNA, 5104 bp, Cannabis sativa
  modified_base (5078)..(5079): a, c, t, g, unknown or other
ccgttatgagtaattactcttgaaaccgcggataggtttcttacttatcgtttgctttatcgggcgacgatagtgaagtatgcaggtcgtggttaacgagtggtaagggtgcttaatgaattatcgagatggtgtgattacaagtatgaaattgtataagtatgttagtgtgtgatgtgttctatttacatttattctgttatagtaagattagttggatttaataatgtttatggatttaattactttttttgcacagtctctgtgactcacgggtgttaaatggtgcaggtaaagggaaaggcaaaatttggcagccatgagtttgaggtctctgtaccagtgtacatatcagtcgcggtgctacgacccagtggaaatgatattctattttgaatgtactttggagcataaacttattttgtaaaaaaacttttgttcgtgaatgtaagtattttagaaacaacggtccccgtaagtaataatacttatcttttataattttttttttatgtatttgttttagattgccaaattttaattaatcagactttttgtatatttatataattagaaaaaaaaaattgtaaaaccacacacgtggtgtccttgtgtgggacaaggcgttacattaatatatgctgtaagtttaagaaatacattgttgcttaatgtgaacttggatttgtagtgacgatgaagatgtattttagaataaaaacatggagtttgatttcgggtttggtaatattaaagttattgataatattttgattgttccacaagagaagtttgagaaattggatggtgtaattgtaaaactataggggacggtttaaaattgtcccttatgctatatgagacggttttaaaccatagcctatagtctaggcgatgattttacactgcaacttatagtttttgctgaaagttttccaatattgcctattctatctgttttgtaacagtcgaataggtgacagttttagagaccgacgacaatacattagccgattgtttaaaattgttaggaaaacccagttttttagtagtgttagtttcttgaaatatcatttaaaaggagctatatattttaaggataaaatatattgaaggataaaacaatagtttttgtccctactcaatgtaaacagtttatagaggatcaatgattattgtgattgaaataatagatagttatagcatatttatatttggtatatcgaacattctatgtaaataagagtgcaattcaaaatctatagtagagtcaggatgtgttaataattgagaaaatttacctattgagagcttggttatataggctcgtggttttcaaattgtcaaagataatatcatcttgtagactcaattaattaattatttaaatcaattagaattcaaaaattgactatgtcaaatttcaaaatttttattaaattgggtcaaattgagaaaataagagaaatataaactcaattgttaattatgacaaattattgtcaaattaataaattgttatatttaaattttaatttatattattgaaaattgattaaaaatttaaatataatatatataatttattattcactaagattataattataattatatattatatatatatataatcaaaccaagtttgttgaattcgaatgtaaggatcgaaatttgattatatataatataatataattatataataataataataataatatttttatttaatactatatgatataataggaaactaattgaatttatcttttattgagattcaatctcagtcatttaaaataatttatcctattattttaattaaaaaaatattttaggtttggtggacaagggaccctgagagtagctggttgtggataatgcttggggtttagtgtctcatgtctggaacccaagaaagtgggtgctacccgactggccctcagtagatggaattgaatgcaatttggtaaaatggatactcgtatcgcacaactagaaggttaacttaagagtatttagaggttaccgactagatctaaggtttgggaccaggaggttgaggctagaaaggctgttaatgaggctttaaagtagaaagcgctctattggtaacaaagatcctaaatttcttagataaatgaatgggataaatgttctaaattcttctttattatgaccaccatccagaataggcgtaatgcggttgagagtaccttgaataaggatggggtgtggttaactaatataaaggatattggcaaagaattctttgtcttcctggaggaaatcttctccagcacagtccagggacttgtagagaatctggaccacctaattttggatcacctctccccctaagagcagattgatttaataatagtcacaaactatgaggaaatttaacaaatgctcttctccatggggagcatgaaggacttgggtccgaacaatatgtttgtcctcttctttaaacattactgaaacttggttggtgtggaattctgtgatgcagttgtagatccaaagaaagtgtcttaatcaaggcctatttctctttgcaatatggtatacaaggttatttccaaaatcattgcaaatagaattagaccggtgctcccctgactgattttccctacacatgcagcttttgttatggggcataacatccatgataataatgtgttggtcaaagaaatcattcactcgtatgccatcaagattgacatggtaaaagcgtatgataaactaagttgacaatttatagaccaggtgcttcgcagttttaaggcccccaaaaagtttgcaattgggtttgccagtgtagttctactacttcgtttaatatcctccttaatggaggaaaagtgagcagcttagtccctgagtgtggtttaagagagaaagatcatttattcctgtatctctttatttgggcagctgacatcctctcttgtatccttgagaaggccatcaatttcggatctataaaaggtatcaagttgagaagagatggtcctaggctctcccatctttttttcgcagatgaccttatccttgtgggcagggcgactattgtagaggcaaaggtttttggaaatgcttggagaaattttgtgattggtttgggcaacgtgtcaataagctaaaaaaatcaatcttctttagcaataacactagcaagggtatgaacagaggtattatgcaggagcttgggctaaacatggccactacaaacatcaactacctaggcctctcgttatttagatccaagcataaggatgcggacttcaattttattcttgagaaccttatttcaaaactccacgattggaaattgaaatctctgtcaaaggccggtcgtgctactttgatcaggtcaattgggcttgctatgcctgtttatactatgcaaactaccaagctttcaaaaaatatagactctaaaattgatggtatgatcagagatttctggtgggattgtgagcaaggaaactgaggtatctacttgaaggcttgggatcaattatgccttccaaagtccagaagaggcctgagattctaaaagacttttaaaatgaatcaagctttgctcgtaaagtagggatgagccctccttctagatgggaactcattgtgttacaaagtattaagagctaagtatcttaaaggaaaattgtttttaaagtgttcgtataagaactgggactcttggttctggaagaatgttgtgaaatctaaaaaaatcctaaggataggtgtgtgtaaaatgagttctaatgggaaagagaccaatatttagactgatccttagattttgcatggcaaagagttctaccctaagcccattactcaaagtagtgggggtaactaaggttacggagttacttttaaataacggggactgcaaaactccgtatcctttttgattcagaaaaaatgagtaacatcattaatggggggggaaacttaaggtagagataggtgggtctggatgaaagagccaaatcgtttatttactactaagtctgcttatctggtccaagctttagagagagccccaaaatgtgttgttgccccaaccctgtagaacaaactctggaactcaaaaattatgaagagacataaggttctttggtagtgtattctttgagatgccctgcctatccgggctctcctcgctcagaggatgagtattgaagaggtttcttgtcctctttgtggagagggtgacgaatcgatggagcattttttcctcttttgcaactccacgtaccatctttggaggtcttcccctaggggagttacaccggtctttgaatctggagctcgtgtttgggattgggtaacatttctctggaacttgaagtcgaaagaagtggatactaaaaagatgttcctctatccttcgattatagtggatatgatttggaagacccgcaacgataaggttcataataattcctcgggtaacattaagcaccctattgattgtatctctatttgttacacagattatgtgacttgcttatttgctttgacgttggctattgtgtctcctttttaattcatcccctcctccaaaagattggatcaaaatcaactgcgatattaaggttggtagttgatccatgggcatggcagttttagctaaggatcgcataggaaaagtttgtgggtagcagctaacatcctcaatttcacagatccgttgattgttgaagttgaggcgagtcggtttgcattggagttgcttgctttaaagcaacacctttttgtcttgattgagagtgattcagagaaggttatcaatgctctgaagggatcctactcttgttgaaatattgacaattatatgttttttatgctgtaattttttgtttatttctagatgttgtaattttgcggcacataatgtagttaggtaggcttttgctcgaaatattttggatttggtagacttctcctctatacttgacattattttttgtaatgaccgagatgtctaattcatttctcttttcataaactagtaaacatcccgcgcttcgcggcgaatatataaaatattttannttatatataaaaaataaattgtgta

SEQ ID NO: 112385 - DNA, 5492 bp, Cannabis sativa
  modified_base (5109)..(5111): a, c, t, g, unknown or other
ttctacttttaaaaacagaaaactgattaagaaagtattaccaaacaccacctagtttattgattcaatcatgaaaaaatggaatcatttagatttcattgttttactttacctcttaaaatctaaataaaatcatgagaaaattgtaatccaatcaaagagtttgctggcaagctcaaaattttattgtaataaccacaatatatataacaatttttttttaaaaaataataacattatcaaattttattttatttttgaaaagcttaaataaagaatagagaaaaatatatgtacaccattttaaaagattatttgagtagatcacttatctctttaggtatccaaatatattttttaattttttttttttttcataatagagttttttaggatcatgtacattatcaaaaataaaattcaaacaattatttactacacgcaaaagaaaaacaatcacaaaatatttaaactttattttcacacaataaactttaaaaaaaaaaattaaaatttatacaccctttataaagagatatactatagaatcacctaaaaatatatttaatttttttaaatgaaattcatctccattcaaaaagtattaatccttcttttcactaaaaaaaaaaatagcagaaagttcaaaagagacatttctgcatacgactaacacaatattgagattatttcgccaaacaaaaatcgcaactcaattaggagactgtttaacaaaatataaagtaacacattaacaccatgtaaaaatcacaataaacctgtacaattttcaatcactaaactgaaacaaaaaataacattataaaaaaattaagaatagcgtgaattcaaaaatttaggtttgttaagtaatattcttttaatcagctatttatttttaaaattaaaaaagtgaaaataatttctaaaattgtattttttaaaattatttttacttttcaattttttaattaagaatctaaattttaaaaataaaaaaaattcacttttaaaatttttttaaagagttttttttaattaatattttagactccgaccctaacttagaccttagactcagcctcagactcaacttaaataaaatcaataaatgaaaattaaaataaaatttatagaatgcttttattttttatttttaaaattaaaaaataaaagtaattgtaaaatatatttttgtttttgaaaaataaaaattttattttatttttgtgattaaaaatttaaaagcaaaagcattactcaatttctaaattttttaaagaaaaacttaaacaaaatgggcaggtagaagtatgggtttaatccaaagctcctgacccgacccgcttcccttcgtcttcttcgctttccatcgaatgaaagactgaatctgctggaagcaagaaaaaatctccacaggagagaatctcaacggctttctcctctctttctctcaactcaaccatggctgccaatttttggacctcctctcacttgtatgttcccaactctccacacacctatatatattttccttttgtagaactctttcgttttccttttttttttaaaaaaaaaaattcaaattgatgcagcaaacagcttctggatcaggacgaggtggatgtggttcacccattggataaggagaaaggcatcactgtcgaagacttgaggctcatcaaaatggagatggccaattgtatgaatattcactacaaaattcaaatcgtaacaattttcttttttatactttggggtttattttcttgattacaatttaatggtgctgaatttcaacttcgtatataattttcttcgttctctaagtaatcacactgttccatctctctggtttaacctaaaatcacaaggcaatatttattactttatcgccctgactgatcatatttccccccctaaaaattaaagctttacaactaccacgctcgtatgaaggaaattcttcaacttaatacccttaattttatgagaataaacatatattttgatttgctacatctttttctttcttttgccccagatatatggagattggctgctcaagtgaaagtgagacagaggtttgaattgaatctgtgatttgtagttcttttgtatcataatgttgacaaaatgataaccatgctaataattttcattgtgaaaacacaattttcgatctgcaagtttgagctttggacattaggacttttatacaggctttaggtcattgaagtgttatcatcatcttagcataatgtttcttgttaaaatttcattttttgctttcatcaatctatctgactttggtatccactgtctttttttcttcttattccccagggttgtagctactgctgttacatatatgagacgtgtgtataccaggtaccttgggtgaaaaattgctttgtgatctgaatcttgttgatttttctttgattgcataataatatggtaggaaggagttttctacatagactttgcaatttccatgcttggattactaagttttatctacttcactgctacaaggatgagcctaaaatacataatatgaccatagccataagaagcttagaaaatctaacccttggaaatgtaccacaatttattcaagaaacttctgtttttgatttcagaaagagtatgattgaatatgatccacgtcttgtagctccgacgtgtttgtacctcgcggcaaaagcagaagaaagcacagtgcaggctcgacttcttgtattttacatcaaaaaacaatgtaaactctttttactgaacatgtgatttaaaattttctaatcattattgctaatattcagtttaaactctgaagtcctgaaaaccacttctttgattttatagcctcagatgaaaagtacagatatgaaatcaaggatatacttgaaatggaaatgaagattttagaagccattaactactatctagttgtatttcatccttaccgttcattatctcagtaagtatggtgttcttatttaactcggatgacttgcattagcattttcttttatctttagtttgatcaaatagtgtgatatggaatcaaagattttggtaacagtaatgaatcaaaaatctcagtgttgaaatgttgtgcattttcttacaattaagtcactgagattcaagatatttttcactgagatttttgtttgttcatgaaatcttgcacaagatttttgactttaattatgcggtcatgttagattttcaattttcatgcttggattaatctagctaaaatgtctttcatttccttcaaagatttttgaacaagccatgaaatctaatgagtgattcaaccttttcgttggcaggctccttcaagatgcaggattaaatgatatacatatgactcagttaacttggtaattatctaatctaccgattcattatcttttagtacaatgtgtgatttgaattttcattttctattatcagcagaaacttatttaagatcttcacttttaaaatgagaacaggggacttgtgaatgacacatacaagatggaccttatacttgttcatcccccacatcttattgctttggcttgcatatatattgctagtgtactcagagataaggatacaacttcatggtttgaagagcttcatgtggatatgaatgtggttagaccaagtttataactaaaaaactttacaacagcccatcattctgctaattgcttattcattcttgttaagcttgaaagtaattatgtaattatgattttgcaggtgaaaaatatatctatggagatattagatttctatgaaaactacaaaactattgctgatgagagaagggttagtgtatccctagccaagcttggttctaaaccatagatggttggccattactgcctctagccatgaagtgcttataattgcaaccaccaatcatttaccttcaaatcaaatgtacctccaccttgtgacaattactagttaattattaacatattggggaagtggagtcaatatcacaaaactttccctaataataattttattcagtcaatggttgcccattatagtaattttgatgttagtatgtgaacattgaacactcttagaaatcccatcatgagaatcaattttgcaaattcagaggaatatatttggcacaggtcttgacaatttaaaaggacaaaatatcatttattcaaaaaaaaaaaaggacaaaatatccattgaacagctttcttccaaaaagctttcaactttggatataattcttcactttttccccttcttagcttgttttttctctgtcaagacaacagcaacataacaaaattttagtacataaaaaatagtattttaatacataataaaagttaggtaaatactattttgcaaaacatcaaattaaattttaataataatatgtagactagagatgttattagaatattgattacattttcttcttttgaaaaaattgttcgtgttatgaatgtgcttatttattaaaaaaaataaacgaaatattaaattaaagattttttttgaactattttaaaaatataaaatttgtattgttatttaataaaatagaaatccaatgtaaaaatagaaaatattatttaccttaaaaactaattaagaaaagaaatggtatttagaataagaaaaagaaggaggtaggttacctaatttcctcttagcttcagattttgcaaagaagtccctccactcatcagtcagcacaaaaataagctcatcttcttcctcttcttctaacccataatcctcttcctcctgcaacaccctgttcataattcaaaatcactaataactcaatttcaagtttgttcatcatattcctacaattcaagaatgcaagaatcttaccgaggagaagaatctacgactactcctccattttctgaagcctccactatatcattattggggatatgaacatgggaacccaaaggttctagggttttgggtaaagaagcacaattagggaatacatggcggtggcagtggtggtggtggtgatgaggcaagaagaataattgattgtgatgatgatggtggtggaaatgatgatggtgatggtgatggtgatgnnnatggtgatggtgatggtgatggagattaatacatgatttgattccgtacttgggatccatggatggacgcggatagctgaagctggagctaagctagggctctgctctgggctcgggtttatttgtggagtttattcgtacgacatctacctcatcatacgacatgttttaacctctcttaaaacattaataatttatgacacgtttactatacagtattcagaatcggaataaattagaggagagaggagaaatgtaacggagaaaataaaaaataaaaaataatcggaatcaatatttgtaatatgttgtttactaaacatttttggaaattgaatgatagtgatttatcttgtttactttattaggaaacgtaatcgg

SEQ ID NO: 112386 - DNA, 4160 bp, Cannabis sativa
  modified_base (459)..(460): a, c, t, g, unknown or other
  modified_base (881)..(895): a, c, t, g, unknown or other
atgtgaaccatgcaatataaaaacgatttttaatcttatattaattagtaaatctgataatattgaaatgagttttatttagggtacaaaacccaacaaaaataggtgtgagtaggccttcgcatgccccttcgctctggatgtttcttggttctgggaggccctttagcgttagagcaaaattgaaggactaatggcacgattactacacagtatgtaacaaaataaatgaagaataaccggaatcaatatttgtaatatgttatttactaaaattatttagaaaaaagaatgataataattcatcttgtttactttatcaggaaacgtagttagaatatttaaattgactaaattatccttttgagttaaaccatattatatggtagttattgtgtaatagatattttaaatgattaaattgtcattataagtttaaatttaaaaataaaataaaannaaataaaagtcattacccttaatggcattacttagaaaattggtagggaagttctcattttcttttctcacttatttaatgaaattttaccttcctaaatttaataaattaaataaacaaatataagggtatgattaccttactgttgattcctattacttattagtaaacatgtggttaaaattaatggataattaatttagccctttccattaaatgcaatgtgtcatgaaaaccgaaatagcaataccaatgactcaattaaaggaggaagaggtataagactcctatagcatgtgatccctaagattgtctaagcactgaaaaaatagagaagagatctacaccacctaatctcttttctttaatagaaaaaaaaaagaataagaaaaaaacgtagggttttttcatttttacactnnnnnnnnnnnnnnntttttttttttgttttacatttttacaaaattctacatagaaatccctattgcaactagcgctgcaaccactctagaaacccaaactctaaatttaaaaaaaaaaaaataatatttaaaaaatagtatatggtaattcaaaaaaagaaaaaaaaatcattctaataagaatatcatgatatactatcggggtacaaaattggagatagccaaacaacaccgcttattcgagggttgcacaaaatcagtcttttaagcaagttctatttctcttttttctgttctctgatcctataaaccctaacccctaaagtccccaacaaagaaaggcggccgaacgctacaggttaagtcagacagaagccatggcgaaatctatgagatcgaagaaactgaaacgtctcagggccattcgtagagagatggtggagcccctatacgaaaagaaagaacttgcgaagtacgccgccatggaagccgccttggctgcccccaagctccctgttaaacctatcccgaatgctgaatcttcaatggagctcgtccccaccaccagtgctgctacaattacaactaacactatgggtatattctactttttcaatttactaagttttctctttgagtctcataaactatatgcaactatttataacttgtggctgttagtctacctagttatgttagttttgatataatcatcgggtgctgtctaggctttgttttgttttgtttgtttttcttttttgttttttcgcgatgaatccctagacaaaacagtagtttgaaatttgcttgtaagtcgagtttaatttgatttaaaagtgtatagcttctttagagtctcttagcagacttagttggggttgattagttgtgtcatgaccttatttgcacctttgtcagcgttttttgttcttactacaaccttagggctagttactatgcacacccaaatgttatgattattcatcacctaactcatatgcaaactatgaacatttaattcacgattcaattattccaaaatggcagggaatttgcattaatactcaatacttgataatggtatttatagcctgtaggtgatgttggctaaggaaatgctatatatgtattatatataagcaagaactgttaactgcaattcaatctaaacttgaatatattccttttgatttgtggataccctttgatttgtttctgggatggtttggtcataaccgcgctgttaactaggtgatttgttattaagtatcccattagggtagaggccgtgaagtttttcaaaatgaaactccacatctataacgaaaaaaatgaaattccacatttatagccttgttaactttgcaaatttcttaggctttgctttggcagctttgtcttattttaatgacacacgcaacagatatactgaaagataaaaaaaaaaaccttcctaaatcatgtttattactgaaaactaggtttcaatagctagaactctacgtagccaattctgcagcatcattccatgtgaatcgttctttcttgggctgttacgtgagaagtctagcaatttggatagccttgtatgaatttactttattactcagcaagtcctcagaaaatatgtcaatccataaaatattcttcagacatgatcaatatctttacctcaatctttgaatttaaacatacataacatagtttgtctcgtcagaatatgaactttggcctgttgcgtattttattacgtagatgtttacttgaattttgtttattctgttaaaacatatgtggacaatttttagccatgtatatatttttttttgtttattttgttttaggcaacttaccttagtgtctgtatgctgtgttgcctaaaacagatgtggatatggatgataatagtaaaaccaaggactcgcttaaagcaattgggggtgtagggaagatgtccaaaaggcagttcaaggtgggtaaaagaaagcgtcctggaaaggggaaaggcaagggcaaggtcaagagacgtcacatttaactttttaagcttagcttttcataaatttcttttgagggtatcctgtttttgtttgcacactattaagatccaattcggactatagatacatttcaatgatttacactaggtatattatgttttaaacattgatcgggtatcaacactaaattttcaattatattacttaggtatgattttctgtccttgttagtttgaaaaaattatatattcctgtttataacttgttactgctaaagatcatttcctatgggaaatttaaaatttgtactaaatttggcaaaaaaaaataaatataaaataagtttgtgttaatattgacttactatttacaaatgtatgccaaaaaaataattaattatattaatagttcgcatgctgtttgtatttttttataataataattgaattataaaattatattaaatttaaaaaatttatatttcttaattattgtaatggacgatgttttaggttacatgatgcttcaggagtttttactgttaagagtgcatattctctgcttcaatcaatgaaaaccagcagagatattccagataactctagtttctggcagctcttatggcagttacagctccctccaaaggttcttaattttctatggagagcttctacaaacagtctcccaactcggtttcatctttccacaaaacatgttccaattcctgcaacatgtccgttctgctttgttgctcctgagatgactttgcatgtgctggtgcggtgctcttttgctcaaagttgctggagcaaggttccaattactgttgtggcgcctgatgcaatgttgttctcgagttggtttgaagcgggtttggtatcgtggaacacgaccgaggctcttgatgctggtatggtctgtgggtcagtttggactcatcgtaacgatttggtttggaacttcaagcaccctgatgcgagtgaggtagtggcaatggcaaagttaaattatgttgactggtttactgctcaaaaacttaatttcacagatgtaagcttaaactggccgactgcgctacccgtggagcaatggacagcactcgattttctttttgtcaaaattaatgtggatggtgcactttttcctgcccaagggcggtatggactgggcttgattgcaaggtctgctgcgtggttggtcttgggggccagaagtttatctagagaaggctctttgcaacctcatattgttgaggccattggtatcaaggaagctctc

SEQ ID NO: 112387 - DNA, 6472 bp, Cannabis sativa
  modified_base (1779)..(1782): a, c, t, g, unknown or other
atgaaaaaaatttagactaaaaaatttttctggatgccgaaacaagtcaagggtgcatcagtacatctcttttcaaggggtgtattgtagaatcacctaatgttttatagaaaatataaaaacttttttttgtttatatataaatatatatatatataatttttctaaatttctttgtataataataataatatgtttttttgtgttattgtataataatttcctttttttagataaaatgcaattctttgtataataatttgaaaaggaagaaatttgtatagtttaaacttcaagataaaatctttaataatgataatgggatggccaataaccgcaaagaaaaattaattatgttgggccattctttttgaagggttttcgtgcaatttaatttatattattttacttgtaattcattcagttcgtactaagagggaattcaataaattattttgaatgagttactttttaatatttattaaaaaatattttttttcacataattaatagtaaaaaaaataaattattactattttatgtctttaataacaaaatcaaataaataaaataataaataacaaataatttcaaaaaaaaagaacaatatatatatatttaattttgttttaaattatattctccttatataacatgtacaattgatttattaagtttcatatatattagattactaattttttaaattaaaatattaattatatatataatttttaaaatatatatgtggattaaataggttacttttatatgtcaaccaacattcaatccacacaagtacaaattttttattttccaattggatcgtacgaattaaattaaattgggtattttatgaacacctctaattcttttcaacaaaaataaattaaaaaaggggtttggacatcatttgtaagggtaatttacagtaaaactctctcaactttgaagttttgcacgattaactccctagactgaaataattagggttgaactcccaatctacagaattgttttgctctgtactttttccgtccattttagtcaattaagtgccaaagtagactgttacagtgtactagaatgtagacgtggcaaaattccattaatccacctaatattaactatttacttattatgaaaaaaataattaacaaataaaaaaattattaaaatctaaaataataatttaaaaataattaacgtctttttttcctttttcctttttcctctttttctattttctttttctttttcttcttcttcttctttcgttttctttttttctttttaaaaaaaaaattgcaataacataatcaccattccaagccgacctgataaaactacacccaaatatcaaaatgtgaacaaatattatacacaacactaattaatacaaataaaatatattaaaaaatagatatgaacaaatacaccaatcaaattaaatagaaaaataaaatatataaagcaaatatatttagatttgagaatagatatgccagagtcgggagagacgacatgctcgtcagagccaaaacctattagaggagggagcttgtaacggtggatgtttgagcgtcgtcgtcgagagaaaaagaaggtcagtcgtccttgatggtggacatctgtgatgtcgtcaatggtgggtgtacatgtgagggagagagcttgtgcaaatcaatcaaaacccacaaataaaaactccaatccaaaaaccccaaatgaaaactctaatccaaaaatcaatcaattaaatgtaaaagtattgagccnnnnataagaacatgggctactccacttatcaccaattggttttgagatggaaccccatgtttctcaacatagtattagagctatatccctagcgagcttttgatccacccttatgcagatgattagccaactacataagatccagatggtgcaaagacacttgagatctgaacaaaaataaagcgagcaaaatgtcacgacatgtgataaggtgattgaagattgatgagcaaaaatagctattatcttgagaaagatattgagaacattatctcacatgaattaaatgattgaatcatatataaaaatatgagctacttcacttatctccaattaattttcaaattgaaccttataattctcaatgacagagcaaaatgattctataaattaaggagttcagtcctaattatattaaacttcagagaatttacctgtaaattaccttattcgtaattatattctagttaatttattaattgcataaaatataattacaagagtgtggttaattatataatttatacacaaaagaagtgcacaaataccatcactaatttttgacttcaactttggtcacttttgtttcaaggcacaatatagagaaatgctaaagagtaccagtggtgattagcaccctcctacgtatcaatattgctattggtccaattaagtatcgattttcatgtagtttaatataatagtttttagctagggagtatcgctaaccattcgcaacgcgacatgtcgagaaggtgctagacaccatggtgcctaatgacaatgctacacaatataatatactcgagttatggtccttatggaagagtgatcagttcgatagttttttgaaaatatataatcaatagttttctgtatttatagcagatcgaagagtgatcaattcgatagagagaatcttaccatttctcatatttatggaagggtcggtcttcaaattgtaaggccctagaattataagatattaggaatgacaatttgggttattatatatataatacaaaaaataattattctttgtattatatatcagatcgaggagtgatcgattcaataaattaagagagatgcttaccatttctttatagacaaaattgcatttagaaacgtcatttacatttcatttatagaaatgttgcgaatgatttaatttttttgctaagaaaaaaaatgataaaataaatttattaagaaccaagcttgcccggttctatagaatagaacgcgaatgatttaatttttttttttttgataattaatatgcattaagacagaagaaactagtgaccacaagagggggccacttcccttaaagaaccttgtaactgcttcctttgaactcgggcccagttagcaagagaattcgcaataacatttaaagatctactaatagaaataaacataacatcagtaaactgtttccttttcagcaaacattcggaaaaaaaaggataggaatgccattggatcggcattgagtttgagtttagacttgtaacagcaatcttgcaatcagattgaattgccacacggtccagaccaagctactttacagttgacagagccagagagattgcagcaagctccccctataggacattttccactctcaagtgatcaacaacaagatagtcttctgagccgattaattctcctttgtagactgctgcaattccaacagaaccgactgcaaccaaagcatctacctggaacacatgataaccttttgtatctgtggagggggtcgttataatatcttcatttatagtcccctccaaatcagttggattagaagagaactcgaaagcacgtttagtgcaatctttgaatatctcctctagagtccactgtttgttgttgtttctaatgctattgcgccagtaccaaaggacttcatagatgcaaacaacgaaaattttgaggtccatatctcccaattcagtccaccataaaccaaagtccatcacatttctccattggaaggagtctaaacgcagtccccaagcacttttgaaccataaacctctagttaagctacacttagcaaccaggtgataagcatcttcgagttcaccacataagacgcacgatctatcagcgagattgaggaagctcagttttccaagggttggcaggcaatcagccaagattttccacataaacaaagatagtcttggatgcatcttctgtttccattgttttttccagataggtgtaggggccgagaatcttttctcttggtacaaccaatacgcacttttcacagagaagttccctgatttcgtcggtttctagaataaaatatcttctccttctaatagcatcttgatactaaggattgattcagcaatttctcgatcaaaacaggctctaattagggactcattccaggaccgagttccatcattgaataggtcactcaccttattgaaagcatgtattcggttacagtggaatccatctttcaattgttgtatcgatttccaagggatccatggctttgtccaaagatcaatctcaccattagcaactacaaaaccagcaccagctacacagagttccctagtttgcagtaagttctcccaaagtcttgagtctaaatcatgtttttccacagaccaagcatccaaattagagcagtattttgccctaagggctttaatccataacttgtctttcttttggaggatttcccaaatcaactttgccagtagagcagtattcatgtctttaaatcttttaaacccaagacctccacagcatttcggttggcataagctaccccagccttttagaccgcagtatctttgtttatccgatcgaggccctatccaccagaatttcgccaaaagtttgtctaactcttcgcaaagagtctgagggaccaaagaagtagccatgaaataggtaggaatactttggagcacggcactgacaagagttgttctaccagcctgccaaaggcattttgctttccaaccttcgattctgttcaacactttctgtctcaagaattggaagtcatttcttctattggcagtaaagaagaaaggatttcccaggtacttttccttcgcattcagcttcggcatgcctataatctccatcaatagattctttgtgtttggagagaataccacaccacttttttccttgttaatcttttgacccgaccattcttcatattgtttcagaatactcataatggagcttgcatttttctctgttgcttggcagaagtagatagcatcatctgcataaaacagatgggaaataggggtggcatttctagagattttaatcccacaaaggttattatccttctcagcctttgagagcattttagtcaagacctcgctgcagagtatgaacagaaagggtgatagagggtccccttgtctcagcccttgattaggattgaagggagcaaggggtgcaccattaagaagaatcgtgaaacttacagaactaacacaagacatattaagcgagatcaccttgttactgaatctgttggcttgtagaaccttatgaataaacttccactcaagtctatcataagctttactcaaatccgtcttgattgccattacacctcttttgcctttcttgttcttcatggcatgtaaaacctcttgagccaagactgagcattctgcaatccatcgacccgggatgaaagccgattggtgaggggatatcagcctatctaggatcttcttcagcctatcagtcagaatgcgagagattattttataaccaaaattacacagactgatcgggcggaatcgatcgaaagtgtttgcattatcgctctttggaatcaagcagatgaacgtatgatttagagcaggaggaagaatgccactagagaagaattcttgaaccattttgcagacttgaccaccaaccgtaggccagtattttcgaaagaaaattcccgagaaaccatcgggtccaggagatttgagcggatgcattctgaacaccacatttttgatctcttcttcgctcgggatgctgcaaattgcttcattctcctccaaagtaacctggtctgagaaaatttaattgatacatgctatttacactatagttatattaggtacatttatgtatagtcttgttcctctttttatatgtgtcagaataattttgtttttatatttcttttaacaatttagtcttttttaatgagcttttaatatatatatatatgtatttatttataaattttttaaatattataaaaaaattaatcacggactcatatactagtgagtctcttctaagcatggaaggttacacgttttttcattttttttttgctacttaattttttttacttttatgtagctcaaccatatatagtaaaattattatttttttataataatgataaatttgtcaaatattctcttttttttttatattttttttaataaataaataaaaaatatttaaattttaataaaatttaatgtatcaaacaacttagtaactaaataatatattttttttatttttatatttagacattacaagattaaataaagataaacttattttttaaaactattttaataggtttataaaataatttgtaaataaattgaatagtatctaaacatcatatgagttacattagaaaaaaaaaaaaatctaatcttaa

SEQ ID NO: 112388 - DNA, 2407 bp, Cannabis sativa
cctaaattgtgagtattaaaataggtaagggtaaattcttaaataatttaataataatagttattggtgcaaatatttcttatttttactagtgctataaaaatgtggtgtgccataaatatgggctaaaccaaaccgcgctataaaagcatataaattatatggtatggtgcaatcaaaaatatagattgtattgtgttgtatttagatttatgacgtgtttaaatttgtgtcatggtttactcgagttctattttcttatacagattcaaattcatactctacttgtttacattttatttttacaactgataagattattaataaagctatgtatttttttagaacttttttatataattttttacataaaattatagaaaaaaaattagaaccattaaaaaaaaaattgaatataaatatttaaattattattactgttatcaaatataaaatttttaacatgttacgcttttagaatagattattggtatttatgtgtcatacttttcggacttgtcatattatatcgtgctaagcttatattttacgtgttgtgttatgctgaagcctatattatccgtattgtgttgtacaaatttataataccgtcttgtgtcgtgtcaaatactatattttttcgtacatgttcttgctcgtgtgatatcaaaaaacctgactcatatttacaacactttttcttatttatattttagttaaaatagttaaaaagcatgttttaaaaaaatatcaaaaattattataaaaaaatattaaaaatgttattttataccaaagttatatttgattaaatttataattgaatttcaatatatgtttagtacaaatttaatatttactttttatgaaagtatatgtaaaaagattattaaattattatattaaaaagttaaagattgtataacaataacatataatattttttttcgtggaaagattgtaaaatatattaattagtgagcaagagtaaattaagaaaaagcattttttattgtggcacaaatttacaacattaccattggagtattatattataaaaatatgctttaaaaaaatagtaatacactactaagtattaagagcatcaccaaagacaagacaaatcttttatttggtgatgaattcttatctaagaaatttggagtgggaactataatccacattatatatgccgtgtgcactgtagcacggattgaatttaaatttaagacttcatttttgtcaatactagcagactataacaaaacaacataaaattgtttaattcttttcttaattaaaaaaaaaaaaagaaaatattttttaaactcttcgttcatccaagttcatcagtgttactgatcactttcgttcctttatttcttcttttaattactctgtcacatagtgatgtcatcctgcatacataaaagcaattagggggacttttctttctcttttattattgtccttgtcttctaaatcataatttagagtgttcattcattattacatttacatccacaacaattagttttattttgtctttaatttcttcttcttcttcttcttatgtaaaattcaccacaaatatgtatatatgtatcaactcaaccccacacattccctaaagcaaagtgtaatcagtcaatgtttccaccttgttcatgtgcttctaaacacttttattcttttgtcttttccatctggatggtgaaagttaagattattaatagggacagatgttggacttgtggaagtataatattaattaaatacaaagaaaaagagtgttgttgggtgccataggtttattttatacttattagtactcctctttattaattaattattcaaaaccaataaagtggtatatattacatttatttatataatgatactactaggatactcacacacacgcatcacttgagtagtacgtagtgattattatgtcaatttttctaaaagatagcaacattttcaacaagtgtaaccatgtattaataatggcgtgaagaaaatattatccccacctcgtttaaattattcaatatatatgtatatagttattcaatttttgttactgaatattatcttttgcttattaatgcaattcatgaccctctttgagactttaataagaaaacatgtatatttcatatatgaatgtgtttgaattcaatttgagaattgttttttagcaaggaaatgcccattcaatgtgatttggtgatagattcatactcactacaatttatattcttatatacataaatcattatatttttctttccgtcatttagatatattatatttttatatatatatatagggcaagactatggtaggacctaactttttttaaccattgattttaaatcgtgtggttattaagatataaggt

SEQ ID NO: 112389 - DNA, 1371 bp, Cannabis sativa
ttaattttatgtatacaattaaatacttaaaatatacaaatttgagctttaatcaatcacctctttcattcagaatatgcagaacaaatctagtcataaggtcaccaacaatacgccaatggttggagtaaaatgtcactgacattccatctggtcctgggctaccatccgacttcattgatgagagagaatcaaagacttcaatggctgagtaaggtcgagtaagggcttcatttgctgctgcaaattttatacaaggaataaccgaggtgacatgctgaagagcttcataatctattccatcagtagaataactttgctgaaaatacttttggataatgttacttatgcctgggagagatgagtgctcaattccttgatcatcaacaagcttacaaatgacattattgttctgtctactggtggccttctggtgaaaatatcgggtataagagtcccccgattttaaccaagaaatgcaagaacgttagtgccagtaatcttcttcttgggcaagtaaagcatcaagtatattttcacccgattttaactcttcatagtgtactgaactagtgttgttagagttattcaaagcagccactttctcttgagaaagttttattctttttagaagatcaccaaattttccatggtgcccatttcgaagtctgtttgcacaagtagtgagattttgaatcagttgaaaacctagattggtgtcagaatttttccaattacagttgatgatgtcgagacattcttcctccaacaaccataactttttaaatcagaattgagatttgaatttaagaggatgacaggccgaatcaacagccaacacaacaacctttagagcgtgatgatcagcttgaaagaaatcaaggtgagtaacagtcggggtgctgaaactgcttgtccatgagttgttgaaaaatccgtaatccaaccgttctttaatattaatgccattaatactattattgtgccaggtaaaatgttctccttcaaagcttaaattttgtaagccacagaagtcaacagtatctccaaaagcatctagttgaaactcatgatgtaaaggcccaccaaatttttcatcgtgtgaaaggattttattaaaaacacccttaaccaaccatgggagtaaaggagcagtattcttaagtttcttcaagagttaccgagtaacatgtctttgagaagtaatgggagctccatagaaaccagaaaaatgaaaagaagggccatcaacaaacgccatatagcagtcaacaaaattagtaccataattaaggatagttacatttacattagctttccatagaaaaagaagaccctgttgggttttgtgccctaaataaaacccattac

SEQ ID NO: 112390 - DNA, 4530 bp, Cannabis sativa
gtaagtttgtagagtctgatgagaagaattttttggggctctggagggattttcttcgagttagagtcactatcaatgttactaagcctctcaaaagacgtatgagactacagaatacggctggaattgagttttggacaaacttcaaatatgaacatcttcccacattttgctttatatgtgggatcatgggttactctgatagattttgtcctcagaggtttgatgctacagatggaaagttggctaaaccatatggagactggatgaaagttcagcctagacgcaccagccatatgattgggaagaagtggctaaaatagttcagggtggcaatggaagagtgtcagatgcagagtaaccaaccagaatcaggccatgacaccaaaggaactccggtggatcaattaatgtcaccagctattttgaatcagattgatgtgatcaaggagaaaatcgggggtcaacgtccagcaaatggagagggagttaatggacataatggtgattctacgattggagagaaatgatgcatgattgattctgattgtgagggatttaatgcttttaatgaagatgaagattgtttgatgatagttgattcatagagaaggagaactgagttgggccttggtgtggatttagaagacattctagatgggaggagttcggcccaagttcaaagagattcaaaaaatgtggatttggtgggtcctggtgtccagccccacctaccattatgagtcttttatcatggaattgccatgggcttgggaacccatggactgtccaattcctaaaggatatagtaattcaaaagaagcccagctttgtgtttctttgtgagacactttgtagacgtgaacaagttgagaaggtgagagattgctgttcttctttggagacatgaagatgaggtttctcttattcagtttgctgataactatatagacgtggaagttaatgttgtgggacatatgaaatggaggtttacaggtctatatggtgaaccaaaccgcaataaaaggaaagcaacttgggatcggctccgcaatttagctgctacatcaaacctcccctggtgcgttatgggagatttaaataatgttgtgtcgcatgatgataaacaaggaggcaaccggtatccagaatttttgattcaaggatttcagcaagctcttgctgagagtgggcttcaggatatggatttatgcagctatccattcacttgggaaaggggtagaggaactgaaagttggattgaagtgcaccttgacagagggttggttaatcaatcttggttggacatgtttaatgcagctaaactttataatcttgaagtgtcaacatctgaccattgcccgatcttcatggatttaacttctgagttaatgactccttcacttcgaagatttagattcgagaatgcatggcttcgagaacctttgtgtattcagattgttaaggagagttgggatggttctgttggcagtgatatccaacgtaaagtggctgtgtgtagtagacagttgcaaaattggggtaaggagtatactggtaaattcaaggagagaattggaagatggaaaaaggagatgaatagatggaaatctgggcgtgatgaatcctctattatgaatttcaaacaggcgaaaaaaaacctggttgaaacttatgcacaacgtgaagtgttttggcgccaaagatccaaacaactttggctttaagatggagacaatagcagcaagttttttcatgcctcagcttctgcttgtcgacgaaacaattctatccagagactgaaaaatcctgctggtaattgggttgattggaaaaatggtttacccgatgtcatgataaattatttcagcgatttttttgcctctgctcaaacgaattagattgaggtcactgctacagttcaatcccgtgtaactgatactcagaacgaagacttgatgcagcctatttcggttgaggaggttcgtaaggctctcttccaaatgcacccagacaaatctccgggacccgacggtatgaccccaggttttttccaaagatgttggactgtagttggtactgatatctttaaccttgtcaagtctttttttgattctggctgttttcctattggtttaaatgctactaacctggttttgattcccagaaagaagcaaccccaagacatgggagattttcgaccaatagccctatgcaatgtcctatacaagataatatctaaagttattgctaatagactcaaaaaagtccttcctactattgtatccgagacgcaaagtgccttcttgcaaggcgactaatttatgataatatcatgatctcttatgagattatgcattatttgaagagaaagagaagaggaagagatgggtttatggctctaaaattagacatgagtaaagcttatgatagattggaatggggttatatcagagccatgttagaaaggatgggattcgatggcaggtggattaatttggtgatgttttgtgttagttcagtgtcattctccattgttcatggaggccaagaaatgggccctattgttgcttctcgtgggatcagacacggagatccattatctcattatctgtttattctttgtgcggaagggttctcgtcacttttacgtagttatgagcaaagtggactacttacggggtgtaggattgctcgccatgctccaaatatttcccacatgttgttcgcagatgatagctacatatattgtaaagcgacggaggaggaagcttacaatatcaaggagctgcttcatacattcgaattggcatctggccagaagataaacttcttaaagtcatctgttttttatagctgcaacactgctgttaggtttcgggatacaatttgtgacttgttggggatattcaaagcagatgaaaatggttcatacttgggccttccatactcgattggtaaaaataaaaatgcaaggttttcttaaagacaagctaaggaggaagagaattaatggttgggaagggaggatgctatcaagggctggtaaagaggttttgttaaaatctgttgctcaagcacttcctagttatgctatgaatgtatttttactcccagttgatacttgcaaagagcttgaaagactaatggccaagttttggtggagtacgggttcatctcaaacaaaaggtaaaagttggatgagttggagtcgtatgtgtcgtcataaacatgcagggggtttgggattccgggacctacgagattttaatttggctcttcttgggaagcagggttggaggctgctaactcataactcttctcttgtgggacgtgtgtttaaagccaaatattaccctgcaacaacatttctgaaagctgaattgggtgataacccaagttttgtgtggcgtagtatagttgaagctaaagatttgttggcatctagtgttggacgatcgattggaacaggggaatttgtctctattctaaatgatccttggcttcctgctgaaaatccatttgttatctccaatcattctgctttaattaaccaacctgttagcagtcttatgagaattgactctagagggtggaatgaagatatcattcgtgatcttttccaggacagagattaggctcttattctttcaattcagcttagtgacaatactttggaggatcgatggtgctggaagtttgagaaacatggggaatacacggttaacaatgcgtataaacatctccaagtgctcaagggagcttggcctgctgtacaaccatcgaacttatggcgtactatatgggatcttaaagtgccccttaaggtctgtaatttcttgtggagggatgcttctggttgtttgctgagctgtattcaactacaaaagagacatgtccctattagtgttatctctcatgtttgcaaagtggacaatgaaactatttttcatgcacttgtggcttgtcctgttgcgagatcttgctggaacagatcgttggtcgatgttggcagtataactgatgatgatttttataattggctccagggggcagtatatcgtgggaaggttgctgaattggaggagttagcgatggtggcgtgggcgatttggcgagcccgtaatgaagttgtttggtaacagaaagtctctaatgcagcaagtattgttgcatctgcaagatcatgcctagatcaatataagattgctcaagaacgtagatgattttttctatctcatcttgctacggatggggttaaatctgagcaatgggagagacccaatgggaataagatcaaggtaaatgtagatggagcattgtttgctcaaaaaggacgttttggtttgggatgcatagacagggacaatactgggcgaatgattgaagcttttactttaggaaagacaggtctggtccaacctgaagtggcggaaattattggtatcaaggaggctttgagttggattgatagacactgtaagtgtcgtgttttgtgtggcaaattagatattactgttgtttggtaat

SEQ ID NO: 112391 - DNA, 1157 bp, Cannabis sativa
tttattaataagtaaatctgagtatattgaaatgagttttatttaaggcacaaaacccaacaaagtgaaagagtgagaaaatagtgggagaaagattatcaaatgagagaaaaagagagttgttttattgagctcaattgaactaaattatataagttaagtaacaagaattagttagagataattgttcaaattgttaaaactattaactgactctcataactaatttctaacaaactcttacttaacaactttcatggagtaagaccaaaaagtctaatcttttaagtaaatattatgtacccattcgacccgtaacaaaattttcttcataaaaagattccaaatgaactttgcaaggacttctttattctactttgagccttctctgaagccaatgccacccacctgctttggtaaacacacttgctcccaagaaataaaatagaatttagaacccaaacaaaggttctacataattcatccacttgtttaactacactctgaggaactaaaatatactcatccagtacctaccaaatcccagaagaatagagtgaataagttgagctctagcagcaaaagacaaatgtctactagcccaagtgtgtaatagttgtttgatcttcctgtgaaccacttcacaatcagtcactctccatttattagggcttaaagggactgagattttttactggaaaagtagtctcttcttcaaagctgaactctccaagaaaaatcatcttaatatcatgtgagacaccgctaacataaacatgagatttctttttattggtagataacactgaacaagcacataacacataataagccttattcatttcactaacaacattaaggatacccttacaaaaaatcacaaaaccatcaacaaatcagagattaacaagttttaagcttttacaaagaggatgtaatttgaagtccttgctacgcgaagcctttagcaaaaatctagtaagtattccatcacaagaacaaacaataacggagagaatcaccttgtttcaaccctttcgcaccttcaaaatggccttgaattttgtcacatcataagggaataagaagttccttgtaaacaatgttagataaattaacaattaacccaagatctatttgtatataacatagaacac

SEQ ID NO: 112392 - DNA, 6296 bp, Cannabis sativa
cccccccccaaaagaaaaaaaaatcctccttaagatcatgaacaatcgcttctttgtcagtgaggttcaagatttcaaacatgttaagagctaaagaatccatgacaatgaacaaagggaaataggaactcagagaaataacagagaaatttaaagtcaacaggctgaagagtaacgaacgccttaagacccaaatccttaaatagagaaagagagatatgtacctagagatggataacttactgaggaaggatgagaagagatgctgtaaccgtcttttcaatatccctaagcagactccatagctggtagaggtaatgattgcctccgtccttggatagctcaaaacgacgacatccattatggtggaacaagagaaaaaaacggaaaaaaaataaaaagacaagaaaaatcccctgaaaagaatatgcgaatgatacagtaagatctgaagcaataaatggggaatagtaataaatgaaacacagagaaaggaaaagtcaaataagagtgcaattaatgcagaaagagaaagagaggagagaaaagcaatcgtcgaaactaagggcaagaaaacaaaacaagaaaccaatctaataacacaaacgacaccacaaaggtgagagtacaggattagatccaaaagatttgagcaaaataggcgaatcaggaagaaaaccagaaaaactcaggatgtaactcgctagaaggttctagagctaattggatggctcagcacttctaaaaaatttatgatagaatgcttgtgcatggcagaatgatagtattaccactttaaaattactctccaccatcataaaagagttgtcattagctaaaatagtcactaaggcaaacttacaagttgtcgcttctccaagaaaagggtctataaacataaatttcttagtagtcacctaaataatatttgtataatgattcctagttactctcaaaatcatcttggagttcaaaccaactgccacattatagttgatctttgtctaatctatcgaaaggggagccaagcatccttagacaaattattgagttgatttaaacttgaaaagacgcatattctacaaatgaattggttgtgttctactagtattacttttattttttaaaatggtaaattgcggtataagaactaaaagttttgaatttgtatacgacataaacctaataatttttttagcaacataagtacccaatatttgtaaaattatattttttttctagtttctttagtacagactaagagtgttcatcaaactgctcacaccgcataaaccacccgaaccacaccacatcgcacaaaaaatacaatttgaaatcctttgtgctacggttgcagtttgcatttttaccaaatcgtgtggtgcgatgcagtttgtaattttgaatttaataatcacgattcaaactgcaccgcattatatattagaaaaatactaatttttacattatgatttctcttttcatatatgagcaactcatatgcttgcaaagtccaagccatacaacaaaatttaagaaacatccatataaattattcttattttttattttctaacttcttattgttaacgcagatttttgttaaccaataaatgagtctttatgtaataaataaactctaagatattaatgaacaataataataacaattatataaatggcaatataaagtttttaacgtggttttgaagttaattcttcatactccacgagtctatcttatttctaagattttatgaagtgtatacaatatacaaaatacaagatataatttataaattatactctatctttctgaaattggttgtcccccattacttaggttttgtcctcatttataagagtttagggtgacatttatttctttgggatcttatccatgtaacagactataaaacgtggacaatccccacattatatatttacaccacatgggataataataaataactgctaaaactgctctttgtctttatctataaacggttatactgagtgtacttcttcatctcgtaacacgaatgatcctcttaggatgcgtcattccgaaggtaacatttttggcatctaagtataatctgggacatacttctcgcgtccttaggtagtgtcgaaagaggtaaatgcaaggcactatcatagtgtgacaacaggatgaaatatactgggtgtatttcccttagtgtttcaacatactcacaagtatgtgggttaatgagctgcaagctcttagagaattcattatctaccctttccaacatgttgttgttctattatgtactccgtgtattctgagacggaccttttatgctgatttgttcatcttgctagtctcacaaagtggtagctattattcatagctcacccttatctttggaaggatgagttcaaatatttttaccaattgtattatccgaggcaagtttattgaatgcatttatttctccataacacaagtcgatttaacttctaaccttttaatacatgtcgtcaccatattacttgcttgagatatgggtataacaattgcctcataaaaagtactttttagacttaaaataattttttaattaacagagggtacgatcgtatttttcctttttaaagaatatgcatgcttcattttagtagttcagttctttgaggaaaacatcatttcaatatttattaatctgactcttcttttcccaatagttctcatccattcgatcagtcatatcattacgatcgaacaatttccattgtttggatataaagtcagcattttccccgaattttgcccttaccattttttagagctttgaaggaactcaaattccatcacttagttttatctaaaattgcatgccctatttatctctcacatacttctttcgagtttctgccagtttttctcttcaacctcaatattgttgcaaaccagaccctcgacatcaaaagttctcgatgaggaattcttcgagactttcttccttccaacaaaccattaagtttattttcttcattgttcttttgactattcattcttttcctattttttccatatatttctgtatcgccgatttcttgtatgggattatctttataagggtttttaacaacttagggctagaaatttagggttacacgattcgcaagtcctgaatttttatattttgtatttccaaaattttgagacacattttttttttgtgattaagataatacctcattctgatcaagactacgaaaacccaagccttgtagaagtcgataatctcaaattctaagctattgtttttaaacccaagactcataaacctcagtccataattgagttgaatgacaaaagaattagaaagcactcccttaggtctagtcaagaagagacgccggcttactataggcaatttatagatgaagttattgagagtaaacatcgttatctacgagaagcaacttggcctgaattgcccagtttagtaaaaatttccttagcgagactattatttttatcctgagtcaatattttttttccaccaagtgatcttaattttgatattatggcttctaaagctcaaaagtccaagatgcctcaaaatcccgatgttacctttgaggcaaaacttattgagtctaatatataaggtctatcacatatgtgggacctttcttacaattttgcgggataaaaattgacaacaaatttatagttcattcactggagaagggcaagcatagttgtcatcccccagctcacttgcaaagcggttctgggtgcagtactagtaactcctcatgtattggagcgtggagaattgaacacatcaaggctagagcccttcttccccttcgccaatatttcaaggacttctgcgactatcttggaatttccccttttcaatttattcccaacacatacaggatccttgcttgcttaaagtccttgtaccacatcgtgggctgggtaagcccatcccctttggttccacttatttttacgttgtcaagtcctatcctgggaggaaaaattgtgtaggccgcttttattatttaggagcacatagtggcgaccataaaatgatagtcaggctaccatacaagaaagaatttaagcaggacttcttttggacaagcggccttcaccaagctggcaccactgccttctgactattacgtaagtcacacattttctttatcattttaattctgacattcttcaagcttgaaactcactggttatttgctatttatcttatttttcaacccatttgaagagacccactctgaccgtagctatcagcatcgtcacgagaagctcgtcattcttccaattggtttgtgagtggctgattttttgttgaaatacaaaaatttaaaggcttgcaaccttctcaaaaaaaatcagagtaccatggacataaaagacagcaggtattcttcttgggaataagtccctgacgaggaccgagattatgtcgctcgtacccactacttaaaaaatataaccactcgggaagtcgtcgaggttgaagaaggggatccccaaggtaacacttcttacttttacgaatggtcttctaccgtccctaggactgagctaattgttttagtgaaatttaaagataattaatacaacctttttatctagaattgtgtcgacttgattacacatatgttcgatagttggtacccaaagttttatgtccagttgactagaaacagttcttattatggaatttcagaccaatatggtttaaatactcatagggatgctaatggggattgggatatgtctctacttaattcttttgacctttctatgatcacaggttctatggagtttagtaattataatagcaattcctccccgcctagcacttttggcaactatttaggtaggagttttgatctcgccacttcatatttatcttcactttatgagttttaaccttttttttgtttctttctagacatggatgacttggaaaatctcctctgcagcctcagtgtctcggttaagcgagataaaaaatgaagtgtctctaaggcaaatacttctgaaaagcaactcaaggttcccaagaataagggaattagtaaaaagaaaacttcctatggcattgttattgaaaagaatattattgccccagctgatcctactcctgcctctgcacttgcgagcacagaaaagcaaaccttggggtctatccaccaagttaccttttctacggcaagccagaagttatgtagttggactccacttgtctgttaccataagatgttgggaatgaaggttccaaggcttgctcatgatatgtgactcaatcgtgtcaccattttaggacttttcaatcagatgactggaacctaatcaataaccgtgcctacaacgacctctaagtaaagagtattgatctcatgcgattggttagtttctcaaattcttacttttatcataccttcccctacttctctttctaacttcatattttatgcaggcttcttttctagcatttatggctcacctgaaaagtcttcaaaatttaaaccacttgagcctgaagcttcgtaaggccaatgaacaccgcgagctactagttactcaatggaataaacacccaaacagagattactcactttaagaagaacattgaagatctggaaaaattacagaaggcactgaaggcagaggttgagaacttgaaacatcaactacttgaatccatccaaaaagccaaaaaaataccttgagcaagaggaggaagttggttctgacgaagaaaatgaggctcaggctaccgaagaataagaagatgacacactctctaagtctcttaccatgcagacttagtttatttaacattatcttttgaacaatagccttctagtcgaaaaatcatttttcccttagtggcattttttatctatgtaagtaattttttttatttttttggatggccaacttaccttttattaagctagttttatgccattttgatatatatatatttttcccctattttatgagaaatttttgtttgagttttgattattttgaatatattatgtagtgttgctcatgaataagcttaatttacataactatatcaaaacatttttcttccttgggttttcgcatcaaatgaagagacttcctcctactccattaggatgactttccccttttcctctgttgggtgtacatccaaagtcccacattggctagaaatgagaaggatcttcgatatataaggatgaacactatctccattgaacatataataaagattata

SEQ ID NO: 112393 - DNA, 824 bp, Cannabis sativa
atcaccactcggacaactagcttctctgaaagatctcacaattgacacttaagcttaaacttgagaagagaccattcgaagtgtcataccatactattgttgatattaggaagtggaccagtttgaacacacttgaactaattctcaacatgatcaaacttatataaacgtgtacaagaaaaataatataatgtgtctatatagtaatagtaacagtaaaaaggataagaagtgagtgaaccaaaatgaaagagagaatttacattgaaaattcctttgttcagctgttatgttacatgaaaggaggtctcacaagtcactaataagaagagtacatatatatgatatatagttcattgtatcacaacaatattacaccaacttcatcactttcttctattattactttgctttctagttcatcttccttcacttcaggtgttgagttttgatcatggcagccgaactggtagctggtgctttgctttctgacattgaattgcatttataatggtatgcaacctatggtggctgccagacccgtctcaagtcaagtcttcaggaaagctagccgttgtctggaaggctagcttgttcattcgaaagaagtcttgtggaaagttagttgtcgtccagaaaggagttttaaaagggtagcttgtccatccggaaagaagtctcgtagagctagttttcttctagaaaggaattccagaaggctagttgttcaccccaagaaggggttattaattacataagacacaattttttgtaaaaaaaaaatatatttttacgtttatagaattttttatttttttttatat

SEQ ID NO: 112394 - DNA, 4276 bp, Cannabis sativa
tggttagataatgccatatttagtggtatttactttttatgccatatttatcataaccttaataatttttcccatatttttgaaaatagccctatattaaattatatataagtgagtattaggcaccactaatgccctttagcatttttcgtaactttaatgtaataattttttacaacttgtaaaaggtgttgtcaaataaccatacttgtcttagataataaaagaaaattagaaagcgaaacgcagagctcttctcccaaacgaaaagttgagttgaacatccttctgcgtgccctagaatttcctcttcttccttcaccatcaaccaatcgccagctttttcttctctttcaggtaacatcctttttcaattcaatttacttcttttcctatttcatttcctcttttgtgattaattggagctacctagggttagggtttttttacgattgtcatatgtaaattatggtctaaaattttcttggatattctttgtaagctgggttttttcttggggggttgtaccacatgattaatttttctccttttcggcatcttgaaactgccaatttgacacagttgaactaccatatatttgtgtgatagatatatgtatatgcatatttattgttttctgtgtgtgtgttcttttcatgttttgaagaatgtaatggtaattgaaaactttgctcaagattgctaagcttaagactataatgaaaaattgatgatggttatgggttttgaagcatttgtcttgtctttcagatcacatctggcattaatagtaagcaagcatgacgactgcagctcgaccaacgtgggctcctgctaaaggtggtaatgaacaaggtggtactcgcatttttggcccatctcagaaatattcatcgagagatctagctgctcataccactttaaaatccaggtacatcaaccattgaggctcacaacaaatttgtatatgattcatacgagtctttgttgcataatccataaatacttcatatgaatcctctttaatgagtgtattttgtttacctagattgtctaaaacatgtgctagaattggggtaattaagtgatcatatttcataattatttgatagatttataactaagcagtttcactaaaattttgttgctatggaataacattggagctactattggttgttgctcttatcttttaaagtgagattcttccgttcatcatcatttttgtcttctctttgccatgtcgtaatatataacatttcgaattttgtctttctgcaactttgactctgttaattaccattatctttctgcaattataggaaagaagggcaggacacccaagatgaattgcagaagaggaaccttcaggaggagcttgaagaacgtgagcgaagacatttttcatcaaaggataagaattataatggtacagcttataagttaataactggcctttcattatatgtagtctcagtccataatgttgctctcttatcgtgcttctattttgtcttatagaaatttggattttatttgattggtttgtttattattacagatgacagagatcgaaggaggggaagccatctcctgttagaaggtgaatctatactttctagtttgagcatttgaattacattttctgaagtgtttggttcatcactaactgtctagattgtttatgaaaatagggtcaaagagggacattgaagaccgcataataccacgtagcgtagatgctgatgactccgatgttgaagtcaaaagtgatgaggacaggtactaatgcgttttaataatcttgcatattctgcgtatatgttattgtttaaatgagcaaaagcatcatgtgcaaattttttgatgggaagctgtatttaatatatatcgttctttaggggatgaaaagtagtactagtaatcattgtaatttgtaagctttgtgtttgtctggatttaactaatctactgctttcccagatttttctcctggtttttattgttctgtgtgataagaactttcggtggttaatcttggttttgtttggtgatggtaacaagctttcattgaaggggatgttaatctatcattatgaaatttgtggtacttatcatattatagcaaataagtgtcagcttatgtagatttgtcccgtaatcctattaactgttcgtatgttacaactttacactttatagtcacatttgctaagatatttctctcttaacatagtgatgatgacgacgacgaagagtctgatacagaagccctcatggctgagcttgaacaaatcaagaaagaaagagctgaggagaaaatgaggaaggtgagatctataatagtctcttctgatttattattatggtgtttattttaatttctgtaggtaaactcagttttgattatataagtaaacagagtagaaaaacttgtgaattgcatcatgtgtttattgaaagttaaatcatttatgagtgctcttttgctggaaatataattgtgatttaaatgattcccttatggttaatatggtagccatattattcttaccccaacagcatgttgccttaaaatgcatttttatcaaaagaagctttaaatatttagatattaccacctaacaaaaatatatatatatatatatatatattatattatcactgaagaaaagaatgactgatttcctttggtctaaagaatttgtattatgcatcttttttttcataggaacgagaacaatgggaagaggatcttaaagtcaaggaagcggagcttctgaaaggaaatccactgctcaataatccaacttctttcaacgtgaaaagaaggtttgagttgcaagaacctgttgtctgctgtgtctttttggtaatgtttttcttaaaacagtcttttttgcctataactaattctattttattttggtatgtggtattcatcttttcggatcagatgggacgacgatgtggtatttaaaaaccaagcccgaggtgaaactaagaccccaaagcgtttcatcaacgataccattaggaatgacttccaccgaaagttccttcataaatacatgaagtgagaacacagattagttgtatttgaagttttaaaattgaagaaactgagtgttataaaattctagatgaaacacaaactgggttgccaaatattcagttgaatctaagtagtgaatgtcattttctttctgtattagttggcaaacgttgtattgaattatataacattgtaatggtgaatgtcatttcctgtataaattgttttggcctttaaattctactcctttttgttattgttattgttatcttggaatagacctggttagaatcagcttttaacttcaaaaaaatcagccatttgaactgatatggcgtgtttggataggctaaaaaaatcatgaatctgtatacctaaaacgaaccaagaacaaatgagattaaatacttaaaatagagaaagagttaattgatatatccaatgctggtatactgtgtttgttatgatcattattacaacaattaaatattgttacaagaaagaagtaaataatatttttactaaaattcttcctgtctatacatagagtgagaagttcaaacccctcctcaacattctctgcaaaagtggatagaaacaataaattaaaagcctaaaatcagaataaagtgtgtttaatacaatgggtaatttttttttttttttaataaacatgtatgtatggatttgatcacatctgttatatttagatgtactttacggattaaattaaatttaaattgttatgaatttaattagattatattaatttaaatttaaatagtggaatgttattatagtacatcaaccacactatcaaatatatacatattttctaaaattcagtacaagtttagagttatgtatacagcttgctgttactattaacattctaatcaatatcatttttttatgaaagaattttattgattaatatctcccaaaattatacaaaatatcacaaaacctaaaacattttgaaatcaaagttactttttatattacagtattgatccactagagtcttctcatgagaaatattatatgagaaaatgaataaaacatcatattaataaaattaaaatatatgttacacgatgtccacacattattatttgaaatatttgcaccaataactattattattaaattatttaagaatttacccttacctattttaatactcacaatttaggcatttcttttttataggtataccaa

SEQ ID NO: 112395 - DNA, 5494 bp, Cannabis sativa
aaaaaaaaaagtagagttttagtaaagtattttaagaaaaagagtagataaattgatgggagtgttcttagcttctttaactactttattgtgagtgttctaaaactttactttcagaacactggttgttctattttttttttctttatcatttaaatattattactttaatacattttattctttaaatatcaagttgttgtcacattcaaaatatagagaatataaaaatatgtgtgttgacctatgaaattagccaacgggcgtatgtatagaatacgacaccttttgaatgataattaataagcaaaaaagagtaccaagtaataattatgaaaaacacacaaaattgtagtggttcggccttgcccaaaagtatagtaacaacctactccacttgagatttcttattgaaataattaagttagcttgagtaatcttgattaccacagttttggtcacaataaaaatattgaatacaagagtcagagaataaaggctatcactctatcacaaaaatctcgatccccctaaaatgaatctatgtgtcctttatttatagtacctagatgctgttacaagtttaaacgagaaagaatcatggtccacaatctttggcagtggatgtgtgtgtccattccctcttgatcaggagatcacagatctttctattgtcatctttagatcgtgggatcataattgatgcttcacgatttattgcttcatgaaaagatgctaactgtattcgtacaatgtacaattataggtcatgcaacctaaggcctaggtaggtgacctatagaatcttggtgttaagacttgttttctcttcaaaacgcatataggtatttatggcatttgctccatcctacacgagcgtgaatatctatccataggagtaactttacttttaaatgaatgttgagtcttggggacatgtaggtcatctctttcaatctctttagtcatttagccaagcacttgggcaaagagccaaccacccaaggcatagggccaataacttggagcataggaccaaccatgtggggcataggaccaaccacttggagaataggaccaaccatctggggcataggaccaaccacttggagcatagggccaaccacccggggcatagagccaaccacttagagcatagagccaaccaagagagtcaacttctgccttcctgtttgtcattctttctaatttttaatgacatgttccacctttttatttgccacgtcacttctaaatttttgagggataatatttcctcccccctccatcaaagtttattgcaatgtagccatcacggtaaacttgacttgagtatgaaaaacacattgcatgatagcacttgatcagtatggttggaccttacgaagtactttctcaatcattgacatgtcttcaagatatttctaaggatccaatttcctaaaaatattagttttatttttttaaaagaaattattcctaaaaatgtgattcgtttttcaaggaatttcttattcttaaaaagaataatattttttaaggaactatccaatccctacaaatatttatatatttcaagaaaatatccaattcctaaaaatataatatttttgtgggaattcgaattcaaatatgatatttatttttcaaggattttttttatcctaaaaaataagaaatttcaaattcaaattcaatttctgtctgcctgtaaatgagagactcactcctcatacacctcatttattacatccttggtaatctgagagagggaattctttaaaaatgtagaagcctctacgtgtaggaggttccttgtgtagttggggtttggcatctagggtttttggcataaggagcccaaggttgattgtaatcggcttcttgaggttctttatctgagtaagctttttttttctcttaatctttacaatatttaattataatgtgcataaaaagagaagaaaaatcttacaattaaattattcccaaaaatatcatttttgattgaagaataggttgattttttttttttttttgttgatatgctgttcatgacactaaggaattaaggtttaggtgatagccttaggcatattcatatcaaactcacaattcttgatgaatgtcatctatgacccatctatagtaaaatgagtgtaactggagttttacatatctgattgacaaaaactttataccattagaaagatattttaaggacctataaaagttatgaagagagtgtctttaaactcatcctttaacattgtcgaaaataaatgtcaagtaacacattctagaagttgtgaaaattcactctccatatttttaagacaataaattccaacactcaatgatctttgtagatcaccttggccataggtccaagcactttggccatagagccaaccacctttgtcatagaaccaatctctttaaccatagtgcaaactaccttggtcataaggccaaacacttcaaccatagtgctaactaccttggtcatagggccaagcacttcaaccataggactaaccaccttggtcatagggccaagtactttaaccacagggctaccttggtcatagggccaagcacttcaaccatagggccaaccaccttggtcatagggctaagcactttacccatagggccaatcgccttggtcataggactaaccactttgaacatgggccaagagctttaaccatagggccaatccccttggtttggtcataaagcaaacaccttggtcatagggccaagtactttaaccatacggccaacaccttggtcatagggccaagcactttggtcttagggccaagcattgtagtttagattcaagtcggttcagtgagggcgaccgcgaaagtcaccgaatgggtcattcttttcctttagtttgttgtatatttaaaataaatgtgtgggaggacgttgcagatgtcggggatggacacgactgttaagagaacccctttttgtttgatatgatggcttgaaaagaattaatagtttggagaaaaggccatgcaggagagcttctgcttctgctaaggttgcttatttgatccttagaggagacctgttcaattcaacatgacaaccatagggccaaccacctttgtcatagggcaaagcacttcaaccatagggccaaccaccttcataatagggccaatcacttcaaccatagggctaaccaccttggtaataaggctaagcacttgaaccatagggacaacctgtttgtcccctaatcaaccttgattttatttgtttacccttcttattgttagacatgctctcagacattggcctattttaccatgccctttttgtcggtgtttgaaggtcattaacatggagattcttctttcaaggaagcatagtccaatggcaagagtggagcaaacaactagactttctaccgatttggatcctcatcttgttcgtcacatggttctgggttctccattagactcttctcaaaatttttacatatcatagtactcctcgagattctcagagcatgcctcaacgtagtgctccttctgcttcctgccatggaaccattaggcctattgatactttggggtatcaaaaccatgctcctacaggttctcctattccacaaaactcttctttcgagaagaacatttcacattgtccctcatgtcagccatggactataaaggttcctaatcgttaaacttcttaatcttgagaacattcttcttagaggcaaactagctctcctcatgggcaatcttctcaaaggtgggaggagcatgtttcttgacaaaataatggtcatgtttctcaccgtcctttttcttagcaggagagtaatggggtatcacaggagactcagtcttagggagttcttgtgacatgctacttatacatctggccctaagatggaacctgtatatccttttagagaagaaacgagtaagggaaattaagaagtgcttagcctgtgaagttgttgagtctcaaggtctcctggctcatgctcctcactctagttagtgaacttgtccttagtttttatcccattttgggagcattatgtacttgaaaatttattcacatatgacacttttatgcctttagcttttttttatgagtacttagcatatttatttaaaaaaattatttgcaatgtcgactaagtatatttaatcgtaaccctcattgattcaggtatcattatactttgaccatattgtttttcatgccatactaaccttacctttttatactttccacgctaacaaccatggcaatgtgagtagtattatacttcaccatgtactatgaacaaatgatcaagcctatcatcccaaagtcctggtgataggccgaccaccctacagggtttgtggctcaaccaaccaccctaaaggacatggctaggttgactatatgattctctcggcctatgtttatgatgtttttattttatgtgttttttggaacacaagttcctaggaaatttgagctttcttagtaatttaaggcatgtcctcattgcttgtgtataaccctattgatatttactacatgcccctaagtgatcatgggttcatggtcacttgctacttgaccatgccttgcttttgagcatttatacacaatgatgcaaaaataaaatgcttgtccctcattggtagtcgagtgatggtttcatactcagtagtaatgatacctatacacaaatttcatattgtctagcaactatcgatcacagttcatgtaatttctcgtatactcgttataaaaattgtagagaagtatatttaagttggaccaaattatggtcttaaagagtcttagatcaaataatcaattggtcccttaaggtccaagttcgattatgatctgatgatggtgattggtccttaaactgagtctctttttagattgaatgtatgataaatctgttaaggatctaaattgaacatgatccataatggtgattggtcctcagtgttgtctctcatttttaaatgtatgtttcaatatatccctcgaggactaattatgattaaacaacattggtgattggtcctaaaaccagttctcttttagatgttaaggagcaataggttccatcaagggccagaattaaacatgatctttaacattggtatttggtcttagaaccagcctcttttaaagatcatatggttcgataagtccgtcaatggcaaaaataaaacatgatctgatatgttcgacaggtcatcaatctctttgttaggattgtataggtcagtcagtttgtcaagagtcaaaattaaacatgatccaaagggatcaactcatctagattgactagtctctttttgaaaggaattaaaaaagttaagtgagatacttaaggattaaattcattcattgattataagcacaatggctatttgaaacaccctaactaacataggcgtattacgtgctttttaaacatgttgtgcagctc

SEQ ID NO: 112396 - DNA, 5223 bp, Cannabis sativa
  modified_base (4766)..(4771): a, c, t, g, unknown or other
aaatataagcagatcatccacatataggcatataatagtgcaaatgtcattatcagatttatagtaaatacatttgtcactttcattcactttgaaaccatctaagataacaaattgtcaaatttctcatgccattgcttaggtgcctgcttaagactatacaaagatttatctaacttacaaaccttatcttcctggcctgggatcacgaacccttcaggttgatccatgtatatttcttcttctaattcaccattaactccttttatgctagtcacataaaattatttcaatttttaatctcccctattagaaactgtgcattcgacaccatttattttggcattggcccacttactgaaacggtaaaaatcgttgtcgttaccaacactttttatgtcatagaaaaagctaaaattctcgactattggatttgcatagccatactctttgtacaacacatagaactccatgataattctatagctatttggggtaatttgaaaaggtgtgatgttgtagtagtttagtatagcttttacgaagtggtggaatgggactataactccgcaccagaggatcgacattgagactaccatgacatctgtaacgtcgtactagtttaggcacactattgtatttacttaattattgtacccatctttactaatcaaagggtttaatataaaatcatgttcaattaaaactttataataataaaatatttttcatgaataaacatcattaatgcaactgtttacaaaatttgggatcttgaaatctatttttcaaatgggaacaaaatacaatataacaaaagtgtccccaatgactaacaaaactgagcccatattgtcctaacgatttgaatactccaaatctaaccatctagatatgtacaatcttcactaagctccaatactcactaatgttcagccctagcctttacctacacatgaaagaatatttgtgagtcgacagactcagtaagataagtataaaacataaacacataactgacctgtaactaggcgcctacacctaatcataaagtctataatccatgtcaaacacgtaaaattgagtctcgaacgttcttgattgaagtataattgaccataatatcagcctatactcatcactacagtcgtactgatgtgataacatcaatccatacgacaagtacaatcgaccataataccaacttatactcaacactctactaatgtggtagcattgattcttactttactaaatttccaaacatatatcccttcgatatccaggtacaactctatgtacaccaataactctattactaatatgtgatctaattggcaggcatacacatgtacgctaaatatgtgcatatgtgtgtgtgttatactaatcttacctcacttccgtaatcaggtatgctggtcaacctgagtgaaaaaaatattgctcgaagatctgaggtcctaagtcataatcactaaaacttgtaagtgagtcgctaaatcacttttggggactttaactcgaaaataaaagttttcctatttataaatagcatggcaataccctaaatatctagaaaacatggaaatcaaggtacccaaaaatcaccccaactggttaccctaatccccaaatggtacaccatttttggggttctacctggggaaacgaatcattgtttttacagaaacggtggaccattttgtagcaaaaattccaaacctcaagttttcttcctcaaatcttacccaaaccacaccaaactttctagaataccttaaaaacaagttctaaacataatcaaacaattaaacacaaccaaaaagctcagaatcgaaaaccaccactggagagctaagtttgagttcacaaactcaaactcactcaacccaacatacaattgctaaaatcttaggtactatatcatatcaaagtgacactaatgatcaaccgtcgaatttctactattaccggacataaaatattaaaataccaaaattcatatatatcaagtatagtacacctaaaactctataaaatctccataactgagaaattaatcctctaatatttatttctaacaataggacttatttttctactaatacaaatattataataaataattaataattcactaataagttggtaattgtttgctaacttctgtgtctaattatgctgtcattacaacgtatgtcttgatgatcgcggagttagtaaaaagacgatggagtcgttaatttgcaattggcttcgtgcaactagttaaattaagttttaacttctcaaaggttactaagtccgattgccttgttttagaaatgagatcctcacatgaatatggttcaggtgcgtcttcgttgcttaaagcctcagcttcttcatcgccttctatcccaatgctcgcgtcgtttctccctcgaccatgtaattcaatctccagctccacctctttgacctttccatctaagatgactacctcattaatataactgcttcaagcaaaaatggtggattcacttcctcgtggtaccataataggctcttggagttccctgaccatgcgagatatttcatccatggacattgaggccaatttttctttaacgaactcctcaaaaagtgattctaaaagaaagttatcattattttggggctcatcgttaaatgcacctccttgcaattgatactcctagctatctaagaaactggtcatctggaaagatagaagatcttttagcatattgtgcatgcaatttaaaagaagtatcctcactcatgcgatatcaataattgcaatttttccaaaatttttaacaagtttttcaatatagcttctgggtaaatgcatgaccatttaagttgttctaagtgaaaaacctacatgtatgtgcgagcattcaaagcgttcttcatttttccacttattcaatatgttctggatgtaatattgcgattactcattgaggcgtacaacaaatatgcgattattcaatgcacaatcttaaataagttatttttttccaaaaaaatacaactctatcttatgatttcttcttctctttctccatttgagctttgagaacctgattctgcttagttaaagccttaatgagcttttcagttctttccttctcaacctccacaaccttagctacatctaacactgccttttccttgtcgatcaatgataacttcacctacttcacttgttcttgtagcacaaactttttcttcttgagtaactcacgatcttttagcatttgtcgtgtggacatgagtgagcgagcgtacttagtcattcccttcaccatgtgctcagaacaatgactccacgtctctacaattgggacactctcaagactcaagaagaaattgtcattgaggtaaaggtcatgaagagctccaaagttgtgtgtgcgttggtggctgggtcaactatagatttcttccccttctcttggccaactttaggagctttcttcgcgaggtctattataggcatcccaaggacatcaattttcctctttgtcccagtgttaggaggattcccagttgatggtgtcatagtatccttgttaggagtggtctttggcttacggatggaaggtgcgctcttcaagaaaattcatatcttccatagaagctaacatcaataattgcatattattagagtaaaagcgataatacaaggggcatcacatacatgttaaagtctgttgtttcaaaagtcttttttctatcttctctttttatttcttggagggctccttgtaaattgattctcgctatattgtggcgtttatagggaacaagctgtgttatcgtagcttggccgatgtgcacaaaatcctacaattgtgagctttgaagtctaactcattaagtgctttagcagtttgcagttattctcctgtcagaactgtgcgagctggtctccatgcgaattcaaaagaaaggtcagataaagtattggaaaataaacacaaaagttgtaattagcaacttacttggacgacgaataaaatctattctaactcctggaacaccggctgcgtaaaaccactttaatttccattcttccatattgaaaatcaccccttcaatgccatttatttacgcattagcctattttttaaagcaataaaaaccattctcgtaaccaatattttttatgtcatagaaataactaaaatattcgactgtaggatctacatagtcattctctttgtatagtgcagagaaccccacaatgatcctatagctattcaaggtaatttggaatggtgcgacgttataatggtttaggatagcttttatgaagaggtggaatgagatttcaactccatcggtatcgagactaccatgacctccatcttcataatcttgggattggtaaaaaggatagtgagattgatgtcgcccaattagttacactgcggtcgcattagtaaacaggctatgtcgtatctacatgaaagtaaaatcacactcaaaaggaaagttagtgagtccagaaaaataaaaatagtgatgaaaatattaagaaaatgatttttgaaaattaaatacgtaactaaaattagaaatgatcagaaaacggttatggaagacataagttttgtacatacaattatatcttcctaataaaattaattctttaaactataattctacaccattaattatagttagaaaatgtgtataattaagctcactagaaaaatatattatttaattaaattaatactacttctaannnnnntatcatattatataatttaaatcgacaaaatacaatcagcagaatgtagtaaaaatcatataatataataaatatcctaataattaatagtctaacttacataagaaaagcatgattgaacttacataaaagatactattaaatttaaagtgcaatttaaaagaagagaaatttaatataacaaatatagaaataaagaataaagagaatcaatatattagaagaataaaaattgcaataacttacactcgagtcttgccaaagaaattagccttaaaacggtattgtttttgcaccaaaattaataaagtaaaataaagaagaaggaaagaaaaagaaatttttttagtataataaccactaggtaaaatctgatagataacacaaaattaaaattaattaaatattttcaattaaaataattttacaattaaaaccataaaaatatttaa

SEQ ID NO: 112397 - DNA, 7408 bp, Cannabis sativa
gacatttggtgttattccggtttcttcaataccggtcgacctattatgtaatgaccgcgaggtctaactgttttcatcattaatatatattgcttcgcttttcttcaaaaaaagatattcaaaaataatatgtatttattctatataaaatgtgactatgtaataaaatttttagtttcacggtgatttttaactttttacgttaactttaatagaatatactattacttaataaaatattttttattaattttatagtattgttatatatatttaataataatattgctgcaacaactaaaaaaaattcttaaaaatcaaattataaattatacttcaaaaattataaaaaaaaatacattacttaattaaaaaaataaataaatatacattacattacacttaatattacttaatttaaaaaaagataattatatgtacatatttttgccctctttgcaaatatacactgtttgactcactgtggtaaaaactgacatagttgggtcgctttaacaatgggccgaacataatcagcccaatcacgaacccggcccagttgtatctgtttcagggtatataagaaccaaaacaatggagctagggtttcagccattataagaccaccaggaccagccgcgtcagttatttcggagccggagaaaaccaatccccatcaccatggtattattcttacttgctttgtttcttcttcattatctgtagaaatgtatttttgtgttgatctttccgtttcgcaagttatctggataaacaactattgctaagatctgtttttctttttcttcgctgaaagatgttcaaatgaacctttgccttttattgtttctctttgaattcactgcaaatgaagtgggtctatcgaaccaattatgatttcgatgcttggtattatttgcaagatcttggctacattttgtttggggtttttctaattccatggttgtttatcaattttcttacagactaagagaaccaagaaggccggcatcgttggaaagtatggtaagtttcatccgaataagctaaagcgttagatatgcatttcatatgtagagttgtttatgctatggtactttgttgtttttgtgtttattaagttatagttgtacgtatatatgatttctaacccaataaaatgattgtaatgaacacaattgatctcatatgtctgggaattagttgttaagtttaagtctttgcttaattggattggatatttgtcgatacaatcctgtaattatgctttgttttccttcttttctaatccagctagcttagaaatgtgaactttttttatgttttcttaatatttaatttgtgtttttaagtttccaataagtttctcaaagttatctctcttttattacaggtacccgttatggtgccagtctgcgaaagcagattaagaagatggaagttagtcagcacagcaaatacttctgcgagttttgcggcaaggtaacgagatattctatcctttttcaaagtttgcattgtcgcttattgggttgagtagttgcttagtttgatcattttttctctcattacagtatgccgtgaagaggaaggccgttggaatctggggatgcaaggattgtggcaaagtgaaagcaggcggtgcctacactttgaagtaataatatttttctacgagtttaatgatctgattatagttatgttactgtgttatcctttgtaggaacattgctaattgtttgttcatgttctttatacagcactgccagtgccgtgactgtcagaagtaccatcagaaggctgagggagcaaactgagagttagattgagttgccaccatctcgccactgctctcattatcatggggttatttagcatgtttgctatcaatagaatttagtttcaaacagttttgagtacactttcttatttttaccttaatttatgttccagaagttgatggatgacaaaatggattatttttggtagtatcttttaatcgagattattaatttcagtgcattgtttttggttcaattctgtgcttaattatgcttttaatatttaatatctagttctttcatgtttgccttgctttcctagttgtccacagtgtttttcattttcgggttttgttttgcatttctaatcttagttttcaagtattctgctgaaaagtcagtttctaagttttctacacattcatcttcaaaacaaccccttgtctgtggtgactgagtattattataatcgtttatgaagtctgttggaaaatcacttgttttggttggtgaaaaagtacataatctatatcaaattcacttccatgggtcacttattagttttcagataaaaattttccttcaaaattactgttatttaaactaggtctattgttgcattgtttttcaaacacagggtagggttttgcagagttcactaattaacaaagttggttcttctgatcaaaaaggaaaagttaaaggctgtttggctttgtaactaataatgtgttttgatttgtttaattcaaatgcaaatttcacggcaaagtaatccggattgctttaaagtttagaacgaattgagtggagcagccgaaatagggtttcggaagctggattgggagacaatttcatcgtgaaatatgggtgaagaaaagagaatgtgtttacgtttcaattacaaaaattgatactcatatttatccaaaatatgatgttttgtgaaatatttagcaattttttagaataataatttgtaaaattctacttgtctaactatgatatttcataattttttagttaatttttaacatgcccttgtaacccaatatgacttaataatctccatgtgttatattcgttgtctccaatagttttttatggatccacacaagctttacgaccccattttataagcagctcttcacctaactttcttctaatttcaaaagaaactaataaaatatccaactgggattaaatgattaaacactacaagcatattcttcaagataatttctatatatacacacttctatacagttagaagggaaagagaggaaaggaaaggcattagatttagacaagtctttcatccttaccctcctcaaacccacttaaacgcaccgtattatctctcaagaacatgaacatttacatgaaaaggcacttggtgcaaacttagctctcaacttcaaactttggctcatgatactatatgtacatatatattgttgatttcatgtcaaaatgaaacaaaacagagagaaacccacctgctcctcaacaagtcatccaaaataaatgaccaacattggggttccaagcaggtcgctccacattttaaaattaagtaaaaaaaaaaaaaagacaaaagaaaccattaatgtggctttcctatgagctttccactgccttgtatgctgaagtacaaaatcatccagcaaaggcaccctgttctgagtggggatttcaaattagacaaatggggatggcgagtcttctccgttatcatagtacatttggttttggacggcttttacagctgcgactctcgctgcatttgcagctctattagctgcagctactgctctgctcactctctcatcaatttttgcaacgttctgcgccctctcagctgctcgctgtgcttcctgttcacaaagaagcttttggttaggagatatcattccttgaaacaaataaaataatatatgaacagctttagctcatagatacatataatttcgaaaagataacaagaccgggaaccctatatcatggttaatgttcttgaattattgtatcccatttgagaaataggaagcaaagaatgtttatattgctataaatgatatctagttaaaccatcaagggtaaagcatttcattttcagcaacaacttaaagggattaatgacttgattagagtgcaaagtatggagcatatgtctaatagtttgtggtgatatacatgagaagtgactgaaacataagcttaaattccaaaaccataaagtaaagctaagctatgaatcatgggggatgaaaagttttgcactgcaaaatcacaaatcataattacctgcactgcattgagaaccctggcgtgactgatggttcgaggagagtcgggatgtgtattttgaatgctagtaacatcaagaaatccattttgccaatggccagattgtttttcaccgtttctgaatgtgtacataccaaggccctgccttcggccttcatgccaggcaccttcataccgatgcccatttgcaaattggtacactccaaaaccatgcattttgtctgcaaaatattcaccagcatatgtatccccatttctgcattatcataaatgcaactatgtcagaaacatgaaagcatgttcttttcttgttcttctttttctttttatcagaaagaagcaaagagagaaaaacataaagatgcatatttgttcatgttatgggcactgggcagcattgattagttcaatgcaagacaagtcttcattcattggcattcccaaatttaagaacagcaaagtgatgacatacaaagctatacacaaatatatgcacctgacacctgtataccaaaattttcttatatgtattgtatttgtgaaaattacttccacagcattgaataagatgtgctgacacagtattttcataactgttttatgtgacacaaatgtccaacttctaatagacgattaataaatgcatatcaatatatagtgtaagaaattattacagtaaaataaaacaagaaactcatgattgaaagaaataaattcatggcaagagaactgagtttgacccatactgtccggccatttcaataagttcacttccattatatagttttcccatactcattattatttctactgccgctgaatagatagtcctatataacttgaagtgaacacagaataagatcattagctaatatatgcttaacaagtagtatccatttctatggctgtataaccagaacaccaaaatgagcttaaagaaagaagcttttgttaattctcaaaataaccaaaatgagaattcaatctcaatttcatcagagccaatcgaacaacaacaatgaattgattattgagccttaattacatcatcaatcaatgaggtttaggctactacaaaaaaacaacatattatatagaatgaacaaagtacctgaaatgataatgaccaagtccatgctttacaccccacttgaattccccgatgtatttactaccgtcctcacaagtatgaactccacagccatgacactgcccattagaccattctccagcataaacatctcctgtgtagaatctataaaccccaattccatgccttaaaccttgcctatactgacccctataacgactacctttagcccaagtctcaactccataaccatcatacttctcatcaatccaatccccttcatatctcccactcaagttgtaatagtaaaccccactaccagagcatttacccttatgaaactcaccttcgtaaacatcaccattagtgtatactttgacccaagatcctgaatttatcctcttctccgatttgggtttcgacccaattgaccatagaaccggttgaggtgggtttgagccacaagaaggcggaaatgactttgttggcaataaagagcgagtgaggaacaatcgaatcgagagaagacgcgggagagcgagatttagagaaacaaaaagggcagcagacaaagcaaggaggaaaataaaatcgaggaggaaagagcggcgaggattggaaatgatgaagtaaagtgaaggcaaagaaaggagtataagcaagcgaaagtgtaatcgaagcaattgggcacaacggaaatggcgaacgattctcaaagccagtgatcttgtagcgaaaggaattactccaaacgatgaacagcataaacagaaaggcgaagaagaagaagaagaagaaggagtctgggccgccatcataggccttgttgttgggtttcgtgagatgggttgttcatgaagaagatgagaaggggtatggttatggttatggttatggtgggttgtgatgagctttgatggtgggtttggtgatttagagtgatgggtttgcttggaaagcaagtatggagagatttgttgagtttggtaatgggttcggatgtgtttttgaggtttagaagagaaaagaagaagtggggttgggttgaaatcggaagaaatgcctctgctttctttgctgatctgagtttcggatttcttctgatgcatttacataacaaaatccactcttgttcttcttgttctcgtagttgatgatatttgtaatatatttatgttttttttttgagtaattttaattaatggattgcaaaaatcagaatagccaaagaaatttagatagaaagatagaaagattttggtgtgtgtgagtgtttgaattggtatttttgttcaactggtatggtatggtatttaatctctggttttgtattgtattctcttgtagggacgaaaccagattcaaaggtcggtttttgttgtcttttcataactaaccctcatatttccttttatttacgttcttgccactttgtttgtttatttttctttttaaacaaatgggtgataatgcataaaaatactattagtgtgatttgtcatttacttcaatgttaaaaaaatatctccttgttattgtaagatccatccatctgaaggttttttttttttttttttttttctgaaaaataagcttagaaaacactataataaggtttttaaaacaaagaagaaaattaagttaccaaacagtactaaaaattagaaaaaataacataataaaaccgtaaagactaaaacctaacctacctctttcttttttcttccctttagccgcacacaaactagagaagtctcaactccctctcccactcacagaccaccaccgcactcgttgaagtcttagaccgctgtcaacctccccttgagttcccgactaacctcctagtcccagccacacacctcttctcctctctttatctttcattgggactatgctcgttgtagctgtacttgtgctgagtttactttccgagccaatcttcaacagcttcatttcagtcctagcttcctctttacacacaaagacttgtcctctttcattaaactcattaatattcctcacagggcgactctggagatcatctcacaactcacctcctgttgtagaaaagtcagttgtgattcatgcctgaagtgctattagttgaatactatcatttaggtttgggtaatttgcggcataaccttcttaagtgattatgtttttcaactaacccccaattctaaaattttggctcctaaacccaagttctgttagcacttag

SEQ ID NO: 112398 - DNA, 4197 bp, Cannabis sativa
  modified_base (38)..(50): a, c, t, g, unknown or other
  modified_base (847)..(850): a, c, t, g, unknown or other
aaaataaacattgggtttatgccacttacaaacttaannnnnnnnnnnnntatgccgctatttaccctataatatatagaagagtttctatacaaacctccaaaattttactgggactttcttttgttattgtacatacatatttcatatttgatcttagaaccaaaagaaatataactatactccatgtgtcttcatatctcttgtatttttattatgaattagtctttttctttttatttattttttggaacgaattaatcttaactcaacttatttacgtaattttgaaaacatataactctagctctctctctttcttttcgacgcgaacacattactgtctttacaacttttattattgtcgtcatgaaaatgacagaacgtgtaatactgatagtataattaatatcattgataatatatttttttaaaaaaaaaaatcaatgataatatttaagaattatcattcatacgtacgttaaaatgaaaaacaatacgtaaaacaaaaaataatctcacagtcctgtttcactataattttttttttgaggatatgtttcactataatctatatatatatatatatatatataaagctagggctactactatacaaacatgtatacttcaatttcaatacaaacaacacaaaaattaacctaataactaaagcaaaagcgaagttgtcggatattgaagtgtggtgtcacttttgattccccattaaccaaaaagaaacagaaaaataaaaggctgtatgcgccgccattagttagtaattattactaatattagtgctctccttgactgtaaaatattggaatttaaatatatatatatatannnntatatatatatatatatagtctcacctttctcaaccccaaacatgactagctatagctacacatatatcaatgatcaatcatattttttcttcaatttggttgtttcattcattgttcatataagaattataagaatcacgtgtctttacaatattaaattttttctatatttaatcttttacttatctctacaatcacgaggacataaggaatagtttgagttattgattaatttctaatggttttacttatatagattacatagagaccttttattgaaaggtgctacaggatgtaccaattatttgttgaagtaatgaattctctaatattaaaaaatatttataaaaaaatagtattagaataaaattatttaaagagattttattttaagttgttgactattggctcactgtcactactacaaaaagaaatattttttgtcggtttttaggtgagatttaaagaatttgtgttggtttacaaaacttacatatatgcgatgtcccaaatagttttttattagcgtcgttttttaaatgacgcaaaaacaattctcttcacttgaaaaccgtcacaatatatacaatgttcttttttatcttctgcgttagtttaaaaatgacgcaaaattgttcgtgccattttaaaaccgacattaaaaacttataccgtcggttgtaaaatgacacgtaagttgttgaaataatttttttttatacttattgcgtcgattataaaatgaaacataaatgtaggtaagagaaaattacaaatttttatgtaattttccctacctgtatttttaaattttaaaataattttatataagaataaatacataggcacaatgtatgactaaaagagagaaattcaaattagtcaaacctataccaagatttcaatgtgattgtatcatacttgtaaatcaaaaaaaaaaatatttggagatgtgaaatgtgtgtcagaaggatatagagttgccaaaaaataaaattagagttggaaccaaaaaacaaaatctacaaaagataggaaaggactagactaaaaaactcaatgggaagtaatatttcattcttcatcttcctcatctccatctccaccagaagccttcttagcaactgctttctggttctttcgcttcacttggatagggcagccacctctaaagggacttgtgatagagaagtcaatgagcttttgagagtcaattctcaccataaatgatggaatattgagtacctacctcctaaccctgagaaaagcaaaagtaactagtatgtgtaagatttattattatgtattatgaatgaaaatgcaactaactgaaacacataattaatttcaagattcaataaaccatttcattctaagagaaaaaataaccatcattctaagttaataataatttatataaaagtaagattttcttacacatggaagcctcagtgacatagaccactaactacagtaatacaataattatatgcaatccacaaaatataaagcacacaaaaaaagttttataaggcaacaattttttctaaaattatcacaataaaaaaagaataataataataataatccctttaacctaatacaacttcacttgttctgaattagacaagtatttaggatagaagaaacaaagcaatatatgaaaaaacataaatggatggtgaaatagatacataatgtttctttttcctgatgagaactcgagcatcgtggatagacttagccatgctagacttgaaaaacgtttgagatcccttgattaattcctgggcaagcacatgcttcaaactttttggggcacaagggcgtaatttgtccattgtcgttgatacaatggttgccaaacacagagagaatagtcaattcaatcaatcctattcatccatggtgttgtaacaaaattaaaataaagtagagcactacccgggtttaacatttcatatcaacctaataattgcattagtaaacatgaaaaatagagtagctattgtatcagtttagtttaatactattatatctttctgtatctcctatagattaggaataaattattttcttttgtattaacatggaaaaacattaacttcatttttatactcaatcatcaattataaaatcctacgtttgctaggagttagctaaataattcaacaccataagaaataactaccattggcaaaagaaatctacattgacaatacagagacacaactaatggaagcttgcctcaaaaatctagtccaacccaaccaaaggcccatcgaacaatactaataatagttaaaaaaaaactaacaatgtcaaaataaatatcattttataacagaatagttacataatgctatatatgcaaatatacaaaaagcacacatatataatagttgcatatatacacatacataccattaagaatagtgtttccaccaaaatagaggactccctctttacagttaacagctccaatgagctagaaccagaagaaagcaaaatagagaaaacagagcaattgtattgaatgatcaaaccattacaagacaccaatgtttgctacttataccaagtaacagagaagcaaaaagatacaacaaactaactaaaagtgacaactaagctaaccaacatttaactaacatcctaactgaatcccaactaactcacaactaactttaactaatcttgatactccccctcaagatcgagaaaatatgttcttcaatcccatcttgtctttaaagttgttgaattgattgggaaagagaggcttagttaggatgtctgccacttgatctcttgtggaaacatggactgtctttatcacaccttgttgcaccttttctctaactagatgacagtcaatctctatatgtttggttctctcatgaaaaatcagatttgctgcaatgtgttgggctgacttgttatcaaagtagagtaaagcaggtccttcatgttcaatctgtagctctttgaggatagaaagaaggcaaaccacttcacaagtggtgttagccattgctctatactcaacctctgcagagccagttgttgcttttctaagagatgatggatgttccaacaaaaatgcaaaatccagttgttgacctcctcgtatctggacatgttgcccaatctgaatcggtataggcatgtaacttcacttcagaatcagcagcaaagaaaattccttgtccaggagtccccttaacgtattgaagaactatttgtgctgcatgtagatgagtgactctaggtgtgcataagaactggcttagcttgtttactgagtaggaaatatcaggcattgtgatggtcaaatattgtagct

SEQ ID NO: 112399 - DNA, 4068 bp, Cannabis sativa
ttccgcatttaattaatcacttaattaaataattaaacttggaatattaaaatacggaatttcacatacacttaaacactacatcttttttctttcgacggatcgaatatcaaatgttagttttcatccaattttgtaactatcattctgtgaaatgctaattgtattcactaaagtgacaaatataattggtcaacatttattttttactaaaatttagaatacaactgttgattaaaatttccgacaaccagtaattaaagttgtatgaagtgattaatgaatgttagaagagataatttttacgtggttaggacattaatgagtcttagtccacgagtcaatgtattaatgagagtatttactactgagaattttctgaactatctctctttttatacatcattgggatatttataggctcataatggtggtaaaaagaccactattatcctgtttgtatgaactatgtttttcacaatttatcaaatctgatcttagggcatgcttgcctacttttatggtgtgtttgtgttgttcctaagtgtttgatgagactagacttatcttttatgtatgacttgacaactcattaatgcagccgtcaattaatgtatggggtctcgtgaaatcagcaaatcatgagtttgaatccttaaacacatttgttcaacgtaaagtgtcaaatgcttttttccatgctgcattaaatgcatacataatgttttcttcctcgagcagtgtgttatactccatcagtcctcctgtacccttctccaggtcgacttcacttgtagagaagaaaagacaaaaaatattcgttgtccagctagaccctcccagagatgactaatatgtcattacttttttgaaataatagactttgagagtaattagaatggcgtgtcccgtaacatgggttccattgccacatgactcgctcctaaactaccacgtattttaggagaaattataggcaaaccccaagttcttttttacaatttttttaaaatgggacttgcgatgtgcctcttggagtattgatgtaatgttgtgctagacaattttaagtgctgctcattatttctttcgtttttgataaaaacaattcaatttcttatgtgactttgatgtcctaattaattacagggtgtcaaattgatgcttgagtagtgtaatcgtccttttctgtttgttaatctgacagtattgttatttgttagataatggggtttttttaatatttgaattaggattgttggatagttgacgatccgtgttgccctaacaagtctataaaaactcttcatgcttgtgcttcaagatttttattctcatatctctcaaaatcctaagccagttaaaattttaaacaacccaaatttctttctactttttctctaacgttgcccagctcagttttactggggttttgcaccagaatctgcaactacccgtacttcttctatttgtatgtttcgagtcacaagaactccttcttttcttgttttgttgctgtaatttcatttgttgatatgcttgcatgaatgtgatgttggcactatatctacgatttgggtaattcccctagaccgtccttaatttccacttttaggcaagagtttttcatgttagggtttataggatgttatttgttcttttcttttctatgctctgcaccattgctctttatcatggtgcaattagcaccaaatgcataacatataatttttttctatttctgaacatgcttgcatccggagggggcctcttctcagcagatatgggaccccctttcccttttttatttagggtttgacatgggggctaactgatgggtgaattcttgttttttcatatgagtgacatcctgaaggatcttcataaacatggttttgcgcatccgacagagaaatattagaactttattctgaaatcaaaatgtcgaatcatggagctcatgacacttcctcttctcaggctctggccctacagtacctcgtggtgcctctatcagtagtgattcagggtctagtcccagtcactaactatgtccactgggccactgattgggaagctgaagatttgcacttgttaatgagatgtgtccatgacttgggcactatcgtggatgagaatgaaatcatgccctataagactagggtttttcatcgcttggcccaagaaaccgaaacccccaaccacaattatggaggattttgtgtgtgtctatcacttgggcactatcgtgtatacttagacattacttttcacaagtgatatggatgtgaccactccaaactccaccaagactaacctttaaaatatgacattgtaggtcatcaaacaatccacactatgaaagtagtatttgaaggctatcgaagaatctcccaacattcccaaaagcttaatctttcctgatgggatatagatatctccagagaagccaaatagtgtgaaagtgcatgaaagaaatttgctaaccaccaacccaaccttatcaaaggatttttttgaacaagatgttcgcaaagctgtgattgtttaccaaaatccttgccaccttgatagctatttgagtttctgttaccaaaagatcatggtgtgagaaatgtacaatctaagcatctcatccgtgaaaacttgtcttgtaaaaatacacgaaaattatcttatagacttttttagttttgtaggacttgctccgtaccaactaatccctcaggggtatcgcctgttatctggccttttatttttattctcttcgaggttggcctactcccagccttgctgaaattttgttttttttatgaactattttctgtcccaaagaaggaggacaggcagaaagatgacttttattccctttaggcccattccgctaacaagacttctgtcttgttcaacttccagaagaactttaaggattttcgtcaccagttcttcttttcctccagcttcagggctttcgagcatcttgacctcttaactgagtggacccaagattcctccattattcagaacaaccatttttgcaactctttccaaggaagagtataatgtaggtgatttggtgatgaatgccaactgtcaaatgactagactcatacaagggcattaattaatcaaggacaacaacctgtcaacaatgacgtgtctgaatgctcaaaataaagaggctaaaaaataactctggctggagtatatccgggaggcatagaggaagtattaggcttaccggaggatgaaagaacaggaggacctttttgcccgttcccagagtgcggtggaccgaaaaacaaggaaaaaggcatacaagaatttggtggcttcgagaccaacatttcctttccctaactttggtactcctggagctagtaccttgggtactcataagtcctctttatcttttcattatatcccttttggtcaggagttacttagattacgcatgtctcactcctggtagggctatagggaaaaatagttgtatacttttgcaacctcaaagacttcttggataggtctcggatgggtactaatcctccaattccaattttgttggaccattcatgctaccttaccacgagttggttcctcccttcaaatagtttcttaggagatgacgacactaataacattatttttgagtttgtaagagcaaaattaggctgtttgggtaggactagttctttcgtatattttatccttttgatttttcatgtaaatattccttacattttttcttttcagtctatttctaagccaatggacgcaatctttgcctcgttagacgctctgagtcccgaagaaggtagcacccttctgccaactaacctttcaaaggacatagtgactccttgaagtccaaacaaggcaagggctgcagatttcaagatttcattcgagatttcaagcaacttcctctgatcataacaactaatgggatctgaaatgaggtggtttaagcttcccacgagatagactccttatggctaaagatgttagattttatgccctaaataaaactccatttcaatgtaatctattttattcaacatcaat

SEQ ID NO: 112400 - DNA, 7134 bp, Cannabis sativa
aaaaaaaaaaaaaaaagacagattgaaagctttggtggttactatgttggtatcaattcatggccggagtttgtttatataatgagtatttatgtatatataattgtcttattatatagtgaaaaatataaagtaaatcaagcaatttgagccggaagtggaatttatcgccatatatttacaaccacaaccacaagaataaacaatttaattgtattttgatgaaaagacaccaaagcatgtttcaatatggttgtgctttcaaatctatatcaaaaatatctattccccaccactttatctgtcaacttcatcaaaatctgttctttgtgatggtgattaataaacatgtggtcctgtttatatacataagagagagagaaagagagtagaagtagaagtagtaggagtacatgcttttgcaacttaatttaatcaaaaacctaactttattggccagctttgactcactcctaccacttcaaagaaagagatatatgctaagtattagtgctttgttgtcataaacgcttttaatttatgagaatttgaaagttgagcaatattagcattaaaaataattttataatatttttacatcaatttttactattgtcctttattaaaaaacattgttttacatagattaaatgtaaaaatattaagtcatatataagaatatgaattgcaagtcatatataagaatatgaattgctttattcaatactaattagttttgagatggaattttatgtttctcaatatggtgttagaattatttctttagcggactttcgattcatatctatccagatagttagccaaccgtatgagatctagatggtgcaaagaagctcaagatccgaacaaaaaaaaaatgagcaaatgacacggtttgtgataaggtgattcaagattagatagcaaacatagtcacccatgtttcttaacatgctctaatatataattgtaaatcttaatgtaaaatttaatatgtcattaaattgctcgtgtaatattttattaaaaatgtaaaataataataataatacaaaattaaatataaaatttaataataattattaaaattgctataacggtaaatataaaagcattatttttttttattgtgatgtatattttgtatcatgttatattgtgattcaaatttggattgcttttatatgataaatttacattacaatttggcacactattggagtagattttttataaaatgaactatattttatatttgcatcatttattgctcttactttgctataattaagtatcgtaattcatgtattttaatataaaaattattatagaaaatcgttaatcatttgcaagtagcattgagcactattggtgtgacaatcattagtcccgtgatccgtatggaaaaatattaagtaagttgtacaattctacattgcctgaggaaggtcaagtgtgttgattctaagcttgagtaggtatgtaactacacagttgaagatggattaaatggaatgattggtactatctatatcaacaagatgcatttttcttggtagcccgttacgaaagaactccacattaagcgtgcttgactgagggtaattttaagattggtcagctcttgagaaatcttcccaagaagcgtgcgagtaaggacaaagcacgttggaaatactcgtattggtttgtagggtcagtcgttagcccaagaagcagccagagtgacatactcatgtataagagtcatcattctgtgggtcttaaggcccaatagaggcttgaagcggggacgttacaaatggtatcggagcattgatctagtcgaaagtgtggtcgacaaggacgtcgaaccccgtaaggggggtgatggtgatagtcattagtcctgtgatccgtaaagagaaataccaggtaattagtgcaatcccacatctcttgagaaaggtcaagtgtgatgattttaagactgggtaggtatgaaactacacagttttaaagggtttaaatatggattgatactattgaccgagattttcggcaactaaatcattaatgtaataaagatgttttaaggagagtaaatgcaaatatttttacgtggttggtacattaatgagtcttagtccacgagtccctgatattaatctgtacgtatttcttacagggaatgttctgctcttttttcttttttttccaatccccctcattaattttgttggggggtatttatagtaattgtaaaagagaagaaaggtcaccattgtcttgagtatctactttagttatacacaaattcccaaatctatgaagtagggcatgtacccctacctagtaggatgcgtagggtttaggtgagatcaacctttaacccatccttgattgatgtgattgcacattatgacgtcgtcgcttacatctttaattagcgcgtaattgtcgaacgatgggtttaatgcgtctgacacgtcttttcatatacgtttatagacgcttcctccatgctgtattaaatgctagttcatagtacattttcggtatcctaaattcggaggagttggacgctatctagctctcggaggcgaattcaaggcggatccctcccgacctagtcatggctcccggagtagctgttgggttgtcctgaggggattctgcctatgtaatgactttcctttaattatcttcgagtccttagcttaatttgcgacatgtcacatagtgggattgccacgtatatttggagaaaaccagggcaacagatactacctataacaacaaggtgcatctttttttttgtagcccatcatataagaactctacaattaagtgtgcttaatctgggataatttaaagatgggtgacttcttaggaagttttcccatgaagtatgcgagtgaggacaaagcacactagaaatactcgtattggtctgtagggctagtcgtcagtctaggaaacaactatagtaacgtactcttgtataagagccatcattctgtgggtcttaaggtccaatagaagcttaaaacgagaacgttacaattagtgccaaaagaaaagtttaatgcaagctaagatacatgggctcacttttgattttgtatgtgaaattattttaagttagccaatgaaattattgagattgaaaagttaagagcaactctaacggaggctctctattttaatgcctgttaaactttacaaattattttttattaaaattaacttatcaagaaagtgacaaatatatatatatataataaatttatcatcggtattaatatgggatattttttctttctcttctcagattgtatttatgatcttatttggctctacaataaatattaatctagctatttatattgcacttggcctaataacgatgttattaaaaaaatgtattgatatgagtgtagcctagcatcattactataaggtggcgctttgcaaatagtaaacgatattttataatagttattaaattaaattatcgatacttaattacattaatagtattaatagtattatgacaccttataccatatccatgtataacttataccaaatttggtctaaattataaactagtgttatatttgtcataataacaatagtaatttaagatataggaatttttttattaaaaagtaaaaaaaaaaaaaaaaaaagaagaagatacaaattatgattaaatagcaaaataccattaatgatcactctataaataaatctttaaaaatagttaatgattaaaaactccacatctattttaactctttgttataaatgctcttaaatggtgttaggcttagcatttctactaatataaaatttaatataattaaatatcgaatctcatataatttgaacaaataatttttaaaaatattattaaccaatcataaaacgtcacatgtagaagatactagacaccacttggatccaatagcaatactatattgaattagaacacctttaaatatctttcaaaaaaagaacacctttaaatagaaatagtgcctttaacgtttctctagaagaaaagaaagcctcaatcaaatggtcctttgccagctatttcttagatgttattaatcattgatgatttgcagtgttgctgcaaattgctgaccatgtgatgtgaactaacaaaatccatgcagaaccccattaatactaatcttggaaaagaaaaacaatagtgtggggaccagaaggagaactatcaaaatggtgaaatgttgaacaaatcttcaaagaatacaagacaatgacattcaacaccttatgaatacatatatataaattaatgtataatataaaggtgtattaaaagtttgaaacaatatggctaactaatcaaagctactacagttataaccataacaaatgtcaaaataagtcaaccaaagaagctgtagtaatggttggagcttggaattttatgggtcttgggtgttgtctggttgttgaaggttcaagacatgtgaaaccaccagcttggaaagctcgcttaatgccacttgaaccggataatcactattagtatccccgttcctcaatccggtgtactcgttcgcagcagcctttgtctttcttgatgtagcgaaaaccgtctccaaatctctctgcaacagttgtcttggtgcctgaaaatatgatgcaaaaacatggcggtaggtttcgcatttgatccatgaagaaaaaaggcaaaacagataaacaaaacaacgactaataaacttacagatgcccgttttccttttttctcttcatttagtagatctctaataggtaaatatgcagcttttttgcatagttcaagaagatcagatcccgtgtaaccctcacacaaactggctaaatagtcgtagtcaatgtcgtcttcaacactctcacccttaagaattactttgagtatctcggctctctccctttgatcaggtattccaatttcaaaagcctggggaagacgtcggagtattgcttcatcaagttctgatggacgattagttgcagcgagaaccataactcgagcattctctacaataaaaggaataaaatgcaacatttaaagatgagacctttgacaaaataccttcacatagaaacatcaaagacatcatcactgtataaaggaaaacattcaattgcatagaatacatacacatttctgaataaatgaatgaatcaatacgtgacaaagccgaaaagcacttacgatctgttgtaaacccatcccatagggccatgaactcagtcttcatgttcgttaaggcttcatgatcagtagtacggcgctgacccaaaaaactgtcaacttcgtcaatgaatatgatggcaggctgaagtttataagccaagctaaacacagcagcaactgcaaagccacatatgaatcaaaatcaaaaccaaaacataatttcatgagaaaagagagtaaaagaagtaaattttcttccgcttagcgctatcatgctaacaaacctaatactccttaattgtggtactaatgacacctagtgatgttaacaattattcatatagtgattgttagtcatatatttgttttaagttgccgatatgattaccactcaccaagcttttgagcatcaccgaaccatttactcataagatttgatatcctcacgttaatgaatactgctccagactccctcgcaatggcttttgcaagcatagtctttccagtaccaggcggtccatacaacaacactcctttctgtggacccagaagctttccatgggaaaacagatcaggcctacgcaacggaagaatcaccaattcatacaaagcttctttgattgattctaaacctccaatagagtcaaattccacatcaatgtgatccgggttaatgacatcacaggctataacatcctgttaatgatagaaacaaaactgaaaatttggcataacaataactacaaatttttgtggcattactttctccaattactgcaccaaccaatacatgaaaaatcttatgtggaaaagtgtggtagaatgttcaagcacttttctcaaactctatgaaccaacagcattagttaaaatatctacttatttgtctgtattaacattacatttctctatttttcgaaaaaaaaaaatactttactctagaagaaaagttagagaaaagtagtcaactagaaaacaaaaggtctaatattaaggcagagtcactacagttgatgtagggacttgttcataagtacatagagccaataatataacaaagaagttgaatttggataaataatggatagtgcttttgtttaatgagctatgaaactagaattacaaacccaacagaagcaagaatccaaatacacttcttaaacactcaaattccaataaataaattaataataaaaaaataactgaaatttagacagcattatttctcaccaaaacataaagaggaatgctaaaaggtatctgtggtgcctagcaccttcctacgtgtcaatatcgctattggtgcaattaagtattagatcctatataatttcgtatgataacatttagagggtatggctaatcaatcgcaaggcaacaagtctaaatggtgttaggcaccgctggtgtccaatagcaatgctcaaatataaaacataatataaaacatattatgtgggaaataacggtggaatgttcaatcacttttctccatagtctgcattagttaaattttccactgatttgtctctacttactaatattacattactcttgatagaactaaactagagaactacaggtctaatgttttcaagtagaatcactaattttgagatttgttccattcaattgtaccaataacatattaagttaaagacctagaatttggacagaatcatgtttggataaggaccaagaatccaatttcagttttcaaatactccactcccaaataaataaataatgaagaaaaaaaaaataacccaaaatggtaactcaaccaccacaaaatactaaatttgataatttcaacaatcaataacacttcaaagaagtaaacaaacacaaacccatataataattatgacatagaagttgttcaaaaccaaaaccccattattacctcgtaagaattcgtctga

SEQ ID NO: 112401 - DNA, 5868 bp, Cannabis sativa
  modified_base (5635)..(5638): a, c, t, g, unknown or other
tccacgtgtccttatcttgttggtccacgtacattgggcaaaatcaggggcaacaatatataatatttaaaaatatatattgaaaagtaatttaatttttataatatttttgccaatagttataaattttcatttaaagtagtttttttaacagttataaaccgtcatttaatttgatttttccaacagttacaaactgtcatttaaagttccgtatttttatgatacccacacatagccaacggttttaggaaccgttggaaaatagtatataaaagacagttataaactgttggaaaaaggcaattttgtagtagtgacaagttctctatcagtttacatagttccctctccgttacaataattcttgctagttcgtctatcttcgagttaaaataatctcgagaatgtattctgaaagagttttgactagcctgacgtgagcaaggattcgtgtcgattttcgaatgaagggatcttttatttataggcgcaaaggattattgatccttcgttttcctcctattatgattggtccacgtggattagctcctcttcacttctctgcacactttcttttcttattttctgtttctgtgctcttcaagctctatcttttatttcccgagttctactctgcattcttctatggctaagccttgtttctcttgagctatctttcttttttagtgaaacagtgtgtttataagtgtctgtcatattaattatattagctttgtttttaattattgatggtaggaaattacttttctacgactaagattatttttatcactatagtaagtagttgtttcctttttttttttttggcacaacaaatcttttgaacatttctgaaaatgccaagtatttctaaaatactaaattgtatacgatgataaaaaagaaaatagactaaatatattcttaaatatcgtaacagataaaaaagtataaagaaattgtgttttagaaaggtatactatagattttttttctatacttgacgttctttctgtttacaaaattatatcaaaggtctataaactaaaaatttcaattaaatcaattacaaacttgatttaataacgaaaacaaaagattgtgacacatatactaataaattaaaataaggcacaacgaaaactcttagcgcaaacaaaaaagcctcactaggaagtttctttgtgaagaaatagctgagacggggcacatcaaatataaaggcaactttaccatctaactatatatcgaatggaataaacggatgtacatacagctcaaaaagagagcagctcccaagcaaaatccgttattatactagttaaatgagggttagtgtttgttacatactagacgaaaccctttttcttcagctatattgttagttaagctgtataggcccttttttgtcatcttgcacagcctatataaaggtttttaccccatgtaagagatacggttttactttgaataaagaaataaaatgaaatttatctttcaaataattggatgaatgtcctaccatcaacgaaatttattatataatcaaaatgcatgtttaactaatttatgcatgattgtatttattatacgactaacatgaaattttgtcatactttttgggacataataaatccaagatgattattaacgtacgtagttaattatttctgggaatatattggggtgcacaacatataaattatgtacatcagagatagaataatttgtttaattaaggttggaaaaggaagcagaaaggaacaaaaagtgcatcacccaactgtgtacaaaattatggaataggtatctcgatattagtattaaagaaatgctacaaaatagttagcacaaataaatatgaagtctcctattatttaatataataactttcgtaaaatattattttttagagtgtaaaatattgttaacaataactgatattacatggaatatatttattaacaaattttatatcttaaaaaaaattaataaaacaattaagttatctttattattctagtgagagagagttgtttacagagcataataatatccttattttccctttttggtagtcaatattgttacctattatggaatagaacaacaataatggtagccagtgatcctattggttacgcctcaaaacaaccgacaccccccgtctctttctctctcttaaacatgcacaaacaaaaaagtaccattatagactcactcgctaacactctcagtaggccattctaatattaatgagaattgctattaggtccgaatgatactttacaaataactatctacattctataataattattaaattaaattttgtgaataataacataacgtgaaacaaattcctaccaataataatacaacacctcatatcatattatattacgcatactcttaaataatatatatttaccatgaacaagtacaacgttgttactattattaatattgttttaagccacttgagattaaagagattattctctcatcctatttttacaacatgattattgctaatacatatcacaacactcaacactcagacaatgaagaagaagtagtagaaaataaaattacatcgcagagattatattaaattatttatgatatatgataaatataacaaacgtgccaccggtgtggtccgtcgccaatactgtgatatatcactattactacgtccgtgtagcttgagatatgagtagggggtaagtttccggagactctgttgagttgaacggaagatcgtcgtcctcgtcatcaccatcatcatcattatcatttatgcatacaactatgatctcttcaagatcatttgtaccacgcttgttgtgatttctttccctgattatcatagaatcatctggtgctgacgtagacgaagatattgtttccaagggtggaccctcaatattttcatttttgttgttgttattgtttagattattaatattattataattagtactcctggtgtcgtcgtcacaatattgttcatcttttgtgagattgattgctctctctacctgaagcctccaatccgttgtgcacagaacgtaaatcatgagtaaggcacaacacccttgggctgcaagcaaacctaaccagagacccggaaaccccaatttcaggaagaagccaatgaatacagccactggcatccccaccaagtagaaagaccccaagtttatgttagctccgacggtcggcctagcactgcctcggagaaccccacacccagtggtttgggggcagtttcctagctcacaaagcccaacgataggcaatgctatcgcagttaacttcagtatttccgcgtcatcggtgaacagccggccccattgatacctcatcgaggttgtgaatatcattgcagttagacccgcaaagaccgccagggccatggacacaatcatggaaatgcgggctttgccaggccggttggcgcccaactcgtggctgacccgggttgagacgccttggctcagggaggaggggaagacatagaccaatgaagtggtctgaatcataatccccattgaagcaacggtggcttttggattaccgagcagtccacacagcagtatcatgaactcgtaccaccaccactcgaggcaaacggaaatacaagtgggaaccgccatagacagcagcgaggaccagccgcgcaagcagtcaatgctgggactgacccaggagtccttataaaccccagaaaaataaacaaagccgccgagcaaaaggaattgatgaaggttagtccaaaccatggctatggcaacccctgaaatacccatttgtaatttgacgaccaggatgaaatttaaaggcacgtggagaagaacagatatggcagtacagtaagtcaatggtaatgtaatgctttgagtcctgagatatattcgtagagggtggaggagagagagaaagcagagatcggggacagagaagaggatgaaagtgtgggccatagaagagatctcatggtcttggccacacagtaataggatgttcttcatgttgagccacatgaaagagatgggtatcgaagttgagaggaggaggaggaccgtcctctgaagtgtcaggccaagaagcttccattgtttggcaccataagcttgaccgcaaatgggttccattcccatggctaggccggagatcacagagtaacctgtgatgttggcgaagccgatcgcgagcgatcctcctgcaagctgaagctccccgagatatcccaggaaaagcatggagatcatggctctggagtagagaagaagacccgttagggctgttggaccggatatcttccctatggccttgacttcctctaaaacctgacaataaggacgaacatgtgataaacaatagatgttaattgagtaattcgcttcctgcttctttcatttttaaacatatatacatacaattacaaaacatatatatatatataataattttctgtgttctgtcactaagtttttcattttattgttaaaaaaaagtataaatatttacctctgaaggtgttggccatctgtgaagttcatgttgatcttcaggataatgaggatcgaccggtttcctgtgattcatgagaagggctgtcttgaaacagagaaatgaagataacggagaagagggtttggggtgacacataactcaaataagctatggagctgttaaataaagattctgccaaagagaagaacttgagccagatataaaaagaaagatattacttggtaataataataatagaggtaaggaagtaagttgagtaggactctgtttttggaattgtgctctgaggtcaggcgaggtgcggttggtttgtttttgtatttgtattggaggaggatgtgatgagagacctcgaattatatagttgcttgaagtgggtcctatatcttctgttttatctatttattttttcttaaatattagtacattatcattgtatgaccgagcaaacttaattgttacaaaattatttatgcaaattttaaaccaaaaaaaatatataattacttttaaattaaactagtttattgttacgtacccaatattttatattagattttttagtatgagttttaaaagaaaaaactaaataaaaaaataagtaatatttttttattgagaaaacactactataaaaaccacctttttgctaccgacgctgtcgattttggcaaaatttgttaccgactctgatgaaggcgatgctgtaggattaaaaacaaccgacgccatatataccttaatgcgtcggttattagtggcgtcagttcctaactaataaccaacgctataggggtatacatggcgtcggttcctagctaataactgacgccatatatacccataggaaccgacgccaaaagccataaggattatttttattcagtttatttaatttatttaaattatgtatttattcatttatatattattttatttaatttaaattttaattagatatttatttttgaaaaaggtaaattaaatattatttaaattaattttaggattggccaaaatacccaatttcatttccaataagtaattgaatattatacaaatataataaaattagtccaagtattaacannnnaataaatctaactacaagttaacttaaaaaataagttagggaagaaaaattcttaggtctttcagcatcaatcgtccaaggcatcgtaaatcaataccatcaaccgttcgatccactgtcgctgtattggtaaaattaagtttttggattgtattgctgcttatctccaaacttttttaaaaaataaaaatttatattagtttatgtatatattatttgttattataata

SEQ ID NO: 112402 - DNA, 5258 bp, Cannabis sativa
  modified_base (856)..(859): a, c, t, g, unknown or other
  modified_base (1022)..(1027): a, c, t, g, unknown or other
attccatatctcgccaagcttgagggcatccacgacaaagacccatttgtgagggcatatgccactctctatgggcggaaccattagtttggatggagttattaggtataactccacctgatgaattttcaaacaaggtatggccgcctaccacttggaccacaggtggaacctgtgatcggggatttgacggctgaccgttaagagtttcggcggtatgcccagcagaaatttcttctgtttcacccattgggatgctagacgtagcagctggttgctggttagcaacttgatagactttccatatcagtacggtggcttgtcttatgcagtcgtcgatggatgcctgctgggccttcaacgtttccatctccctatccctccattcaacgaactaacgcctctgcttttcgaatgcaaggttcagtgcagcacggagctcttccgggtcataatgcaaggtattagtgtgaccttgcatgagtccaagagcattgcggaggttttgaatctcagtatcatctcctattgtcgtctgagccttagttgtggatgagattccagtgttgggagtaccggctgccgaactggtgtttccagtctcttacacaccgggtgtgatcccagtcagaggggatgtcacaccttgacccacagtggatggttgcgtgtttggttgctcagaattggtaccgaccgattttcacaccttgacccacagtgggtggttgcatgtttggttgctcagaattggtcgaccgattttcacccctaacaggattttaaagagtttcgacccctttatttcggcaatatcctactccccttagcttgtattaactcgagaacaaagaannnnattgtttcctctctcaaagctctcacaatgaaaatctctgagtatttatctcttacatctctctgaagtaattcttttgaccccttttacagtgaggatggatcactatttatagggctaaatgcatgacgaaagttttcccttttgcttacaatatctatannnnnnaagaacatacattacatatttagaatacatgaaatgagagattcagatatcttgctatatccctttgatacgatcctatgattgtatggattgcgtttatgcttcacgatattagtcttgaagttgctaagccttggtacattgtttggagaaatgaccttatttgttgtccagatcatctgcccttgccctttccggtcaggcagactttgtccatacagatatttagttgatgtctatttggaatatctcttcagccagatgtaggaaatagcagacacgtgtcaccagtatgtgttgccacatcatagtgcaaaaaatgggataacactcatcatcatccagcactaattttcacaatttaggtgcttattacaatgatactaccaatgaattttttttttgcaggacacttttcggcttcattctcactcactgcagcatcaggataccccctcatcatcatcaacacctagtgtttcgcatgttccctctggtgtttaaagtatgtctccaccaccaggctttgaacatgtcatttctcattatggaatgcaacaaccagctacaccagctgttcattcgattggtgtagattctactgtttcaacccatggttaggacactccaccagctatttcaccacctgcaccagtgcctgcatctgttgttgcatcagatcctgtcactatccctggatcatcaaagcctccatcaatttctactcatcagatgcaaacaaggtccaaatcagggatacataaacctaaaacttttcttgtttctagaatccctctatcattcaaagaggctcttcaacaagaaaagtggttcaaggctatgaaaactgaaatggttgttgttataaagaacaaaacctggttgttagttccagttccagaagtcagacaactaataggatgcaaattggtatataggataaataaactctgatagcagtgttaacactctcaaagaaagactagttaccaaggggttccatcaacaacctggttttaatttcatagagacttttagtcctgtaattaagctagtgactatcagagttatgctcactctagccttgtccagaaattggacaataaggcaacttgatgtcaataatgccttcctcaatggagacttgaatgagaaagtctacatgatccaatctcaaggttttgaagaccccactgccaaacaccttgtttgtaagctcaacaaagctctctatgggctaaaacaagctccaagagcttggtttgacaaactatagcaatgcttactcacatttggtttcactacctcaaaagcagatccttattcattcaacactctactcatcaaggcatcaccctcattcttgtctatgttgatgacattctcatcgcatgcagcaatccacaacacatagactcactggtccatgctctcaatcaaaaattttccttaaaagaccttggcaaacttagctattttcttggcatagaagtcaattccacaacaaaatgcctacatctctctcaaacaaaatatgctcaagatctacttgccagaactaaaatgcaaggagctaaacactcaaacactccaatgaacagtgccctgcaactattaacataaggtagtgatcctattgaggacattcaactgtatagatctgttgttggagctctccagtgcttaacaattaccatacaaaaaatttccttttctgtgaacaaggtcttccagttcatgcaagatcccctacaagctcactggatagctgtgaagaaaatcttaagatacattagtggcactcttcactttggcttgcatctaaaatcccccaccacacttgacttgactacatgcattttgtgatgcagattgggcttctgatcccaatgacatacactctacttcaagtcatgccatctttcttggacaaatttaattgcctggcacagcaagaaatagaccactgttttcagatccaacactgaagctgaatataggagcctggccaacacagttgctgacttaacctggctgcactctctgtttagtgaactaagaattttgccttctcgagttcctaccatctggtgtgataatctcagcaccatcatgcacactatgaacactgtccttcgtgctcgaacaaaatatatagaacttgatctatactttgttcgagaaaaggtgctccaaggttttgtccaagttaaacatgtaccagcaactgatcagttagttgatggcctcacaaaagcaatatccaacaatcgattcatcactttcagaaacaaacttacaattgatgatgcaccaattgcaagtttgagggggagtattggaagagaagacaattaaagtagttagcttagttagagtttgttaattcttactgtcattaactaactctctttctctcttattgtacctatataaactatattcgtgcagtgtaatcaatgccattcagtctttgatcttcatgctctctttttgtggtctttctctcactcttattctctttcttattcatctcgtttactctatttttcaccaattcaataatgtccaaaagatctcacaccaacgaattcggaccaaactatttgagaccgaactaaatgaatttggtgtaaatgatttgatcaattcagaccgttttaaattctctggttcggtcacagttttagaaatcttggtagtggttcaaaccaaaccaatccgtataattattatacatatacttaatatattttttttggacaaaatattaaaatttaggaacaactttaagtagaatattgatattaagtttatattattacgataataattttttatttgttacttatgtatcataaacttattcaaaggaaaaaaaaaataccgaaaaaatgaacaattattgtaaataataaaacttagaacaactacgaacagaaaccatggttcgaaccaaaccaatccgtttttgagtggttcagtttttggtttggtttggtttaatcatttcattggtctgatttggttttgaatttttaaaaagtcaaatagtgatttggcttgaaaaaattaaaaatttagaccaaaccaatcggtgaacaccctgtaggattgggattgaaaaacctaagcatgtgaaacagtgaaagtggataagttgcaattttttttttcctttgggtgagtgcatgtataatgtagacatgcatcgacatatattgaatttgccaacagaaaacataaaattaagaaattggatggctaattatggtgttgactattgagtgttgacgagggtactcttgttgaaaaattcaagcctaagagtataatagtgcaatgtaatgtacctatcaatttataaattgtagtagtatagccatagcatctataagttattgtggttcctctttgacaatctatgttttttaagaatatcattttctcttattttgttatgtacttgtatttattattgctactaccgtaagagagcttctttaattccacttggttcaatgtagtccaaaagaaattagagaaataattttttttttttttcaaaataacaatttatatggttttatgtaatgaattttcatgggtagctactagctagcttggagtaaaatattttatttttgaaataaaatttggcaagaaatctaagatagagatgttgcgtggagaagtcgctacttgctaggacaggttttgtatgcgctttaataaattatatacaaaagaaaatagggaaaaaatatattaagcctggagagaagctggacgaaattgcactatatatattttttttaatttgacacttttaatttgtattttttaaaaactttattatatttatctctttttaattattttaccaattttattcctatcactttatgatagttttcattattctctaattaaaattttgcctaagcttttccataaatttacacatctatctacaaagaacacaaatttattatatttgaaattatatcttagttatgtaagtgtgtgaggataatttaggtaaaatactcatagaaagatgtatatttgaattaaattttatttagagttaaatttagttaatgtatataaaaaaaaaataagtattgttgaatttctcccatggtagattcaagggctatttacaaaaatatgggaaaataaagataagttttgatatatatggcataaaaacttaattacactaaat

SEQ ID NO: 112403 - DNA, 3641 bp, Cannabis sativa
agatttaccaaaaataaaataaaaggattaagtgtataaaaatcaaaatataagagaattttactacaaattacttttttttaaaatgtaaaaagagtagtcaaatgtaacctatatgttatcgttttcgattattgtcgttttattaaaatggtgtcgttaataaagaggtaatattcgaaggatataatttgttgttcttataatttaggggacaaaagtataaagaagataaaatttaggggtaaacctatacttttctgaaacttgaaacagcggggaatgaatgggtagagaagattcatcgctttgttgggttaactgagtatgattttgtgatggaagtgcagctaaggcagacaccaccacacttccttcttccgctattccaatcaaaacccaacttcccaatcccatctcacaggtatttcttgcttttctcattaaaatggaaaaatgaactatgcattttcacattctgttctttcttattcatttgacattttttttgttgttttgttatgtgggttgtccgaaagtttgttttttaaatcttgggcaaacagtacaggatttcttaagaaacatttaagaggctcagttgaggtaagatttctcaagctttatgtattacacacacattttttatgtatatatgaaagaattatatatgttattgatgtacagaaatggagattccatattcaggagatgtcagagggtcaatgctcagccaagcattacttggttcatgttgtcaaaaggtaccagaagttattatatgaattcaaatcagaacttatatatccgaattttgggatgctgtagtcaagagttatgtatgttaccgttttttaatctggtttcatgtcatttgatgcaaaattttgggtgcaggggtgaaactttgagttcaatttcgaagcagcatggagtttctatgtatgaaattgctgcagctaataggaacatagtggatgttgaccttgtttttgaaggtcagcagcttaacattccttcagcatccacattaattcaagcggtaagactgattcttgacagagataacatagcctcagctaatttcacttgtatgaatttttttcttcttttcgaatgagataagtagtaatgcattttcttcatgtgggtgaaagtaatgaattaaatgtggtggacactatatctccttgaatgttgtaaataaacactttccataagcttctcttttataaagtgtgctcttgattctttcttgtactttttggattgaatttttaatgctaggattcgaaatctgttaaattttgacttgattctattactttagaatgaatatcgatgtgcgtagtgcaggcctcaagatgttgctaaatttctggttcatgagctattttttattgttgacatgaagcaacgcatgcttcaatgctaaatgttactttactagaaatctttagacactactgatttcatttctaatgagtttatgttgagtaaatgagttggaaattgccacgtgcatgcctaagacttcaggtttatgccatgcgaaatttgaacatggtaaaaacttgcatgttaagcattttagtttagccaaaattctagagtagcttctcttgatccttctcaaataaagattaaatttatacagtttcaggtctctaatgctgtagacttgtgtttttttttatcattgtcaggttgggagaagttggtcagcttactttagattacctaaaaaggatcatttctctttgaatatcttgaatggagtattggaccagaagaatttaagtgtgctatattatcggtgtacgcctcatgttagtgtgtttcataccctgttttcatctcacataaatagtagtaatgccttcttgtgtattcttattatacttgctcaccaaacttgatgaccttaacagggttttccatcatattatcaggctagaactgtttgtggttttctagttctggcgccacttatggcattttgtgtcaaatgcataattagtgcctttcacaccagagtttttggagagttgagacacaaagctgtgaatgaatcagttttaaagaatcataggtccagaggtgagcgatggagatatgctcttggtgatgcatgggaacccgaaaagttagatactgagtcaattttggattccactgtgagtaaaggagttctaattctagttgtcatatctctttaatacttctaagtgagcaatttcgctgtctgagttagtagtgattggtgcaatttcactaactatcgaggaggtagtattaagatctatatactgtgatgtcttacttgtcaagttagaaattctagaataactgcaaacatttgccttaaagatattatgctgttttacttctcattttgttcacagtgaactaaattttattgaattaagaggtatatgtttcaagagaaactctactctcaaagtttgcaccattatgatcattagaagtattctactttatatgttggttaattttgatcattatgcaggatcaatctgaagatctggttgaaatttcttttgaagagtcatctcatgattacagaaaacttgaacaagattatcaagaatttctaacaaagtgtggaatgagcaattgggggtattggcgtggtggttcaacaaggtgaacccttattttggtttccttgagcaaaccattaaattagattagattagatccctcttcttttttcttgttcttgttatgtttttctttatctggtttccctttccttttcgagtaaaaaaataagtcccctcattagaaatttgtacagaattagcttgtgtagatgcttatttattggctccaagatagtgggaatagattggaattttaaccattactagaattgaaatgaaaatgaatgttaattgggatttgaaatctgaatatagctatacatgttcctgtttagaaatataattggaacgcagtgaagtcgtccaaattagcaaaaaacttaagctagtgaagtattttcagtatctactaaagcccatcatagactgctataggaaagaattactaatactaattaacacacatgtaaacatgatttgccacattaattcttcatgattattcctgctctctcttcatgattaccaagagatctttgaacatttgctataccttggggatctagaatatggaataaacatcatattattaacaatatcacgagttgactagtatgatgtaatttttaatcaaagtaaaaataattacaaaaaccacaacacacaagctttaaatgatctgagtatgcctatgtgcacttaaaatatataccaaaatactacacacagaagtaatgttaggaaggatgtgcgtagttgaggtgccccttggcttagttgttaccttggcctccttcgctgtcctttgccttggcgacggcttatacaagatacgtttagatagggtcgtgtacttttgaaatataatttttacagtaacgtgatatttcgatcatattctattcaattttatcgtgaaacgagtgacgcgatggatggtagttagtaaatggatgtaaattaaatacttttcacattttttactttaataattaaaaaactaaaaataaaaat

SEQ ID NO: 112404 - DNA, 3855 bp, Cannabis sativa
  modified_base (42)..(69): a, c, t, g, unknown or other
  modified_base (719)..(721): a, c, t, g, unknown or other
gccacaacataggaatcataatttataattagtcacaacttnnnnnnnnnnnnnnnnnnnnnnnnnnnngactaaaagtaagattttttgtgtagcttctctctctcttttttcacatgaatcgtctcagcccattctctctctcacgaggaagacgtcagaactagtatagtcgtactctggcgatgggtttttaccatggattcaagatgtacgcccgtagaagcctcatccacctttctcatttttctcaatccaacttccctctctcctgaaaaaagaacacaatggcagatggtagtgctagtgaagattgtcgttgatggagataactcatgagatggtgatggttgttgccgacatctccctctctcttacaggttgcatttttccacaatttataaagatttttttttttatatatattttttatagttgaatcattttgatttcactgatctccgaaatcaaattggggtaattttttgttcaatatttgatgttcttttggatatttcatattattttctttttttattgcttatgggtaattttgttagcgaaccttaaaatctataccttccacctaagtaaaatcctcagtgtgttctatatatacttccttaacaagtacagtctataccttccgcctaagtaaaatccttagccactagcctagctttgaacctcactagttcattctcattgattctctcttnnnccttgagaatccatttgcactccacaatcttcttgttctctcgatttgacacagctacccaagccttgttatctcgtagagaatccatcacttaatccatggcctggagccatttagacttgttttcaacctaaaattgtctcttcatagcttctgggctcttcaattcagtttattgaattgctgccaatgcaaatgctattatgtctactactacgaaccttgctggaggatgaatccctctctgggttctatcacgagccaactaataacttttcagatttgtctgtccgaaccctttcagcacctctatttggactttgttatctttttctttcacctccacatcaatttctctctatgcattcttcttgttccacactagctatcttccgcttgtgaaccttcttccaaaaacttcattctgtcctctaattctacgcttgtggtgtctttattttctatttttactataacacatggagacacactatctttcttgaagttcaagtggagatattctaactcattgaaaacaatatttctagcaatcacaacctttggttgacccttactggaaatttaaattctataaccattcattattcttcaggcatacctaagaaaattctcttcacggatctaggttctagctcgtaaataaattggtatacatatgttacacccaaatactcttaaatgcgttaggttatgggttctattataccacatttcataaggtgtcttaaggtttataactctattcgggctcctgttaacaaggtaggttgtggttgctaaggcttaacctcaaaattatttttctaacccagaaatgaacaataaattaatatctaactttgtgttcaacaaggtttggtccaacaaggatatcctttcagtaactccattttactctaggatcttcactacggttctatgccaagtgattccaaattcatgacacatcttgtcaaattccgagttaacaaactctaacccattatcagtcctaacgtttttaattttatgatcagtttagttttcgacctgagtttttcaatttctaaaatgttcaaggcactcatccttagtggttaacaagtaggtccaaacacaatgaccataatcataaactattaaaagaaagtattgcttaccagagtgagtaggcaccctgtatagcccccaaagatcaacgtgcacatatttaagtatctttttagtggtgtgccttgccggagtgaactttagcttatgttgttttcctaaaacacaagcttaaaaaatggtaaggcacaagaatttaaattttgaattataccttatttatacagttctttgaggccttgttcgctgatatatccaagtctctgatgtcataacttcatatccgattctagcccttttaccatacttgcttctccagatggaccagtttctccttagagaatgtataaaccattattcttttcacctttcataacttccaaagaacctttggttatcctcaagctttcgtgtaaggacttttttccgtatccttcatcctcaagtgcaccaagggatatggatgtgccttacgtttattagcaccttgattccgcaatcatatatactatttgatggccaccttctagttccaatgaccctgcatgaatgatcattacccattagaacttttatctccatcaattgatttgtaaaaaatgactctcgattgggacacatgtgataggtgcatttggaatcgagaatccactccaaggtcattgaagattctgagatggagaacagtacttcgtttgtggaacaatcatcgccatcttcaacgattgtattagaatccttcccgtggtgatggtgccggaagtccttcctatctccagtgtgagacttgttttagccttgttgctcattgtacttcttgcaagatctttgcaagtgtccaaactttccacataagtaataattccttgtctccttctctctggacttcgatcttgattgagagtgatggtgtttacttgtcaaactcattttcttgggtgatcttcctcttgccaaatacacttcttctttcttggattccttttctaattcatgtaattcaaaatctttcaacttaagtgcggaaagaacatcttccaatgcaataacatcgctgccatacttcatggcagccttgacttcccaatatgcgattgcaagtgatcttaacaagatgatggtctggctttcttcatcaatcttgtgatttattttagtcaaacctacaataatctcattaaatctatcaatattctcatctaaagaaagggaaaaaatcattttaaaaccgtataactttttttagcaaattaatctttctagaatgtcgatggttttaagtatacttcttccaatttatcgcaaactccttttatcgtcttctctgcaatgagttttcttcgaacacactttgataggtacatgataattaatcgtgtagtatgccatctcctccatttgtgctttttccttaatttggtttcttttctgcaagaccctttggaaactttccgctgcacaaggatccccttcaaactttcaatccatagagcaaagcccccagttccatcgaatttctccaattttaatcttcccattgatgacattcaaagtttcttcaagattacaacggaaagaatcttgattctgcgttcttaatcgatcacttagctctgatttgtgggaaaaatcaagactaaaaggtgtagaatcaaatcaatgaaactttaaataatcaaacaattagcaatgacaagattaacaatagatacaataatcagaaataaaaaaaggggcaaacagagtgtcaaaaccaaaaaatactaaatgtagaaaataaagaaattaacactaagatatatactagttcaagaccgatagatcgatgtgatctatggctctactataactctggaacaccaccataatccttctttatcgattaagcaagaataggtacaatacaatcgagacgagattccctgtagagttctcacaaagtgtttcaactctcacactttacaccccagaatcttcttcatctacataagattctttttacaaaacccaaacccaatctctct

SEQ ID NO: 112405 - DNA, 3257 bp, Cannabis sativa
taaaaattacaaaaaaaaaaattaccatcgggccctatcgagcccaaatcaggcttaaaaattcaaaatattacaaggacatcggacccatatatcgggccctatggagcccaacctcgggcccaatatgttacaattaaacatgggcatcaggcccatatatcagacccatatatccggcccatcagacctaccaggcacatcgggtccagttgacccatcgggcccatcgaacctacaaggaaattcaccaattaaggtgcatcgggcccctatccatcgggcccaacatcgggtcctattgacccatcagtcgcaccatcgggcccacatcgggcccgacatcgggctttcatcttctgtgatgaaacataccctaaatcacaccctaaatcacacacaaaatcacagaccctaaatctataaagaaaaaacattttcaccctaaatcaacaattaaaaaaatgaaaaataccatagacaaaaaatcttacctttatcgacattacgtggtggtggttcggttgaaatgggttcgactatttggtgttcggtcggttttcctggtggtcacggtggttcgatcgagaacccttcgtggtggtcactggtggtttagtcaggtggaccgtcgtgggtaggcgcggtaagcaggcggtcgagcggtgcggtggaggaggtggatcggcgtgggtaggccggtggttaatcgtgggtcggtgcggtggaggaggtggctcggcttggattgatttgtgggtttttggtttgatttgagagagaaaggaggaagagagagagagagagacggttgagaataatgagaggggtattttagggtgtagggaaaagtatgcccatttttccaatagttataagtattagtttagggaattaatttgggtataaaagatgcataaaaattcaaatttcccttagtaattagttgtagtccttgtgggatcgacctcacccatgcgagtttttacttgaaaaataatatgtatacttgcgtgttgaatttttcacaacaacaggtccagtgcctccagctactcctttccaaagaaaggatctgcaaattgattccactcctttcaacactctctttggcaaaattaatatctgagcctaataggagtgaatgacaataaatattacttaattaatgagagtcacccttcctgcaaaagataaattatgagtactcaaagttttaatacactgaaccattttctcaacaatattagagattccattgcagtgatcttctttgaacaaattaaaatcccaaaatacttaaaatgtaagttactggagacaccagaggcatctatcactcgttgcaccttatctaaataaaatatcatatattttctacatttaaataacacattatttaaataaatgaattaaaaaaattaaactgagacaatatgagtgtaccactcgtgtcttttcaaataaaagatgataatatattttattatttaaattcaaataaaatttaaatttaaatgatcatctttttattatcgttattattagataaataaatcaaaaataattttaaactttatttatataatttagattaccagcagaaagttcttcactgaattaggtttatgattggtctgctgcatatctggaagagtttagaaaagctcaagttaccactaaatttccacaacaaagaattaatgattaatattgaagtttattcaattacaactttcaacaatgcaagtaaataagttttttttttaaaagaactgcatgttcattagactaaaagagaaagatgagaatcacgggaggatttccctccccttgaaaaataccagcttcttagctagagagtctagcactccgagctcatccatctgcaaaagagttaaaactacgcttaataaagaaaaaaactacaaaataaatctaggattgaaagagaaacactaaagaatctccacttacgagggcatttgttttaagacaaggcttaagccactacttaacaatccgaatagatcatcacaagaaatttgatgtgcccaagagagagctaaaagaatagcttgagcttcaacttttagtgctgaagtagcagcaacttgttgtaagttatatgcctaagatccatcttcattgttaaccataatagagggtaaacctgctacactattaagccaagaagcgcccgtaaagagagaaaatttcacatttgattttctattaccacaagcattcccaactgagctatgatgctaatctgaaggagctgccaaagcaacaaattccttgaaaaaagtagagatttttgcagagcagaatgataactagggcttggaaccgtaaattctgacttggtttctctgctgccaaatttccaatgtaacacaaccaaagtacaaaagtaaaaaatacattttgatctccttagagtttgatagaagagctttaagaaattttcatcacagtactacccagaattttgtcaatccacaaagaaaattcatctgaaaactaaactgcctcagcaaaagggcaatatcccatcaacacagaagaaataatctttatcaagtaagaaagggagactagatttagacggaataacatcattgaggactctccaaagccatatatcaatcttaggatgaatctcaggatgccaaatccacttccaaacatctctaactgaattaaacccgaactcttggtctacacaatcgacatctttgactaaaaattgtccattccttttatgcttccaaataagttgatccccatgatgaaaatgaattctaggaatagacaaaattttgctccctataatatccccaaagatttgaagcataacctgcctgttccacgaatctccctcaaggatatttgtcacaaatcacacggtttactctttccctcttaaaccaaccattaagtcattaaattcctcataatggagccaaggtatccaaggctaatgccagaattcaatagtctcgcctgcagcagctaaagagagtgtatttttgaagacaatatttttggattctaaaatactcttttttaaaaaaaagagtcaatattcttaagggacatagattgaaaattctcatgacgacaatacttgctcaaaaaataagacacccaaggtttctcttctttttttgccaaactccaagctaacttagaagaaagagccttattcatatctcactagaaaaaataactacttttagtgacaatttttt

SEQ ID NO: 112406 - DNA, 9053 bp, Cannabis sativa
tatatatattctttggttgggatatgtattttggctcttctatgatgagatcacaacatattatttttctttttgtccctataataattttaaattgtatcaacttttgatggtgattaagtctattcatgcacatagtaaattttgatattttatgtgtattatgaatttcaatttgaccaaattaattggtgttaaattctgacttttggcctttgttgtagcacgaatttttttctttcttgaattttatcttcatgccatacattatacatacaatatatatgtaatgtaatacacaactaatttcttcaagaactttttataacagagccattaatacgagttgaagagatcgaccaatttttttattataatgcttttaatcaaaattaatattttgaaaataattttgataacataatatttatctttatttaagatttctattttcttctttgattacgtactctcatattgacttattttctgaagtctaaagaataaaaaaaaatataaaaattatcaataagaaatttgtctcattgtttaagatttttattttcctctttgattatgcaccccaatattaatttattttttgaagtctagggaataaaagagaaacataaaaatcattcacaataaatttagcagtataacaacatggagaaattaaattttcttattttacctttggctatatctcgcttttgaagatattttgtagcttagagcttagatcaaagtggaccaaagataaaataaaaaaatattggagaagaaaagaggtttagattgatgaaagaaaatagagataacctaacacttatcatgtagaaatctcttgaagatgagaatatcaatactccaaaatttatcgtaatatttctcagaaaattttgatagagttttcttttctttctcttcctctctcctttttgtctgatttttattccctctttatagactcttttgtatgatatattgatcagagaatggataggtgaggtgggcagttaaaagttagtagagagaaaagtgtgaatatattattaatgaataatatttttttccttttttttttggttgttgaacgattctttttatatttattgttattattatttttttttttgtaaataaatagaaaaaaaaaaaaaaacgattcaacaacacttttatgttaaaaccctttgattagcaaatgttagtacattatttaagaaaaataccgtaacatggcttagctagttgggcattacatctgcacttcaagagcctatagacgcttacttggtgggtctctttgaagacaccaatctttgcatgatccacgctaagagggttaacatcatgcttagggatattcaattggctcctaggattagaagcaaggaagcttaggttttctaggtgatgacattcctttgtaattgcttgcttctcattaatattatgtttttttttataataatatgagaaaccaatgttaatgttatttttaagagaaatactaaaagatactaatagtgtctagtacacttagaggtatgtgatatcgctattggtgtaattagagtattgttattgagtagtagtagtgtctaacaccttctaaacgtgttaccttcaattgattacgctaactaattgcaagaactctttgatgcattatagccacactctatttttagtaattgaaagtttacttttttttagattgcatttttaaggacgattcttaagatcttagataatcatgtttagcatagtatataaataggcattttaccaatttatttggcttgtttttgaatattattcaattagactctttttttaaaaaaagtaataatcttaaaaaagacaggaagttctcgtcttgattttttattgatctttttttttgtttatttcttctccatcaatgatattttcttctctgtcaaaagagagaaacgattgaggtgtacgtgcaaaagatgattaagctctatattttcttcaagaacataagaaagcaagaagaaaatcatacattgaggtaattagagaccaagaaatatatatttatatataaggtgacaatatcataaactctatataaaatatatttgtcagtaattttaatctatgcaactgtaatatataattatatttttgacaagttattctaaattgggatgtgaagataatttgacaatcgaaatgataggatcttgttgaagatctcattttctttctcaatctaaggaggaactaaagtataagatgaataaaagattagtcgattttgagggagatcttaaggagagattttttttcaaacattttattgaatataaatatatatatatatgacatatgatttcatacccaaacttgattgaaatgtcagaaagtaaaaaagaaaatggcttaaatagagaaatggcttaaatgaatgccacatatgatgaaaaatggaggttgtatctgcaattcattttggagactctgaatattctcgtataaaattattaaaagtgaacttaacctgacatatatgattgtgtctcactttcaacacaaatgacaaaaataaaacttatatttgtattttgtaatgcaatagattcttgtgacttatttttgtgtttatttgttctatggttgacgatattttctcaaagatattaaatatggcgggtccaaatatggatcagttcgaagcttactttaggaaagcagatttggatggtgatggcaggattagtggagctgaggccgttgccttcttccaaggtgccaatctgccaaaacatgttcttgctcaggtttctacttcttttttcttctcttataatcctaaggttttatgtatcacttctccttcttatatgtatatactcagtttgtcattgccatttttgaattctataccttaacatttgagattaatgtgttattatatggtccttcatttggtatcagctctcttggtcctggctaaactgaagatctctgtatatgtaatttatgaaaatcatagaattcgcttcgagtttactatatcattatcttcgtcagttttgtacttctatgaagagaagctctgaagtaccaccttattatttttatatcgcctttgaagaacataatttcaaaattataatgtatgacatttacgatttccagatatggatgcatgccgatcagaccaaaactgggtttcttggccgtccagaattctataatgctcttagacttgtgactgttgcacaaagtaagcgagatttaacacttgaaattgtaaaggcagcattgtttggttctgccgctgccaaaattcctcctccaaaaattaatctaccagctgcatctgcttctcaaccaaatgctctcacaggtgcctcatcctcagccccttcccccatcccccatcagatgggatcagttgcaccacaatctcaaaattttggatttagggatccaggtgtttctaatgcaaattttaaccaaagctctctccctcaacaaaatcagtctatggggccaccccaaatcatgccaaaaaataccaatagtattgtggctcccaatgttctgaactccagtatctcaaacgactggcttggtgggaggcatggggctcctcctactggtgccaaagggatcacttcttctgcatccccttctatagccagaacacaacctgtagcttccgcgctttccttgcctacagttaatgacccaaaaacactattaggttctagaaatgggtttaattccacctcagattttgctagtgatttgctttctatagccccttctttacctaaaaaagactcttctaggtctatctattctaccagtagtgcttctgcctcattggctattgttccattttctagtgcaccccaatcttccaacaacaacaacaatgtacttaattcattacaagatgcattctccatgcagcctgcagctaatcaatttcagcgaccccaagcacctttgaactcaagtcagcaggctgcccctggttcttcccctttcacatcaactggtagttctgttggagtggggatcgccacaccaggcaattcacaactttcttggccaaatatgaaaccatctgatgtccaaaagtacactaaagtgtttatggaagtagacactgacagagatggaagaatcactggcgaacaggctcgacatctatttttgagttggagattgccaagaggtgaatttccctcccaatgcattgtatgtttggatttttgttttaatatttctcatttttaacattggttttgttggctttaccagagatcttaaagcaggtgtggaatttatctgaccaggacaatgatagcatgctttcgttgaaggagttttgcttcgctctttatttgatggaacggtttaaggaaggtcgtcctcttccagatgcccttccaaacattgtattatttgataagaccttgttgtcattaacagaccaaattaaggcctctcatgacaatgtagcatggagtccaggccctggaactggtaagtgtaaatcttttggtattttattttactattttctctttatatgtttcttgataagtattttttttctttttatgtttagattttggacagcaacgacaatggatgccaggtcctcaatcaatggggcctaatgttaatttgaggccaacagtgcatggaaatgctcctaggcgagatggagtacaatcaaatgaggaaagttcgagagcacctaattttggtgaattgtttccagaccaacttgacaatgggcatcagagttctactttatcaaaatcagtagaaacaacaacggctggaaaaaaggcattttgtttgctttagttcgtttgttgcaactacttatttgcttgtatcaaaattttctttcttttttcctaaatagtaaggaatttgggtctttgattgttgtaggttgaagagccaaagaaggttatattggattctaaagaaaagactgagtactaccgcacaaaaatgcaagaacttgtgagtagcttttgttgttaattttttttttggcaatctgagtaaaccatcattgccaaattgactcattggagggttgaatttacttaatccacttttatatttatttttttccgaagaattaaatcacataaatgtaactatcactgaattggtaggcggcgacctttccctgaatttgtaaaatttgtctagttcattattgcttttgatgcttgaatcatgaagaagacactaaacttggtatttttttagttgatcaaacaaacctgtaatctaacttcaatgaactatgatgtttcctacctttttccctcataatcaattctattatagtttcatttcattggctattgtttatgttatctcaggttctatacaaaagcagatgtgataataaattaaatgagataacagaaagagcatcttcaaataagcgtgaggtactttagagatttatttaattttttctaaaaatagtttaaatgtcttatttaatatatcgttacaatatatattacaggctgagttaatggggaagaaatatgaagaaaagtacaagcacgtggcagagatagcatctaaattaactattgaggaggctactttttgtgacattcaggtgatacattcagcaccatgactttttactctcaatagttgttagcatttttttcttttgactagtttttcccactctctaaaatttattgtcgttttactaattttgaaattgtggtatatgtcttttgggtgtggaaggggactctatctacttcttagaagttatatttaattggtgaattttgtttcttgactagtcttatagcacagttatgttaaagagaccttgtattaaagtggttctcaatttattggatgtcacaatttttctaatattatatattttatgatatgctcttgattccctctaaggcaaggaaaatggagcttcatcaagcaattgtcaaaatagaacaaggaggtagtgctgatggtatccttcaggtaatctatgactaattaattataatgtgttgttaaaagttcttgataaatttatttttactgacaatgcagtacttataggtccgtgctgatcgtatacaacatgatctcgaggagcttttgaaggctttaaccgaacgttgcaagaaatatggattacatgtcaagtcaagtgcaataattgagcttcctaaaggtacgcttttctttctcaatgtttacctgctgcaaccttcaacaaagaacctttgttagatagagagcacaaatacatataaacatgctacataattgtgtataagtatgcaatatttgtcaaaatacaccttctctaagatgagcctatatacttgtttctggtgaattttgaggtacttacaaatggttcattattagaatttacttctttcttcatgcttcacaacaatggttgtctctaatttccatccccattttcaaattagtcaaagtagttttgaatatgtgaaaatttcttgtcaattggagaaatgagaaactaatagtagtacacataattacaacctgttatttttgtttttatattgcctcaacagttaacatgattgtgtttcatttatgaactacttaaggctgggaacctggtattcaagagggagcagcagtttgggatgaggaatggaataagtttcaagatgaaggtttgctctctagtgtttttgtttagaatttttttgatctttgctaaacagaatcaattttatcgatgcattgaagtaaagtatttttgaaaatatgttgactgatacctgtttatttatgtggaaacaaaaattaaaacttttaggatttgtaaatgacatcacagctgatgttagtccaacatctcagttagcttctgttcagagagaagttgatggtgaccttgagaatgaatcagtattctcccataatgaagatgattatgcaagaagctttcgtgatagtccattcgtagaaagtccaactcaagaattttcagacactcattatggtaaaggttctgaatcagatgcagaaactcataggtgggggtagattatttctttgtttattatcctcttgaataattttatccctttgctgatttaaaatctctccccgcagaagctttgatgaatcaacttggggtgctttcgacaataatgatgattccgactctatttggggatttgatgcttcaaaaaccaatgtaagtgtttgctttccaaagttcccttttcctagccttttaattcaatactgaaacttgccagatttttctctgttaaatattcacctaaaggtgttctaaataaaggctatttaaatttcctaaaagcttttttttagttgaacttatatatgaagtctaaatgtcaaaagtgaaaggcattgtggacctggaaataatgtgatttacgtccttcaattgttagcttgatacatgaaacctttatttgaagaagttattttttcttgttaagtcattctacatgtggacctggaatgcattttacctacttccgatttgtacccatatctctgaactatttaaggttataataagagataagagcaagaggagagagacaacaactgattactagcaagcattgaaaggttttatctagtgcttagaatttttcaagatttcatcattgggcatgtgcttaggctatgaactataactaaaatgaatttataaaaattggatgtacttgtgtctatgcctaatgagatgcaatttctcttaaaggcacactgttaagctctacaatgacattagttttatactactgtttcatttgttgttatcattattaaactttcatagtttcttcataatcttaattatcgttttgtgtaactcatgtcatccttttcctttaggatttagaatctgagaagcacaaagatgcctttggttcagacagttttacaatcaacccagtgagaacgagatctcctaattcagaaagcacatttcagagaaaaagcacctttatttttgatgattctgtgcctggcacaccactttctaggttcggcaactcaccaaggtacagtgaggtaggggatcactacttcgacaatttctcgagatttgattccttcagcacgcacgatgccagattttcttctcagcctgagaggctcacacgatttgactccataaatagttcgaaagattttggccaaaattccttcttgagattttccaccatgggaagctccagagattttggtcagaatcatgagaggttgacaaggctcgactccataaatagcacaaaagactttggggccaacggtggtggtgccttctcattcgacgacactgatccattcggctcctccggtccatttaaggtctcatctcctaagaaaagttctgatagatgatcttattttattgcattttctcgattttactgtggtagtattaggggattgttgaatcacgtagctattagtattattatgatttttgtgcattgttgtatagcatctccaatttagtgctaaataaaaaatctttgttatatcttgatttttttgtaaaaaatctttctccactttaaaatttgtgctaaatttagcacaaaatataacacaactaatgcacttgtttgttttatttttatatatattattcttattttgcaatgagttaattttaataacatttttattatgtcattattttttaaaatatatatatgtaagttattgattattattattaatgacaatcattttttatattaattcgcatcttaatttgttattatgtattggagcataattgcaaatagtgataaaatataatattcagagggttcgtttgataaactatatataaaggtcgtattgtattaaataacatgtaacactatacttggataaaactttgtattgtattaattattacgaccataaattttaatacaatgtgaatcgtattatttaatacataacaaatgattcgtattaacttgtattataat

SEQ ID NO: 112407 - DNA, 9282 bp, Cannabis sativa
gggcataaaacccaacaacatggacctgaatcgaaccccgaacctcggaccctgatcccgacctcgaccccgaccccaaccctaacccggacctggacccgaacctagacccaaactcgacctgaaccctagacctcgaaccacaacctggacctggacccagactccaaactcggacctcggaccccaggccagacttcggaccctgaatccagacctcgaccccaaccctggaccccgaacactggacatggacttggacccgaacccctaacccccactctgaccctgaccctagctcagactcgaacccaagcctagaaccagactcgacccggaccctggaccccgaaccccggcccaaacctagaccccaacctagacctggaccttaaaaacttgtaccaaacaccattaaatttttaaaatgacaaaaaactattttctattctcatttttgaaaacacaattctaaaagctaaaaactgaaaatacaaccaaacaacccctaaacaaatggtataataatttaacatgtgagaaaaaatctcataaaaatgtaaaaattaaaaaaatactatataaaatttaataaaaaactctcatatatttttgtaagatataaaataattcaaatggtgtacaagatggtttaatttgggcaacttataaaaatactagaatttgagttaatttttacaaaaatactgtcacacggaatttttttcaaaaatattgtgtttttataaaataacagtggaatataaaacagagcaactaaaaataacaatggaacagctaaaaaacaaccgtagaatactagtaaaaacttaacataatacacaatataaaacttacagtatttttgaaaaaaaattcggcccatactaaaaaaaaataaaaaaatgtaaaatttgaatatgtgtgtaaataatcctttaattttcactttttacgaagaagcccaattaaaagtcaggtccccctaattgggctaggcggcgagagagagaagagacagagaatgtattagcccaacccaatcgtataatatataatcatctccatagagtcccacttaaagtgacaaaattctagcgcatgacagctaataaacctcataaaactacgccaatacgtacagctaatacacataatatacttacacacacacaacacaaaacgcacactcaaattttaaccccattaattatatcaaatcaaaatcaaatctttcttccttctgcatctcaattctcaattttaattattattattattattattcttaatcttctttttctttttttcaatcgaggaaacggaaacaaagttttgtgattttgtttttggatttcaatttttttctgatttgattaatcaaatgtagagtgcggcgacactggagagactgagtttaccgtttttcaaaattacataattctttttcttttccagaatttcgtattgtgggcggaaaccatctatggcttcgagcttcagtccttcatggagccccggcaatggtggtgctgttggtggcagttcgaggttccagttgggtggactcggcggtgtctccaggctaagatcttcctcccataaaaagcctccggagccactgcgtcgagccgtagccgattgtctttcctcgtcttcttcctcggcttcctcatctcaccatggcaccacttccttcactgttcttctcacagaggcttccagaacactacgggttcgtgattttttattattttttttcgttacataattgcttttcgtgttttggtgggtataacattttagatcttttgttatggccttttaggtaattgcgttttaattcggtatatgtatttccaattgtcgaaaatttgattaattgggcagatttacttttcttgttgctgttattgcaactcaagcaaaagatacaaatgtatgtgtgtgcggtggggatggggattctgttacatattttgtgagtatttttttaattttttttattgaagagattacttagggtcagcactctgcaatttgttcataattgatgagctcattccctatattaattagcattgtttttgagaatttatacctttttgtttgctttagtcctttgaactttgaggtgaatttataatttggaagcaatttcttcttaattgaaaaccaggacttgttaaaattttcgcaaatttatttctcttttgacttagttcttcctgtagtggctgtttagatttctcataagtagtgtatttgagatgttggctaaagctgccgcatccttgaatttgatttttcatgaactaacagaggactagcaacactataaacttttgaacttaaaatttttgtattgtactaaaaatgtcttcattatgatggcttagtgttgctgtaaaacgatgctcacttcttattgtccaaattttattgttttatgattatatcttgatgaatctctttattccatggatcaaagcccatatggttgagttttatttttgcgcaggttggttggttttttttcttttcttttttttgttataataagattcatgttgtattcttgctaatcaatttacatgagttttaatatctaatgtcgctacccctcttatacatgacaggactatttagcttcaccttctacaatagacttagcttacaatgtgattttagaacataccatcgcagagagggagcgcaggtaactttaacatttgggcagttctatgttagtgacatgaattgagatgatctgtttgcatgctattttacattataaacttccaagtggcttcacctttcattttctgttattaaacagtttttattttttggtcaatttaagaatctgtgaagtaattcacatgctgagagcattagtttgctgatagaatggtttgagagaactgttggctgataaaatatcaattattagataaccagttcaaaaggattaggtcctttataattttttttgttagtttatggaaacttgagaattggtaactgtttgcaattaaacacaaaagattgctggatgtcttgagtggcattttgacatcctttaaaatgccactgaggagatgagccttgttgtcccatctgaagcaggcctagatatttggtcttgcctgaaagatcgtgtaaagtattgcaatttagaaaattgaacaggaaaattaacaaagataaaacttaagagtgtagagagttagtatagtttatgtaacgaggtttcatatttgaaattgactttaataatataactatagctgaatttaatgcataagtacatttctcaggcaagcaatcataatttattcatgatatcataatcataactaaatctaaacctccagaagttgggtaaccttaaagagtgaggagtgaatacctaagatgtttaccaattagccaaaaaccgaatcctatatgacgtactcttcgaagcaaatataaagaaaaagtaagctgaacaaattagcaagaaagtgcccacagcagaccagttaattgcttttcaacaatggtgattaaactgtttaagtatcatccattagtaaaataattattaatcaaggggtgataaatcattgtgaacatgcagaagtgaagagaaagtagacctaactagtaacagatgaaagggttgggataacgggagagggcatgggtttgaacccaacacctctaagttaatatgtaaattgtaataccactatggtagactaaaaaaactagtaacaaatgaaagtggaaaattcatagataactgtttgttttttcctctaaaagatgacagtagttaaatgtctaggactgactcctcccaagtttattgagagtcctcacttttggctgaggaaaattgtggtaacatgagaacaagggataacctgctaattgtttttgagaacaggagtccttactatcacaaacatttctttttgagaaccagtaaaggtgtaactattactaattgtttttaaatatatcatgtacattttggaagtacaatcacaaaagtttttagcttttagctttcagtagctgattttagttcctcactttgccctcaattttactcttttgcgactcattgctttaaattttatggctaaactattgcgtatgtagttttaggcattataatatggtctttctttagcagatctatcatacatttttacatgtagagcgtcacaagtgtacagttgcgaattactttctgttttggtttagctctaggattaagtgattatacattgggaaatgatcataacattgcaaacttttccctaatgctgctttttatttgcatcagccctgcagttgtttcaagatgtgtggcacttttgaaacgctacctactacggtaagttgtttatatttgttcaattttcaaccacatggagtttgtttgcatgcatgtgaatacaattgtggttgtgtgtattaatcaagtattagtgagattaggtttgtggtttgcgtgcatgtattcacttgctcttgtgtgcgattctgtttatgtgcttgtatggataaaaaaatcattcttctatcaaaaagttagagctcctactggtgtggaaaaagaactttagctgaagcaattaaaattaactgataatttattgtggattctaatgccacatgtaaattctgatttgtatcattaaataaggaaggtctgtttgtccatgtttcgtcacaagattagtataagaagcttttagtttcaattttaagcttattttgaatatttattttattcacattatccttaagcagatacaaacccagtgaggagacattactccaggtagatcggttttgtgtgaacataatttctgagtgtgacactagtccaatccgaagattgcctccacgagcttcaattcaacaatcaggttcatcgacagcatctacaaatacatctcctttgcctgtttccagttttacttctggagctcttgtaaagtcattaaattatgttcgttccttagtgtcccaacatattccaaagcggctattccaaccagctgcttttgctggagccccttcagcttcgaggcaggcacttccaactctgtcatctttattaagtaaatcttttaactcccaattaagccctgcccatagtgctgaaccttcagagaataaagatatcacgagtttatctctttcgaactcatcaaacattgaaaagattgatggaacagatgattctgaatacattgcaaatgatgttctcaaatggcggtggcacggggaatgtcagtcatcatttttgctaactgataggtaatgatcaaattggtcagccttttttcactcttcaggcgacaatttctctccattttagtgcagtttttatctcatgtttaagttttattttattttgtttccttaaagtttttcctttaaagtgagtaataatgtgttccctgatacaaccagtgaccgtgctataaattctcaagacatgagggcccggaattttatagaagtaggtgcagcagctttacttgtgggtgacatcgatgccaaaatgaaaggccaaccttggaaatatttcggaactgctgatatgccgtatcttgatcaactgctgcagccttcaccagtaacaacaatcacagattctgcctctgctcgtcctcacttaagagcaataacttcatctaaacgcatcagagcaggacctcagcatatatggcatgttctcccctatgaaataattgtcaatttttcgtaatgacatcttgatgaactttatttgctattcacattttgcttttttttttttccttacccatttgtttctagatttatccttctgcacgagtgcatgtgacatgatttaagttgccattcacccaactaacagattatagagcacctgcagatatatctaattctgtgtcgtgattaagacctgttgatattacttattgaagattttgaactttctaaagccatcattatggattcttaaatgataaccctgagctgcgtactaaatttaatatgtctgcttaagtaaattgaattaaagcagagtatatctcaggctgagttgaaatttttagtggaagtatttacataatatattaagaacggggaaattaattttgcacaaggtagtgggttgggatatggagacattgttgtgataatgtattatctgtattttgaaacttcatttgagcagaaaaaactttgattgctatttgaatcaagttttaaattccagggaggattctccagcgagcaccttccgtccgcgggctagacaattattccaatatcgtcactacaggtaacaagctgggctcccttcgattatgatcctaacatatttttttttagtaagaaacagccaaacaccttcttgacacttttagcaattctatttcttcattttaactttttaattaattgtctgaaaaaaactcaatcaggatacagattattattctttaattctagactcatagttagtgcgtgagtattccattttaaaagtaaaaatagtggaactgtaactcactccaattcaaagttccaatgtcagtgaaccacatttaagactttttctttcaaacttactctctctctctttttccagaattatttaaaagcaaattatatattcaaatttaagaagttaatatatcatttcttttctttccaatccatattatacaccaaacacaagttaatattaagctttcattctaatccatattgatgcatctatccaattctgaacaccagatagaacctctatgctttatatttgtagtcatattccaataactgagaaaagatggtggtagaagttagtttcagtttattgttgaaggacagtttcttaacatgataatatttatttagtggtaaagttgtttgttatctttgatctgctaatctattactcattaagtggcttggattgatcagtgagcaacagcctttgcgattgaaccctgctgaggtatctgaggtcattgctgcagtttgctctgagacatcttcatcttcatcaaatgctaatgtcatgacagtatcaactagattaaatagtcacagtggaaaaccatcaatggatgttgccgtgagcgtccttgttaaactcatcattgacatgtatgttttgatgcatttggcaactgttatttcctaatattttctataccatgcaagtattttaaaggtgtattctgtaacacttcttcttatacccatgcacacttttattaatggatgcatgtttaagtacatatgtctatcttatacaaacatgtctaaaattttgtatttgcaagttatatcaaatacatgctgctactttttgtgatatcttatctttttcttttttctttccagacaagttcttttgacttaatagttagttgaatgttggaattcttggcaaattattataataataagacttactttcttgctggagcatatggtgttgacttcagattttagacaaccttattttaaataatgcttagaccattttatacgctatgtcatgcgcttttagcagttcttgtggtggatcaacattcaaagactctacaaaactactacttgagattatttgatataatgactgtaacattattaatttttattgctgtaactgtataaacttttacatcattctcttattgtgtactaagttagagagttctgtgtgggtcttcatctaaagaatgcaacttggattgcaggtttacctagtctttaggttgaacaaaagggcactaaaatttatttttgtaggtatgtttcggattctgggactgcggctcctttcacattgtttatgctggaggtgatatttcagttccatgtttgtacgtagtggtttgtctatttatatatttgttttgcttgtgcaattttgaaaagctatttgaatttttttcaggaaatgctcaattctccaaaaacagcttgtagatctcgtgcatttgatttgattttgaaccttggtgttcatgctcaattgctagagccaatgatgactgaaagcacatccacaattgaagaagagtattcacaggaatcatactttgacagtgaagctaaacttgcacttcaaggaaaagtgaaaactgatgctcttaagatgggggcttgctcagctattcataattttgagtcttggattttgaacattttatatgagatactgcttcttcttgttcaggtattattgcttttcatatcttgcatggaaacaccagtattagagaaaagagataccctggttgttatagataacatcacataagaaacaattttgtgctcaatattattttgtattgcttttgcatggaatcatgaattagctaaatcttgtactattcgaagagttgttactgctgatgtaatcacaagaatctaagtggaagtgttaaagaaatataaatctgattctgaagattgtttcttctctctcacctggattggactttcacttgaccaaaatacgttatatatgtagatttctatgtagtatcttggaggaggttcatgatataggttgatgagtgaatgaaggtgacaattgcctgtgtattgagaagacttgttttgcagagtaacaatttattacaaagcattaattgtttggattgaaaccaaggaaggcacttgaagattgagtttgcatgtatattgagaaaacttgtctcgcaaataacaatttattacaaaacatttaatgtttggattgaaaccaaggaaggcacttgaagattgagtaggcattgtaaattggtgataaatcttataggccaagaaggctttggctttcagaaacaatagttattttcaaagaagttgtttcatttaatttttttatgtgtttatgcagttttggtcaatatttctcatcattttcttatccttatctatcctttgttgtattttgcagatagaagaaaaggaagaatctgtttgggcttctgcattaagctgtttactatattttgtctgtgatagaggaaaaatcttgagaaacaggttgaatggtcttgacataagggtaagttgtttcacctttcttttactctctttcctttacccaaatcccaataattcagggtggttcttagttttcaacctttatttattttgtatttcagtttcagggttttttttatactaggtgattgttacgtgccaagccacgtagtgttaattttatttaatattttagttttttattttaat

SEQ ID NO: 112408 - DNA, 6220 bp, Cannabis sativa
taacctcctcccaagtttattaggtaacctcacttgtggcggaggaatacatttggtaaacataaatgataacataatatagtttaaatcaggaaagaaaacacaaaataaaataaaacaaatttggctttagaacctattacatcagtgttttccactccctacacaagtcttggaatgagaaattctcaaaatgtttagccttaaagacccacataattgtccaaaatctaattctctcccatagatcctccctaagctttcaattccttcaaatattctgctatctttttcaccccacactgcccaaatcatggccaatattgcagtcctccaaagtatagctcttctttttccaccctccagcttactcatcatgacttgggatataaaacgaggcagggtccaagccaactctaattccttatataaggaagacctgattttgagtgtaagaacagtccaagaatagatgttcagtttgtgaaacaactggactagacttgcaacaagcacaccaactaggggacaaagacatatattgtctctatctttttgcataatatcatgtacatttgctttcttcaaagccaccaatcagccgaacacttttacttttattggaaccttgctcttccataatactttagtccattcgaaccctcttacattctaattagcggtagaccattgaaaggctgatttgcatgagaatagacccccatgatcttaccactcttactagatttacatgctaattgatttagcaacctaacctccctctccatcaaattcctcttgaagctaaaatctcatctagcaacctagtaacctccttcctcaactgcaaccacatcgcttatacaaacattctttgatttggctaatactgctaaattcgaataggattccaaaagggtaacttcacctatccacacattcccaaaagcgaattctatcctttccttgctttaaagcaaaccagagaaatcctatcaccttttttagtatcccacaaattttgtgctttaccataacaactctcaatcaccttgagccataatgaatttggctctaaaggaaatctccatagccaattcatgagcagccctttatttctcatatccaatcttcctatacccaaccctccctcatctattggtttgcaaacctcctcccaagcaaccaaatgatttcctctcgctatgtcactgccttcccataataagtctctcaccaattttttcaaagatttaattatagtctttggagctttaaatagagaaagaaagtagatgggaagagaggagaggattaattgaacaagtgtcaatctaccccctcttgataagaaggagcacatccatcaagtctctttgcacatttttccattaccggatccccaaatgcccttttcctaggcgatcctcccaatggcatccctggtacttcaacgaccaactacccacttcacaaccagtaaaagaagcacattgtgtcactacactatcttgcaagcataaacccaacaatggactcttattcaagttcacttttaaacttgagatggcactgaagtcttcaactagcctaacaagcttttgaagggagtcctcattgtttatgaaaaatagtgtgtatcatcagcaaattgtaagtgacttacttgaagaatcctctcttttccaatcctaaatcctgaaaatgtgcttgaatccaccgctttatctgccattttcccaagaacatctgccaccaaagtaaggagaaaaagcaaaagaggatcgccatgtctaagtcccggagatcctttgaattttcctcttggccttccattaatgaaaatagagaatgaagtattcaaaatacatcctctaatccatttcctcaaagtttcaccagatcctttttttgtcatgaccaaatccaggaaatcccattccacttctcaaaatcgatcttgaacaccaagccactcttgcatctacttctgtagtcttctaccgcctttttataaccattttcttgttaggctagttgaagccttttgtgccatctcaggtttggcttagattctgcttttaataaattatacattgtaaattttaagtcttatttggcttagattttgctttattgtttctattcttgttaccatgctcctctgtcataggtgaggatcactaatatagttgggaagagtcaatgtaagacaatttttcgaaaaaaaaaaagaaagaaagtaatccttttaagaactcaacataataaaccttattctggaggaaagctccacaaccaattcattagtagtgatttatttctttagcaaagattcccaaggcctaatccccctttattttttagcttggcatctccatagagacaaggtgttcgcttcctaactctcctccttcacaagcattcttccatccttcaagcctcacataaacctaataaagcaatttcctaggtttatcatccaaaggaagacgaagatgttttaaaggccaaactcccacacatgacacaacaatttgcattagcgtacgaacaaagtgaagaatcatccacgttgagcaagctactcttgttcaaattaacttttagccccgagtgtatcatatacaaattgcagatgagtaacctaaaatcatgcaacaaatctacatttgtcttctccacaaatctacctaagatgtccacctctaaactaaagagaacagtggattagggatcaccttgtctcaacccctatatcccttgacctacccatccggcctcccattgatgaatattgaatggactgattccaaacatcccacgatctagtacctccatttcagcccaaagttctttttaagaacaaaatctatgaatttccactctatcattcatattccttttcaaagtctaactttgaaggcaacaactttcttcttcaaaatggctacatccgtaatttgcctcccaccctccgctttgttatctttgttgctaaacctaggtaaaatttttttgcaggctctagttaagaaagatccagtcagacgacaagttttacgtgttaaagggtgttttgctggatcaaaagctgaaaatcaattagaacaaggagacatggtgttggctatcaacaaggagccagttacatgcttccaagacattgaggatgcatgtcatgccttggacaagtatgataacaatgaagggaaacttaacattaccattttcagacaggtgagctactattttctcatatttttcttgctgtatgttttttttgtttccttgggtgagagatgtttttctctccctttttcctgtgtagtttctcccataatgattatactagttttgtttcttatttaaatttaataaagaaattataaatctgctatatacaacataaattgttttgataattttcttgtttggggagaagtaaatgggtgattagctaagagaagtacgatcctgtatcagctaccttgtggtgtacattacttgttacttggtactggttttctggatttctttggcctatgaccagtagttgtgttaaactgtttataattccacctgcatgctttcagggacgtgaaattgatcttcaagtgggaactgatgttagagatggaagtggcaccactcgtgtaataaattggtgtggttgtattgttcaggatcctcatcctgcagttcgtgctcttggatttcttccagaagaaggtcatggagtttatgtggcaaggtaagacttctcttcacttgcagataataagcagaatgaaaaataagatgtggttttttgaaaattctttatgaagatgctatcataccagcagcaggtttaataggggcaataatgatgactcttgggtgtttgccctcaaacatgaaaagtgacattataggaaataaatgctgtgttccgttgagactgggttaataatgggtagctaactacacttaaactggccatgcgtgtcattagtatatttcttctgttaatcttttttaatttctatttttactagatacacctatgttcagaccacagtttttctcgtaagttttaataaagattttgaggctacttgcatcttcttagttttcttctgtaagaatgcatttcgtaagccactctatattctatttcatttgtacaaaatgatgatagatgttaagttcatgctttgttttcatcttttcaacagactgattgtctaagatcagttgtaattttagaaaccttgtttttgtcttttattgggagtcccaagtttttgtaactatggtgttcctcttcctttgtgtgagggttctaatagcaatctttggtggtggtcaggcaaatgtcagtcaaagacagttgacctctgtccttttttcgaaaaaaattaaaaataaataaataacggtgataacaagttgagaaattatcaggtggtgtcatggcagtccagtgcatagatatggcctatatgctcttcagtggattgttgaagttaatggaaagccaactccaaatttagatgcttttgcagatgtgacaaaggtactctctgtcttgtgtatattatatttgtaatacatgagtaagataagtcaacctggttgatattagagctgttttacttaattaggatgtgatgaaaaaaatagggtggagttcctaataaaattccacctcataggaaaaacccgccaaaaatggggaaactttacaggctactgcttgagagcacggaatggattcttgaacttactaaggccaataaccaacccagatcaccttgattagatatttatattttaatatattaatatatgtatgcgtataaatactctatttgcctctagacgctgaccacgctaatctgctaatctgcctagccctttatattctcatcgacaagaacatcacattacaaaaatgaatcttagaaaatcctataactttttaactgaggtagaaagtttattgttcttgttattaattatggcgtacttttttttttttttttctgtaattgagtcttgtcatcttgtccttgtcctgtgatacgaatagagtaattcaagctaaagaaaacaataaaacagtatcccaaacggtaaaaaattgctgttacaacagagagacaaggttacaactaggggagccctaaggccccagtgatgcaaatagagaaacactcaattcattgccttacacgcctatttaattatagtaccaattcctcactcaagactaacctcccatacgaagactcatagcctttttattaaccatattttagcacaccatactagggcctaacatcctgtttagtagattcattaattaaagaacatgcttatataaatttgtatatatatatttatatcttttctttgtgaaatgggaccagggtctagaacatggagagtttgttcgtataaggacagtgcatctgaatgggaagcctagagtactaacactgaagcaggacttgcattactggcctacctgggagttgaggtttgatgcggatactgcaacatggcgtcgaaccgtaataaaaacactaggatgaagtatcacgagtgccaaaatgagactttgcttgcaaagttccttcgaaatacttctcacttcatgctaccttggaggttcagagtaatgaaatcaatctagtacattttggaagagcttgaaaactgaagatcacaatgtcattttgatttttggatgggaatatagcatattcctatcataaattcttgtaagaacttcattttatgtgaagaatattttagatgtggaatcttatttcataaaagatgcctgaagtcattttactaggacaacaaatatatattatattgtattattatactaggctcatatttgatttttctattacccatcccaatgttttatttgtgtagtgatttaactctttttgtatctttatatgtttgtatattcatagttttccagctaggacaacaaatatatgtttgtagctttattttgttgttgaaaattcatctctgtagtgtatgtgaaacaggattgggatttcttaatctactaaaaattgtttctcctttgcgtacgttgacataatatcctctacaatgtgtatttgggatgattgttttgtaaaaaaaaacttttattagtaaaataactttacaactaaaataattttatataattgcagaaacg

SEQ ID NO: 112409 - DNA, 2788 bp, Cannabis sativa
actacatcaagcctaaagacgtgttgaatagagatgttgcaacatgttgtgaaacatcgacaaaaacacaactactacaatttgtttgcatttgaaagagaaatcaacaaatgtggcgaacaatgtcttaaaagtccaaaaacttacacaaaaatcggtaacctccatcaccaaactctcgcttcctctaaaaagagaaccatttttttggccaagtcgtgactgagcaataacgtagaacaattataaaataaaatcttaaaaacattaaccttcttacaaagtaacaaaatatcatattgccaaacaagaatctttcttacatgaaagcgtagtaacaacctggcaatccaactccacctaaaatgttgtggtaaccgagacgatcgactacataatttaagtccaaccaacatatataaattaatacagtgtacattagtatagtagattaaataaaatatccattttaaatttactcaaccaacttaaattttataaataacgaatgacaacaacaatgtaacaaacctcaaaagcttcaattcattcaatccgtaattaagtagtgaaatatatatatatttcttgcaaacacgtaagagaaattttggacaccatttcaattttttattataaggcaaataaatgttgggggcatatatatatttcaaaatcaatggagatttttgtcaatttagagcagagaagaaagcattgcaaagtggtcaggttctgctagaggttatgtcaaattaaatatcgatacagcttttgatgtgcaattgtgggaattgatgctatatatgattcgagattataaaggtgaagttaaagtaactatctagctaggcctttccaaatctgttagtggcagctactcacctaagtaaaagttaaaagtaatgatactcttttatagcctccaaagcaatagctggagactggagtggagctttatcatgttgtaacagactcatcactattcactagctactacaatattacattttagtgatccttaatttaaagggacacgtacactgaaaaattttcatgtccctttattgtgggttattggtactcctaagaaaaacatgggtacggttaaggacgcttaaaatgacttaattaaggctaaatgcctttttttttttttttttttttttctaaatttgttgacaaaaggctagctaaatgtgaattttaattattatatctatcttttttgtttatgtgaaattaagagatctatcttttcttatacataataattaattatttactattattaattataattaaacgtacgattttttttttttttttttagctagtaacgctaaaatgaacatgtagcgatcaacaggttgatcggattttaagtttgcgggttttgggttcacagattttgagttggcaggtttcaggttcacgagttttgggtgaaaaaagtgagctcgtacccagggccagtcttaaaatttagtgggccataagaaaaaaatatatttttcggcccttatttagaaaaatgtggtatttttttttataatctataaaaatatgtgtaatttgaaaaggaaaaaatattttttttgagcttctgggatacgtgggccctaagcacaagtctagcctgcctatgtccaaggtcgggcctacccgtactcgtcccttcacatgtagcgggttgtcaaatttgtgggccctgaacaagttgactgttgacctactcaaaagattaaagttcaccaaacaactctttttttttaattaaaaattttaatttaattttttttattctttatatgaagtggtgagcaaatatttaatccttaaactcaatgaggaacaagattaaaacttccccaaacaccatttgggaatttttccattcatttcattaatgtcctatattagctactagagaatttatgctccataattagttttgagataatttggtcaaggacaaacttttaaccaaaacacacacacacactcaaagaaagatgattttttatttttgttgttgtttttgatagtgatcaattttcaaagactaattattttccaataatatgttatatcaatcatttaagtcactcaatatcatcattaatagaatcattttgcctcaatactagtacaatatatcatcatgccataattaccatcactattatcatatcatgtaaaacataaaaacattattactaataataaccaaaattattttagctaggaaaaaggaagaacaaaaataatacaaatcatacatacatgtgttctaactacttaattatgtatcaaacttacttatatataacttcaattcaaacaccattaacttaattagtcgtcacaacaacaacaacattaaaaatacaaatatatatataattattatttaggttgagtaagcatttgaacaacttctctcatggtggggcgctctacactttgttcttgaacacacaacattgccacaaacaacacatgcatagcctcttccaaatccaatggattcaaactttggtccaataaagataacatgttctttttcttgttattatgatattgatcatgttgattattattattattattaatcttagtcttagcccattgaacaatgtcaacaactccttcttcttctccaaaattagtatcaacagctcttcttccactcaccaattccaacaacaccactccaaagctatacacatcactcttttcatccactttcaatgtgtaagcatattctgtaaaaaaaaaaaaaaaa

SEQ ID NO: 112410 - DNA, 7413 bp, Cannabis sativa
  modified_base (46)..(50): a, c, t, g, unknown or other
  modified_base (3114)..(3120): a, c, t, g, unknown or other
aatccgcacaagtgcagatatccgcactttgcggattggattggannnnntattttatgaacacccctactcaaacccagaacccaaaatttttatataatatattttttatattaaaaaaatggtatttttaaaattttttgtaaaaggaaatctaataatactcatattttactttaaataaaacacactcaagaaattttttgtactcaaagctaaccttgcaaaatggatttaactcaaaatataaaattcacagtgcaaattgaagcactatcaacaaaatagtaaagatcccatgaacataccataatattataataatattatgaaatgaagcaaagaagtgaaagaggctccaatcaaagtctaagcaattgttttcacatagaaggaagagaaatgagagtgggaatgaaaatgggtcccaatagaactcatctatctattaaatatcgaaaccaatttctgatgtgattgattactagttatttctgtcttgatttcaaacatatcctacacatcatatgtcatgtataatagtagtttaatttgatttttcttttgtcatttgactgggacagttccttcaatacattctttatggcagaatcttttctagttaatatggtcaccgagttcacaattgtaatcaatatgttacttattccaaaaggttataagcctcttcatttcttttgtacatacccatcacaaaaataagttattttttgttttcggaaagtaccatgtactcaacagaaaacacacacacaaacattggcatttttataggaaaataaaagagaaaattattcaaaaagaacaagtaccaacaaacacatgtctataataataacaatgaatgatgaagatcatgtttcaaacaccgttatctcttcactacaatcacttcttcaatatcttgtagttgaatatgtcaaccataacaatcaatgattcatggttgccattagcataatcaaagacgtttacaagtacaaagtgaaagatacgagcaaggatagcttactaaacacaggttatatatgtatttgtacatataatcatactagtacttactaggttggccagtattgaagtaatgctacaagtacaagaccaacttgttcatagctttgtccacaaaagaacgtggtctcaaattcaatttatggatgcctccattccacttgtagttcactagaaagttgacaacaggattcttcttgtttttcatacattaaattgacttcgaacttactatttttagcagaagcagtccaatactggattttggctcaaatgttattcctcaacgtagcactcgaactgaacatcacgcatggcttagcctccatgattgatagtactagtaacttgaacgaagtctttgcttggtgatgataaattggcagtgtccatgtaacatcaaagtacatttgctgtttcatgctcaattttgtattggagctgtttgttcttatgttctacaattgaaattcagctgagatactctgtatctgttatcgtgtgtgcattacacaattcgatcctataccctctgtctcgatctttttttttttttaaggagaacatttaagttaaattaagttatgtttctttcaaatttgattagtcttatttaattttggaacattttgaaatctacttattttaatatttaaaatagactccataagtccttgagtgtaataaattcaattagatcttttgacacaattaataaattggagttaattgccatttttgctctttttaaatgagatcaactccattgccaaaaaaaaggtccaataaatcaaagtgcaataataaattagggtgcagataacatttttatgctatcacattaaaacctcatctaggagatgaaagtagccacaaacaaagatattggggtcaatatcccacgttgttaaccaaatgatatcatcttgcaatgaacccatttatttttcttcatattggagaattatgctttgaatggggcatgaataattactatattatgaacggctttgtcaagcaacaacaaaaaataaaaataaaaaatcatttaattttaattttattgtatatataaaaatagtaaaagaaaataaaaatgatagaaaaagagatgcatacctaaaaagacctccatctcacccctcagccaaagacgtggtttaatttattttagttgatcatgctcctgcaaacaatcaaatattgagaataatagaaacaaaaggtacaacactattatagctcatataattttacactacacaaatttgagtattaaattcattaaaacctaaaattgaataattggatgttggaaatttcattcatttcacagctaccatataaagaacatgcccgaatttatgtacataccaaatagaagaacattaaaacattgaccttcccaaactcccaatttattgttgactattcaactttttcttttatttgaataaataatttaccaacctattattcttagctacctcctatatatgtgtataaacaatgtatgttattctgtttgtctttgttttgtcacaataaccaattcatcagaagaagtatattatgggccattaattagcaaaaaattgaatgataatttctttcatgaagaactgtaaatgtagtatcgagtttccgtaataacgaaacccaaaaactcaaataaaccatcatagattccattattaagtccaaacttaactttgggtttctaagtgcttgcggagaagcttgatgccagtttcctacagttcaaaaacaaacatgataataatgtaataataagaagcataataaaagagaaaacccagtaataaggatactttcacaaaattgacttccttttatcattatgcacaatgattttcttttagtaattctttgcaaaataaccttcctactgacacactcgacaacctttgaatgcatattcgaagtgcattcaaagttgactttagccaacaccctattggaagaccacttagcaaaaaattataagaaaaataaccatcctgcaaagtgacattaaaaaagaatactattccaccaattactcataataataataataannnnnnnaataataataataacaatgataataatagtgcatccaatggatcatggctgggcctaacagagcaaacaaattggtctttacacatttacaatatatttgaattttattcccctctagttttatctttattccctctacaaaacatatttctaaatcagaagaggatcataaaataaacaaactttcgacaaaaaaaataccaagtatattaagcatataatgtacagctcctagtgaaatttcattaatatatattgaaatattataatgcaagtctgtacaaaaaccaaaaatcatatattcaaagttttatgcaaggaaacactctagagactgatttacagattctaagagaagaaactcatctgcaacagagaaatctataagaatgcacatttcagtaatttcatctttgaaaaggcaaaactcccaccgtaaaaccatcactgagatcagatcgtccggcccttgtttccaattgtaattgaaaaacctgggaacagcatacaacatcaaatcaatgcactgcgttcaggttttagatatcctatcaatttaagtatgatgaaaagcccaaaacacagctcaatggtataaacattgcacagttgctgtcttcactccttaatatcatatttttatttactgacaagggatattctttctttgttattattttttttcatgaaaaaaggagaaaaagatatagattaggttcacaagcacaaaagcattagatcgaatcctaattctcataagagacattcagcttccagcaacccacatcttattgaaacactagagaaccgaaattgtaatcacatacacacgcatagcatagcacaaacaaataaacggctttcaataattcaattagtatttcccctagtacttgaatcctagctgcacatatccaacataaaagatctatctatgaacctttcatttgtttgaaagtgcgataaaagattaattttaatggtagttctgtgagttggaacatgaaattggggataaacctgacgaatcttactccaaagcctctaacttgtcagccttaaacagtatattgtcaatccaaaaaaagaaaactgcaagcgatcattctaaagacaactaaaggactaagaagatgcaaactgatcataaaaatttgaaagcacaaacattagctagaacttaaaaatattttacaaaagtatattgcacgatcaagaattagtatattttcaagcaaaacagctaaaatgctacaaattaaaaatacaattaagctccatctctacatacattttgattttcaaaagttaaaattcttatttttccccacttagcccttggtacttgccagcttaaaagttaaaaaatctacaacaatcactgtcattcaatactagaaaatgaaatgaactacagctcagcattatgaaagctgctttcgtacctcttacaagtggacacacagtgtcatgagagatggtgattgggaaaataacctgcaagaagaatggaaagagagcatggattggaacgaccgagaaacaaatataacagtacctttcagcaaaatttatctaaaccacccaccagagaaacaaatgccatcatttaattcaatgatccacggcacctgaacagaagaaaaaaattgaaaaattattaatcaatgcttctagttgtagccagaattgtaccctttctagtctcacaaaacctatatgtgaatcatcattcatgcaaccttgtataaattcaccatccaaacaaacagagcatatagtaaagtctctactaacaaccaaacataagtacactatattaagagaaccacaattagaaacagcagaatcctaccttctagaaccacagttgcaaggaatctttttctcttccaaaggaaacttgtaattatatgtgatttcatcaccagctgctatatggcgtttagcatatataaaaattttcttttcaccctcaacacttataactttggtgtagcagttgggctggcacaaaaaaaaaatcccacttaaggacaaaaataatataaacctcaggcacatttgataagattagttattctgtctacctcacaagaatggtttataaacctagcaatacccccgcgttttgttgcatcaacctacacataattcagaaagtgaatatttgacataatcaatatcataatcagggacaaagtcataaataattgtcagtagggaccatttctaaatatttttaaaggtacatctagggcaattgcatatgtattttgatacatgaaaaagacattttgaatatacacaagggacaatattttttaaggaatcaaaaccaaaacaatgctaatttttttactcataaacatgatataatgaaaaccataggtttaatattatactaaaaatccttataaaaggtaaagtttgactcttcagaagaatatacatttagactgcacaatagtttttaaggaatcaaaaccaaaacaatgctaatttatttactcatgaatatataatgaaaatcataggtttgaaattacacgaaatacttataaaagacaaagtttgactcttcagaagaatatacatttagactgcattgcatacggcagcttgcttagtctaaaattaaagtttgcctctttctgtagtattccatgtagttaaacagcaaaaaagagagtgtgcggttttgtgcatgacaacataaacagaatcaacatagtggatttgctacatgccacactaaacagaaactccatttatcatttcacttgaatttgtattaagcctgtaggaaacaaaatcagaatctattggtgtattactaatcatgatcgcatacagctgctggattggtctaaaaattgaagtttacctctttctatagtatcccatgaatttaaacagcctacacatcatcagtcaaaatctataatgcaaaaataacaaagcacagctttaatatacagctataaatcagcctagatttctccacttcaaataataagataatacaccagcaaaaaactaaggtaataaatgtctgataaatatcacatattagtgctttttaaaatatgataatattttaagaaaaggaaaaaaatgttaaaaaaaatagccaagataactttgagggctgtttactaaccacataaccatcatcaagcctaaacagataactgctgccaattcccatcttctcataatgtcgttcccgtatgtcagatatctgtgaaatcataaacataataaataatggttgaaaatagacaatgatagcccttcaaataggaagtgggagaaggagacaactacaattgtaaagcagacagaacaaacaatagagcaaattaactaaaatttacccggggacgtatgagctcccccacatattcaataacgaaatcctcagcctcaatcgattctaaggcaacaagaccccaatcatgtatcttgctcctttggaaacgtagctgcttttttcttgcctatgaagtaacataaagatttcttataaattaaatctgggacactataaaagaacaatccattacaacgtcatccttatgtctattaccttcaattgagtggcttttaaaaggtcagcaccctctgcagcagcaacaagattgcgcagttttgccctatttgttctagcagaaagacccttgctattggaccactgtgatgtagtaatatcagaccctaaatgatctacgtgaacatgtttacttcccctaacgcggactctttcagaaggactagcacatattgaccacttccgccattcccatccatcaatcgaagcccgagcacaaccatctgatctagggcataggtttattgttttccttgacttggctttttttactgtggcctgcctagatgacacctgctttgcagccctgttggctactttaaatatcttttttgaatttaatgatggtgcactgtcaattacacgcttcctctttagcttagatgccttcattactgcatagaaacaaagttgtgaatcatgcaaatgtatgccaaaatgaaataaggaaaaatatgtaaaaaggtatgtaaggagaaggaaaaaaaacaattgaatcatgtgaaacagaaaaagaaaatacataagaaactaacattaaaggaaagaaaaaaaaaatatagatacacacacttacagcattcttcttgtactttaacatcatggtcattaccacttcccactttctcaacaccatcatgattctctaaagaagctgaaacctgtgttttggcaggttt

SEQ ID NO: 112411 - DNA, 1746 bp, Cannabis sativa
gaattagtcaattattatttattgcaaagtaaataataaatcttatttgtggcaaaattaaaaaattaattttaggctttaaaatatggcccacacgtgtggagcttagtctcacacagaggtgacatgtaaaggttcatttaatttttgtttgattattttatttataaaataaattaaattaaaatgataattatattttaattatctaaaattaatatattataagataatgtatttaaattaaaatataatataaaataaaaggatataatagaattttattatttagttatacgatatttattttgaatttgaatttttaattttaaattaaaatataatattatctttttattttataagatcaaaaaaagattttaaatattataatatatgtgataattttaattttaaaaacaagatatataaatatatataagtgagaagagtacgtaataaagaattaattttttgggattaaaaatttaatttcttattctctctcctaccttatgcctctctctccataaggagaattgctgtttttttaagttctatcacagtgtctcatgagttgagaacatattgtgatcagaaaatttattcatccgattaaatctgtaagcccactcttatcctgagtgttgaggctagtctgaaaaatgtggtgtgattcttcatcaagtccattactggattggatgatcgatataatacaaaatgattcaaggaaattctgataggcaacaagagataatttcctaatctaactagttatttttttttcttaactctaactagttaaattaaatttatgcaatattgtgttgagattcggggtttaaggttcatatcagattcaacaaaatattttatttttttttaaacctgaatccaatttttactggctgctactctcatatgaaccctaaaaatcaataaagacagcgttaatttcattctgataaaacaacagtctgtaaaaatatctataaaaaaattaatttcaagtgttttgtattaatttctcatataaaaaataagttaaataccattttagactctatgttttgtaaaagttattgactgaaccctcagttttgtaaaatgacaaactagaccttgtatttttcaaaatagtacaaaatagtaccctgaattgaattttttgtaaaagtaaaatttaataataaatcgatatagatatgttatgacataaatgatgacgttttctacatcttttcgttttagaaattgtcgaaaaattaaaatcaaggtgttatttgtactattttagaaaatacatgatcctttatatcaatcaacaaaacagagagtctagtcaacaatttttgcaaaaaacatattcaaaatagtattaacccaaaaaaatacacaaagtcttacatgcacaatcaaataactcatcgaattgttaatagaatttgacaagatatacattctaatatggggcatatttataaaataaaccaccttaaataataaacattacaccaggtaaaatatgcacttcatatactttgggtaaacttttccctcccattcaaacaccctctctatctatctaaaccaaaacttactcaaaaagtacacttaaacacgtaagaattttaaatacttttgataatactagtaaaaaactacgtgcgaggcacgtatactaaattttatgttaggtattttttattttatttaaaattgatacaattaaaaattaaagaa

SEQ ID NO: 112412 - DNA, 2738 bp, Cannabis sativa
  modified_base (92)..(97): a, c, t, g, unknown or other
gaatgctctatatgttccaccatggctaataactaaaattaattatatcaatgggcactgcaataaaattcagtaaatataattctataatnnnnnngagttcaattccatatttatagtgaagtaatcatggaattaataaacaagattatttaattgatgagattcaataaataatctagtttattgaagcttagaattataggtccatgatgtccaaatcgccaccttaaaacaccatcaagggtagggataaaggttatatatggaagtttggaaaaaatctattttaatatgtcaaaatagtaattaattataatcaaatttatttaattaaacaaattggaaaaaagataaaagttgtctggataaaagacaccacaatatcttgttaagacataggcggaacaacctgcattgctttaggacatagtgacaggcgtccctattgtagggatgtccccactgaatttgtttttgggttagtttattaattcaaaagataaatatttatttgaatttgaatttgaaaagtagttatagatatttagttggttgagatattccctcaaattagttgaaagattctctgtaagtgattgagatattctctcaagtagttgagagatttcctcaatcggttataataaataaatatttataacagaattgaatataaatctttattcaaataattaaatatgatttaataattgatttgaatttaaatgtttaatcaaataaaatatttattggttttgattgagatatactgtataaacaaaaaaacaaatacgtatcatttttgggtaagccaaacaataattaatcagattaatctctttttccaccatcactttaaaaaagagttcttctcgtgtgttgagaattaaactaagaactccgtatacactatatcttactagcccatactagtctttatgtctggtggaagatctggaagactacagtgtgagttctacgtcatcatccaaggatacaacttacaaaagaaacaatgatgctctgatatgcttcaagaggtaaatttacttttcgtcttttattttttaacttaatgtatatacatatggtgatcttgaggatgtagtacaatgataatcaaaaactattattctactacgtacctaatttagtaccacaaaaccaatactctattaatgtgatagatgcagaatcaagtcgccacttttggtgtgggaaaagggcagggccggccctaggcataggctggcgaggcccgtgcctaagccccatactttttgggggcccaaaataaaaaataaaaaaatttattaggcttttatttaagtaaaatttaagtatattataagcaacaaatattcacagcttagttggttgaggtggatggcataatgtccaagatcatgggttcaaatcccataacactcttcttttgatatttttttttatctatttttgagggcgccacaattcaattcgtcttgggcccatatattttcagggccggccctggaaaagggcaatgtcaaagaatagtgggtgtgcatatctcaaggtttatactccctctctctctaaaggtctcaactttgggtaaatgtcttacctttatctgatgtacgacatagatacgctacaatatccttccaaattaggaaaacatcttgaatacacatccttgtcattatggttggaatgacatccgagattaagtgacacaaaaacatttggaatatgatctgtcaacaaagtcctcaagatcgaggaaactctcgatcattagcatgtgtgggttcctctagacccaaaacatactcctttctatggcgcgttgtatgtagacaagttgagggcatcttcatgtgataccttcccgtggtatgctaagacttgtacatctagaataatcttcaagacctcatttcacgagttgtatggacttattccaaggacgacatgtctttgccacatgtctcttgtggtgggacacatgaccctcaaaaaatcgagacaacataacatattaaaatatgtaatttttgattaaggattactagtataatttattaagcactacttagtggtgcatatgtgattttgatttaggtcactaatgtagatagacaatttagtaaaagtattgtgtataacagtgattacacataactggaccaatgtgaattaacatcttttattggtgtagctatcataaaagattgaatttatgtcacaaagatgctcattaatagattagtctaaattctaaattctaattattcatgaaatcctgtttgtagttattaagttttttgattcacttgtttaggtattttaatataaagatatcgaaaaacttttggtttgggaacttaatataatgtgactggaagcatgtcatacaatagtgaaattcaaaatttctgtgactgatcatatattagttcacttaagaattaattgtgggagtgaatttagctatatattgagctcaagtctatcattggattataaattaataattcattaggaattaatggtacatataaagaatcaagacataattaaataagtaaaacattatttttgacaagctctaattataaattaataaattagaaaaaaaaattatatttaggggttttttcattagtgtacaacaaaaacaattatattacaaaaaatgtgcaaaaaaaacacaattttaaaaatgtacacatttgaaaacatattta

SEQ ID NO: 112413 - DNA, 2525 bp, Cannabis sativa
ttcagtgatgacgtggaaccgaaaattcggttacagtctggtcggtttgatggtcggtttctgttcatttcagttcatatttgtttgtggtttgttcacatttgttttaatatataatacatgtttaagcttgatcaccttatgcatgattcatgatcctaatacgaaatttgagaattgaatattaggaatgatctaattgaagaaacacaaattttgatgtgaaacgagaatattcacatagtatgcgtgactttttagattattactcaatacaaattatatgttcttctacctcaaagattcaatagatgatatatagtttataacgttatgatctgaaaataaaattaaattatttttataatctgtcattatataggaagaagaagaatagtcaatatcatttacaatggggtaaatgaaacaactcgattcatatctttaatttttcatctatatttaaacaaaatcgttttcattaattttatgtgaatcttgattatttgcactcaaagattatttttcaactaaatggaaaaataattatagtttagtagtaatcaatttcaatttatttgagttcgacattacctatgtgagtactacttgatacgttaacttgcacaataatcgtaacaaaatacaccgagtgcacccacttcacccaaaagttatgttttctttggccatatgacaaacgtgcttctcaattgtagcggtgttccaaataaaaattatatttctaatgcctaaacctccttgagatttaggcttacaaacctctgcccaaagtcacatatagccgctaaaccactccaaagaaaagatctacacaccttattaatatcattaagaatactcttacgaagaatcaataattgagcccaagacacatgaacagataaaagagaggtttcgggtttcccaaattttaacacacaaaaataataaaaaaaaaatacaaaaatacgatttgtacggagtttttaacatttcactattttttagattttatttacataaaatatgatcttttagtgtatttttatgttctactcttgttattttgttgttgatttttttattatatgtatattattttttatattgctttgatgttgtttacttactttcatgtggttttcttgttttttattatatttttataaaataccataaaaatattaaaaaagaaaactttgaatgtaaaaatgtaaaatttttataaaaattggtgttttatctaattatcccgagggagtttggtttttcttggaccgatttcgggtctcttttctttgacttttggtctttaaaaatgtcatttcttcatagttttaggtcatttatttatcactttttatttttttttttttccaatgatgccacaaatactatttttaactccaaacaaagataaaattaaatccaaacaaaatatttttaacataaaatatatcaaattaatttcataaaaatatttatttaaaatttaattaatttttagttattaataataaacatgtattttctttgttacttttatttatttcattatcttatttgtgtcataatatgttatttcacctataaaattaattaacactataatatttttaaataaaaatatattacattaattctatgaaaatattaattatatagaattaattttattttatattttttactaataaatatgtattttttgactacttaacaacagaaagtgttgttttcttaaaattcggggaatttttaagtccttaaatctaacaatttcaatagttcgaagaaaatttttaacgaccaaaaaattttagggggcatgttttggtataaatcgaaatttagggggaaaaattactaattagcctatttttcaatattacaatttaaatttaaactcattaatggcatatatctaaaaaaatatatttctattattactgttttacccaatattcacatatgcttcaaaaaatatctatctattattgtttttttaaaacaataaaattaaaaaaagtgtttatgtttcttgaaaatcttagcatcttttttttaatgtttattgatactcatagattaataacacgactctggacactatgctagaactaccaatcctacacaatcaattagagttcaacaactgccgcaccttcttagcaatctcagcagcaaatgtacaatatcaaagttctcaaataatcattcatattctacactttctcaactgtttttgtattaataatctcattttgtcatttataattttagcaaagacatcctaacacattgcaccaactcagtgaggaattataaactatggggttagcattaaaggatatggagaagtattttgagtaatatggagataatatcaaaggcatcaacctatactattttgatatgttctatgtgttgttgtgaatggcatgtatttatatgcagctataatattgactgattttttttttttttttgattgattaagtacttttatatatatatatata

SEQ ID NO: 112414 - DNA, 1257 bp, Cannabis sativa
tttttttttaattttaattcaaagttaaactaataaatttaaaaatatgattaaaaatatctataatattttaagtattttaaattaaaatttaatttttttcttgtaaaatatctatataatttttatttttaaatatatatatataaaatttaatagaatattctgttaaagttaattaatagaatattttgttaaagttaatgtagatattaaaaaaacattattaaggtagaggtcattcggacttggtgttgtgtcaccgcgttagggtgcaattggacaaggttgatattaatgtaggaaaaaagttgtatacatgaattgataataataaaaacgtcatcacaatcacatgaggttaaggttagggttaggtctatttaatttattcaatgataccaaagattcaataatacaataaacactcaagatgtagatcgatgccattcctaaactatggttatttttttcgaaacaattgttaaactatggtttagataacatttataatttatataatatgaatttatatatccttagttgtcgttgtttttctttttttttaatggataaacaaaatctctagctatcactttgacttatatgtttaatatttatattaataagttctagagaactcgcttaattacctcatcttattaagtatatattacgataagaagaaaaaaaagattatgcatgtcatctttcaaaaatgctacaaagcaactaaatatttactaaaaaaataaaagaaaaaagattatgtatatatgttaccatttcacagaatagtccttccttgatacttgatagagaacgtaacttcctttcctcctcttcgttctaattaaatccatgcaatatatatacatataattatttagattgaagaagtttcaatagttatatttttaatgtaattacatgtttatattttgttataacttacaataacaggttgcaacggatcatttttcaaacaaatttcaatattaaaattgaaatatattaattataataaactaagcaatttaaataaattatttcttttaatcaaattatctaataaaattttttagcaattaatatgtacatagatttcttttatatttataaattccctcatttgatattttacgatgaatatatatctttatatattaaaagtgcttatttaacggcatttcttggtttaacattcttgtttaatagaatatacttaaaaataaaaaaatattctgttaaatttaa

SEQ ID NO: 112415 - DNA, 4878 bp, Cannabis sativa
ttttatttataataaatgataatattattggtatttaaatttatttattaatttaaaaatgctattcaaattaatataatagaagataataattcaattatgcaattttttaaagtgtcaacattatcttccttaaggaataattatattactaagagaataacatcccaaagctaaaccctcaaaacaaacaaagtaatgtttaatcattcccttgctagcattaacccattccaaacagccacttatatgtatgtagtgcgggagtgaatctataaatttaatattagataatttaatattccaaccctccttaaagggtaatcatttttaatacagagcatggcctggaaggtatggtttcgagaagaggagatgtttatagactatatataaattatagttatggtatcacactcatggagattggagacattcactggaaaaaggcaactcatgaaatgttcaatggagatatatgaatttaaaacaaaggattgaaaattcatttcaacatgcaataactgaagtcatagggcagaagaggaacactatgcgcttaaaacggaatgtctatctgccatagtgaaattggctctagcttattctgcaacacagcaccagaagataggacagatatgaaaaaagtggcagccacactgaacaaagtcaaaatgttaagagtgaactaataatgtaaacctgaaattgttccttagtttgtattccattcgcattactatttcttttctcccaaactttatagttatggaacttttgaatctcttaaagctataatagaccatatctgcactagatggtcgtaaatatttttgcaatttattagagtacaattattaactgtggtcattactaaacttctagaaataagtcaactgacttgcccgtccaaatcaatcttaaaagtcattacgtcttctgattctgcagagttgcaagtacatagcttagaccagaaacaaactgcagtacataattacttctcattcaaggaatcctatcaaatttataagacataaaatacatcaacaagtatgacattggtaaatcgatgacaaaatctgtttataaaatcaaatgaaaataaataaataaataaacggcagcagttgcagcaaatatagaattgaaggtattcaagtttatatatttagatgctgaccttattgaaataaaaatttaaattaaccaagtgtctggttgttttaccccacaaccatccaaccatgtttggtgcacgtgtaaccatatgaagtcatttggtaactcagcctgcaaaacaatgcaattaacgtttattagtacccactcaagtgggagttcaacaaggaaaatagctatattaatatagagtaaatattgtattatacctttgaactcattaagattgttgtcagacagcaatacttctcttctcctacataaaattgtaaaaattttactcaggtttttttttatttattgataaaggtaaattattcagggttcgaatccacataaatgaatattatccaacaacaaaaatagacaagaccacaaaggagctagttgaggcattataattcaacctactatttcaggatgtatcaagtagccacaatgaatttcactgcttctgcttcagtcccaataaactagtccattataaatcatactaagaaaaacaataattcctgtaattaacttcactaacctaacataaattataaataaatatctcacttcacaaactttttttttatcttccctctgtagatcacccaataaaagtgtgcatgaattgcatatcggaacagatttaaatgtagaaaggagcacaaatataaggtgcacaaatatactagatcagtagcaagtaaaccatccgttccagaaatctaatcattaacagaagaagtaaccagcaattaaaaataaagtgcatttaaaaaaaacacttgaacccatacatccagtgtgaaactagttatgacattcttaccatgtgactcccatttagcgcacttcacaagccaaaggtctgagccaatttgtgctgaggacactcgatctacccatacctgaaactgccttccctgccagtctccatgcaacttttccatttcatccacacactggtaaatatgctgctcagttcccgagggatggaccagagtacaataggagtgctgaaaagattgaaataccaagaggaattataccttactgtagtagagttactagagttatcattaacatgtgaatgatcactatcaatttttagataaagtaaaaatatctgttaagttgaagtcataagactagaatttaaaatctcatgaaatctttcatgttctatagcaaaataataaggttttcaacttattcatcgattctccttagcttcatatctttcatttctgctttctatattcctttgtgatcatcacctaacaaaactttatagcaattattgtgttcaacatatttatctcaaatgattgaaacatcatgaaagactataggctagaaatttgtgacctatactaaatggcagatcaaagagattcaaaaagtaaaagaaaaaaagttctttgttcttttgataagaataaaaaagataaagagttacaacttacaaaaactgattttagattctgcatatgatgtgtagatttcggaatatctgcacatcgccatctctcgtagaataaataaaattttacgacttcataaccagggctgatgatatccactttgcacttttgaaagtcaccgatatctctaggagagacatttggacccagacagaaactaccaattccctgtataatccctgctgcgcatctctcggtagcatggattatattagagttatttctcatattttccgaataccactccaacagttcttcttgtgcattactgacctacatgcccaagaaataagtaagctttgaatcgtagtaattcaatttagaactgtgacaaaaataaggattgaactcgggaaacacgaggttgtatgtttacagaccattactccatagacttgaggaatgctcaacagttcagcatcattgccagaatcaccacaaacaagcgtattggcaggaagtgttccatcaaatgcaaatttctttagtagatatgcaagggcctgtcctttaccagcaccttttggtaaaacgtccaaagctatcccactactatagattatctttacatctaactaagccaaaaattgatcaaaatcagtagaaaaaaaacactgaatcgaaacaaatagaatagataaatagaattacagcataccaattgccaggaccaagtttccaaagtaaattactatagagtaataagttatagaaacaaaatgaatctcttagcttacccctcgtttctccaaacgctctgatagaacatcaattatcttgagcgctttaaccttctctacataaaagctaaccttatgaggtctttgatcaatctctgactgcaaaagttccacatataagtagaaaatattgctgaaattcaaacaagtatttttatgttgcaacgatacaatgggtaatcaatgaaatagtggtcacgaatctttgacatgtttaatcaaacgaagaaacttacctgaggaagaagatcaggaaacttggaggtttcctccacaacaacacctctgtcccacctctgattcagcaactgctcccagccaacatcgggcaccatagattcgccataggcaatctcagttcccacagacataacagtgatatcaggggttagcaagggtttctcggcccttaaaagttggtaagaatcgggagatcttccagttgaaaaaaccagaagagagtcagggcggtaatatgcttcccatagagcgttgaagcggagaagagagagattttgagggtcgtcgtggtcgacctgtgcaaatggcagaccgacgaaattgagtaacaaagaagaagaagaagaagaagaaagggaagttgaaatgtaccatggtagaatcaagatcagagactatcataagacgcggagtaccattgagacgatccatagaaaagctatggcgatgggtatcgctgacctctgatttcgagaaaaaaggctatttcatgttgctagaaaaagacacgtgtacacttttacggtactaccagtgtagtgtacctttctcaaatttcaatcagagtcgtccatgtcgttgtcaaagcataattgcaacagttttttttaataagttttaataaagtaatatattgttttaattattaggactaaaatttttaatacttgtattatttaatacataataaattgtacttattggcaagcttgtattataatatttacaaaggattcggggttaataccaatctccaattcggagctgggacccaaacccggactccggccccgaccctagacccagacccggacccgggagccaaaccccaaacccgaaccccgaaccccgatcccgaccctaacccgaacccaaacccaaatctggacccggacttggacccgatctaggaccaagacccggactcgagaccaggactcggactcggattatataatactaatacaatacaataccatatattaatacaagtcaataccaaacatagtattatattaaataatacaaatacaatacaatataatacaacacaatctaacacaatacaatataacaccatacaacgtactaaacgaactcctagggaaatttaaagtgagaattttataattatgggcctttatgtaaaaaccaaagggctatttacaaaaatatgggaaaataaagataagttttgatatatatggcataaaaacttaattacactaaatatggcattt

SEQ ID NO: 112416 - DNA, 1177 bp, Cannabis sativa
ttagcaaaataattctctcccctactaccctccttactcactcatatatatagcatcaatccctcccattacaattacccaattaccctctttatttataccctaaggcctaacagatacatatatgatggtcatgttttgtacaaccaagctttgtaaagagtccaaagaccaagataaattatatgtcatcctttctcatatgaaaagagcatggaacttgcatcaagactttggcattaactatttgctatgctttgcctactgtaccctaaattaccattataattttttcatttaggtagaaggtgtcaagggcatttgcccttatatttcccaaattatctattatgacttgtactaattactgttctgaatcagttgttcttgtgctgctacccgattgtttgtagctgtcgacaattccttttttaaatgataatagacaaaagtatggatggggcttatttgttaaatagtataaagcaatatagagaaaaaatgcagctttttaaattgatggaaaattcggttcaagtatattattgttggtagtgactaatgtcaagttcactcatgctattttgaattgtaaaactttactttgctagtaatatggtggctttagactttttgatatttactatcttatctagctccacctgttttagctgattatctgtttttctttggaattcattaatctttgttgagaaaactagaatttgatgtttctgttgaaaccttctagttctttttctgtttttgtttgtcttttgaacaacaaatcttctagtttttggttcagatagaatgcaaagaaaagaaggtaagtctagtgaggactaaggcactgacatgatatgaacaacgggtgcgtctgaatatgtattttagttgcatgaaaatcacattaaagaaaatgattcttagtttctcaataggtatgatctattttgtttgaaccgtcttttaagggattgagtagttgttttgaatgaagtgacgctttatgttatccattaactgtattaggctgaagttatgtgtaattgcatatgattagttatatacttaactagaaaacaaaccgcgctttcgtgtgcgttgtgttttatttttggggaattaccctatttattatttttttaacttttttttttttaaatttacagtt

SEQ ID NO: 112417 - DNA, 5385 bp, Cannabis sativa
tgacgatgaccccttggtggaatgtgtcggaggaaacaacgggaaaaaccctgccaatgctggaacctctgctcctgtacaggacaagggcaggcaaagataagtgaccctgccaaatgctcctatacctcctcgagaaaagacgaattcggccaactagccttctcaggctagaaggtgattgacggctcgaggctcggacgccttctgcccagaaaggccatgtaacgccaaaaaggacttgtacgaaagtaccaaagcccaagggatggaaaaatcgccttagtgattctataaaccaagacggtgggacagggggacagtacttcgatgacagttggtccacggtggatctcaaaaggcgtctggacgccaagtacgaaaagaaaaaaggcgagaaggcaaggccacgttgtaatgacctaagaaaccacttaaacgacaaagttcgtgggatagatctcccagacattgacaccaagagattggaagaacaaattgctgcactgacgaaattgatccactttattttcggaccgatttcgtcagaagcatcatggaatctccactcctggagaacttcaagatgccccaaatcgagctgtacgatgggctcactgatccaaagactcatctagccaaatacaacaaaatgatgcaagtggcaagagtcagtgaagatgccaagtgcttgtgcttctctttgacccttaccaaatctgcagaagattggtggaagagattggctctcggatcaatccattcatggaagaatctgccttccggaaacagttcattgctgcccgcgactatgacatggaaatgggctctatcattaatgccaagcaacaagtcggagagagcttgaagaactttacccagcgcatgatgaagggggcaacaaagacaaaagtaacagatgacataaaacttgtggccttacaatcgggacttgcaattggttccttgctgtggggagaatctaggtatcccttgattgaaaagctgaccttttgcttactagtcgcctccagaaagctcagaccctactttcaagcccacaccatcaaggtactgaccaatctttctctccgccaagtgcttcaaaagttggaggcatcgaacaggttgttcaaatgggcaatggaatttagccagtttgacatccaatgccagctaagggtggcagtcaagggtcaagccctaattgacttcgtgatcgtgtcaaagcatgcgttgctagtcgcgcggatactctacaagagggtagtttgttgatcatatttgacgctcaatgagtctttcgcattcttcaggtcctcaacctccttcttcaggccttcagcattacccagtgcacctttaatcaccagatttttctcatcgatcttatttttcaaattgttgacctctgagtgtggtttgtagagcattgctttggatcacgagtcgaccatccttgttatctatctcctttgtcacttgaagaagcttgccattaagggatgacacctgttgtcagtatgtaaagtttggctcctggcgttggcttgctcaagctctataacagagccccaacttcctttgaagtacgctctacaatcaaggccatctgatacaacaaagcagcataagaagacattgcacgacaacaagagctaagacaaagaagtcaagacttaccccaaccgcctgttgttttgaggcttgagccaaagtgagtacatcgctgtactgaagatggcccactttttcgacgttagctcagttgcactctttgaaaagtggtgcgaatgcccttggagatctcaaccctctttactgcgaaaaggttgtcggccctcttttggagaacaatcctttccttttcatggcgcatcctcagaataccctcgatctctcctaccttcttcaaaattgcatgattgaggcgagtggatttcagtggaaacttgaagcctaaagatggaatcttgggcaaggaagagacaagcctgagtggttggctggaagtagaattgtggccccacgaaggaatgatggctcctgactgagggtgttgttgcggtggttgtggttgttttgatggtaattattggtattgttgttgttggtggtgttgtggttgttgaagttgttgctgttgttgctggttttgttgttgctgctgttggttagttgtgtttgacaaggatggattagtggtggatctgcgaagatccccctctcctcccaaagaacgatgcctgtccgcagcagatctagctttcttggcgtccctaccggaaggtggaggagtcttgcgcttgggagtctagactctcgtttgaagcattgttccccaccaagacctccacggctaatggtggcgaagcttccacctaagctagtggttcaatattgccagtttgggttgcgccagtcccggacacaactggttccttggaagcctccctagttgcggcatgagtcttgtctgccccagcgggagtctggaaaccggaagctttggtgctagccttcgtgggaggaggaatctcccggacatcagacaaagatgaagtagacggaggctttgcattgcgggtcttgtgggcctaggtcttgcctttcccctttcctttggagccctccgtcttggtcaggctcttcgtggtcttatcactcagtgacttcaacattttcgctttgggagtatcagcaaacataacgaacatatggctgacaagccaactctaaacaggaaagccaaagcacaataaacatacaacaatatgttcctaacaagtgcgcgtgtgggtgtaaccgtttagtgaacagttataaggttctctacgagcgaagaaggtcatgtcctcccagccaatgaagctgtcgtgctttttgaagtgtgagaaggacatgatcgcaaaagggtccacctaatagtatctagagataattttggattgctaggactccgaatgatatcacctaccctatctatgaattcattcatggggtacttagtgtgatctaaatttaaaaaatatgtattgaatctcttttggtctatccgggatatgcgatgaagattgggggtgtgggatacgcagaaggctttgttacatcttccgaaagtgttggctcctggggcgcctttgtccgggtatgctgcagcatacctctcctagatctgctcaacctttgtcagagggtttgggtgctagaccatccaactagtttctagaagctggtcctctttgacggcctctataatgatcttggccaaatcatgaactatcgcttccttaacctcttttgaggcctggcattggccccggccacagatgtagtctatactttgaaagccaacgatgagtccatgctcacagagtaatggagtggtaaccaaaccctcgactttcagttgggtttcggtgaaggccatatattgggccaccttcttatccaatttttcaatcttagcactccgaggcacagactctgccaaaagaaatgtgaaagctcaattagcactcaaatcaaattagaggagggtttgaaaggaaaaagatcgaaacaatcagttcaacataatttacttggaatttggaagctgagctgaagagtaagcactctcttcactggaaaaccagtggagaagaaccaatactccctgaggtcgtgggtgcgcttggtatggctggtgggacagtgagagtctgaatacctctccaacttatagaagcctaccttttcgcagttggtcctcttcggctgaggcttcatgctataaaatagaggatttcttccagagtaggcacctcgaatttgtaaattctacaaaaaatataccatccggctgggagtttgtaagatggaggtattagctggtaaggagcaatcctggtcctcgcgatgaaatccgcgaaatacgccctaagagggaggtgtgctttgttcaagatgtgggtccagctctaagcactgaatctatcgatgctcatggatgcggactcctgatcgacggataacctatgccacattagtcctggcaagttgtgaagtctgatatttgaggcatacatctccagcattccatacaaacagaaacaattctctttttggtccattttccaaatggaactgttgggtgcccgagcaagaggcggagtcttagccttcccctttcccttagactcctcagctatcccggatggagtagcctccggaatagtctccattgtgccatcttgttgaagctcggggactggagcctcagttgtcatttcctcagtagccactttctccataagagcaactggtggaatctcttcgatttccacagcctcaaggtggaactcctggttcaaatccatcactggaaagacgaagagaggaaaaactaagcaattagacacccactatctaatgacaaaatgggtatcgagaaaggtctcccctaaaattgctcagagaggtcctcggcaaacctatcactgcccgaaatacgtttttcctagacaacttgaagcaatagatcgggaacccaaggaaagttacaagaacaaaagctaaagcagaactcgagaaactaaagcccctcagagtcttaacaactccaaatgggtttgaagaaaatacactggcctagtattcgtccaaaaattcttcttgcctaattctgccctaattcttccctaattccagaatcctataagtatgcaaatgtctacggagcgcaaacaaccatatccaaactatacatacaataccatcattttcatgatgcaaattttttttccacataatcctgtcctagaaatgaaactctacgagctacattttaccactcaaacatacaagacatcgtagacttagcttgaacaagacatttttgtcttagatacgaaaaggtaaatagtcaatagggtgtcaggatacttgttatgtgagtcaggaaagagaggttttcgcggaaatttgcccaagaatgctgaacccggtcgattacccgattgtagccggcttgagcgtcgaaacttttgtcggtctggggtgcagcagttcgaggtttaatggctctgcgtctggaaaacgggctgaacaaaggtttagaaaatattggatcaagcaatcgaaggctcttgcattcactgttggaaacgacggtgaaagggaagtttttaggaaaatgggaagctctggtttgaaatttgaaaatgagaattttaagagtctgaggttatgaaaagaagaaatgggttgggcgaatcctttataccaatgtttaaaaaggcgtttttgaggcgcgcctcaagctgaggcgtttgaacagtgcctcaaggcgtgcgccttgctgagaagaagtgaggcgtacgcctcatgtggtgaggcgttgag

SEQ ID NO: 112418 - DNA, 5911 bp, Cannabis sativa
agtcaaaaaccacaccacccacactgcgaagatcccattgtaatgccctaattgaaggaacaccacgtgccgtgattactctatgctgatctcgttaattgggatctactaagccaaatggatttaaataaaatagttgataaattaaactaacttgtaataacttataactttaaaccaaaataatattacatattcgggatcccgtatttttttttaaaaaaatattacaagttatttacacaaaagccaatctaagcagcaaaatgagatttctaaggtagacccaactcttgtggtctagtttggtcgcaacatgtataatcacctgccataacagagattcggtatatattatagatgttaaggccactagcttcatgtcattattaacatttgttttggctactgcttccatcatcatatgaatgtaattcttgaggctttctcctatgtgttgcttgacgttggtcagagaactgaccttcatattagtcctttaccgttatgaatcgtttcttaaacatagattgtagacccttccagcttcgaatggattcgagagataaccttttccaccaattttcagcggattttgttaaagttaatggaaaacaaaggtatttcacattatcacttactttttccacttgcgtcaatctattgtattcggatagaccagccttgaggttcgttctaccctcatataactctacttgtggcattctaaagcttttagggcaagtgtttctattattcttctaacacatggttatgaaacctccttttctgaattagatacaatcccactttgtttttagatcagacaatctgtgagcttagttaatgcaactatctgatctttcagccacctagtatgccaatccagcaactcgttcatggatctatcgttgatgttgttcttaaggtcgcctccatgaggtttttccctttcacctttggctctatctcttttgacatttaagcatttttggaggtcggatattgacatactatcttttaggtagatgatttctactctttcgcgttggttaacataatcactagggcggttttttccatccccaaacggtaggcctcggtagttgagtaccatgcatatcgtttcgcacaactctacctcgtggatcaataaggtagctttgctttagggcataggcgaccttctttctctgtaatggttggttggctatgttcttattgtcccgtggagcatcaggagcagtttttttcgcaggttcctccatgacacctttttcttagtctttagtgggagcaggaagtctaaaatctataaggttagccttaatgtggtggtattttcttctagagttggccttttcatgagtgttttcctcaggatcgatccaggcttgttaccatgccattattttttgcatttgacgtgagaattcctcttatgctgtcaatttttatttggtctcgacgagttcctgagccatccgaattacctcgggatctggttcataataatactcttcattgtttttattatttccattgtcttcaagatcatcgtcatgttcttcttagtcttcttcgtcaatgggatcctcatcaacgtatttctcatgttgctggttctttttggcaggtcgactactcacttctgatgtctctccatctctaacaatatccatcttggcgcgtataatgggaggcagatcaccatcatccatgatagtgtccctattgcgagcggcaaaattggtgacgttggcttcaaatctttctttaactctcaatgaaagtaccaatatatttattgaaatttttagaaattgatttaaatgaaattaacgctaaagaaataaatgaaatataaatattgaaatgaggatttttacgtggtttgggtattagcaaattctagttcacgagtcaatattatttggctagaaaaaccttcgagtatcacataagtattttttgtctagtttatgaaacctaactcttttgccttaactttccaaaaagaaaatcgatcatttgcatgcaagtatcacgctatatttataggctagggtttcatgtaaacttagcccactaataaagtaaatacaagtaatatatttacattggacctattaggtgaggccctgcccatgagtcgatggttgtttgtacacgtggagacctctagcggtaacaagtggcaagtgtgcgtcgtctttgcatataattttgctagagtaatggctattggaaaattagagcatgtttgtaaacgtgattttagaccgtctttcatactctaatttaaatcaacttgatatggaatttttaatttgaattagagtcatttatcatacattacttagagagtttgacaatattttttgcttaaatattgaattctcgaatccttttacaattagggatggacctagaattaaaatttagggtgggcaacttttaaaattttaaggaggcacgtaaataaaaaataaaattataagaataatttaagcatataaaatggtattttaaagaaattacaagagcaaaatgaaggttgatcattttttagggtgggtaactgcactatcttactttggtgtaagtttgtccttgtttacagtgaaaatagtgttcttattcatagaaaaaataggaatggaccttgcaaaacttcaactaatacaaatttgccaaacatgctggctgaacacaaaaagccaaaaaagtaaaaacttaattctggaaaatcttacaaaaccaacctctatctttcttactatttttttttatatctattttatacaatttcactattattatactttgaaatttttgtacaatgtaaggaatggtatacataatttgatttcataccgcctcatttttcactcttcatatcatatgtactgttgtattagtaaacaatatagatattttttctcatcctagaattcttgcttctccttatccattttagagtattagccaacatatattgattagatttaatctacaaccatctgagtagctcttgagtgatacccctatagtagcaacattaaaaaaagatggacatgtgtttcaatagcattttcacatatcagacatctatcttcaacagtgattccaaatcaaacaagtcgatctctagtttataacctccccaagtagccatccaagcaataaattagtgttttggctcactcaatctattccatataatggcatttcacttctttttctctttaggccacattgaataaatggaccttgttaaagaagggcatttgctgaaaagttgacttaaatgtggcttttctagggtgttctccccttcttgtggagggttttccctctattgggccttcagtctaagcacaaatcaggtagtagatgcatgtggacaagacctgtccactgattatgtgataggtgagggtatgccataaaaggtagtggggaaattacaaagattatttactttatggaaaactcgctttgccgttggtatggaagggacaagctatagtccttttccctttatatgcatcgactgatggggaccacctatctcggatattatcacgcaacctgatagggtattaaaagttgtcactaatatcatccaaattttggagcaacaatacattctagcaataaaggcaacccattatgtccaacacaatccaaaattcaccgaaaaccaaattgtctacacctgcccaaactcgtccaaactcggtcactaagtgggggtttagtaatgaaatatctaaaacctaaaatttgtagtcaaaacaaaacctgcccaaatgtgcaaccctatcaacctctattcttacttattacatgttagaatcgctaggaaaagcctccatgaaaattaatataatattaaagaaaatttaaattttcaagttcaatgagagtttaacatattattaccaaatacaaaatcaaagatttgtagtagatttaaagtctataaaaagggtcatgagaagtgtcttacttattctttagcacgagaaattttagaaatattgtctgcctaaaaatttagagaaattatcccatatattatttatttattttttttaaaatttacggtttgggttgctccaatggtttctatgtggattgctatgtaaattttagttgcgatttaggttgttccgttagttgctatgagagtttttatgtggaattctgtaaaaatgtaaaaaaaaaaaactactttaaagtgtaaaaataaaaaaagcccccaaaagttatagtcattcattattaatgaataagaatattgttttttgaatggtaaaaccatcaaattctgctaccaacaatggtaacaaatcagttggctcagacgccaaactgaaaatacaatcaaaatagagtaaagaagctctagcaaaactataagctactttattcgctgatcgctttacaaaatagacacaaacatctctaaacttaggaaacaaaactttacaatcattaattacattaccaaataacaaatatctctagaatctctatttcttagtaatgtgagaaacttccataaaaaataaaaattaattacttgtagaaaaaagaataaaaaaaatattctaagtaatctagcacgaaattactaaatacaaaactaaagtagtttatatggttaggaccgttaatttggcgggaaattggcgcgtaatatcttcttaatctctaccacacacatcttattctccgttaaaacaaaatttgaaaatttaaaatagtccaaacacaactatagtctaaaatactttaaatcattacataaaataaaatttatagttcaaaatattaagaattattcaagataataaaaagaatgaagaataaaacataaaaaatagaataattttttttgtttggcaactacaaggttaacactacccacattcggtgtttggctagagttcattaatttaagttgagataaaagttaaagttattcattaaaaaaatgttaaaattaatagaatccaatttttagaaaaaaaatgttatgaatttcgattatcaaactatataataaatttctttgttctaaaatatattaacttatttatcatatgttattaaaaaaataaaataatactataataaataaataatatatatttttagtttgtaaaaaatattttatatttattgaatattttatattattattattttcataaatttgtgttaggaaactacataaattaaagttttttttccttaacaacctagagtttcttttatacttatattttgtttcttacatgtgataaaaaataatttaaaaaaaccaaaaatttatcgacaaaaaaattaataaataaggacataaaaaataaaaattctaaataacataaatttatatatatatatttaatcataatgaatgaagctataatataattatcattataatagaaccaataatttataacactttaaaatttataatttaatggtctctctgttttattaaataatagtagaccatgtatttttctaaatggtaaaaataagacactgactttaatttttgatatttatataatcaacttgaaaataattcgtagcacgaacataatcagttttgtcataacacctcttaattgagttattagtaaattttattttgacaaaaaattagttcacggttttatttgtaccattttgaaaaatacaagatttattttatcatttaataaaacagataatccaatcaataatttttgtagaacacagagttcaaaatagtatttaaccaataataaatgagaatcgctaaaaagtctaacctcatactactaatgtaattaaatatcgagtcccatataatttaaaaaaataactttaagggctcgtttggaac

SEQ ID NO: 112419 - DNA, 3330 bp, Cannabis sativa
  modified_base (3304)..(3304): a, c, t, g, unknown or other
tgatgacccccccccccccccccctcttcttcattcattttttgttattcaacacagtgatataccattagactctatattagtgtttctaatcttgagtgctcgaggagaatgtaatcttaaaggagagaaaatgggtttttgactcgaggacagtacacatgtgtgtctttctatctcttgcaactagtggtttcgtttgatggtataccatgtctagatctttttgtttggttagtttatttttcattgtgttgaagacatttaatatagttagagggttgttagagttagttaagcacaagtctattagctcctgttagtttattatggattctgttattgaatctcttataatgagctagtatatgagctgaaacacacataattaatcaatctttgtctttctttctctctgttctacttgtttgtttttcatccatggctaggaacttcaacatggtatcaaagcagtttccttccttgggtgtgaacatggcgactgaaggcacctgcaaccaattcagctactgctaattccacgaatctagctacttctaatagagctcctgtttgaactcgaacacattaagaacctgtgattttcaaccataatatctcgatctgatttattgatcataacttccttctatggaagcagtaagttattgctgcaataagaggaaattgcttgttgaagtacaataaagaactccaccagtcgagttcttgaatgatatagatcgtgaaatcaacagagttaatctagtgtactctgaatgggaagtacaagatcagcttctggtatcttggttactttcttccatgactaaaagtaacgagaatggttggatgcagctcttcacttcagatctagaactcactagaaaaacacttcaccctgcaagtctcctaagaaatacttgagtttcaaaccaagctacaaaacttgaagaagggacctatgagccttaatgagtacttgctcaaagtcaaataaacggtggatctccttgcctcatttggttaagttctaagtgatcgagatcacatggctgctatcttcaaggggctatcgagtgagtatgatacatttgtaatctcatcaaacactaggattgagaatacacagtaggtgaaattaaagccttgcttcttgcctttaaatcaagaatttaaaaatctagcaaagagattgacctgagtgccaatctagttacaaacaatcctgattctattgctaaagccaatcttgcttttcgaagtttcaggccatttggtcgaggaaatccttagttcagctcatcacagttcaacaagaatcaaaatttcaggttcaatgactttgctcctaactccaatcaaaatatcattggaagaggtaatttcaatcccatcagaggtaacaagtttgatgttaacttcactaacagacctcagtgtcaattatgtttgtgttttggtcacattgtgcaagagtgctctttttgttttgacaagtctttctcaagaccttctttaggaactggttgtaatcactcacaggctccaacacagtctcaagcacaagccaatcatgcaattagcaacaactctaatgacacaagttggtaccctaactcaggagccacaaattactgtacatttcaatatcagaatcttggcaattgcctggactatggtggttcagatcaactgtatatgggtgatggaacaggtttatctataaagcatgttggtcaatcattctttcttgctaaaaactcctctgaacctcttgttcttaataatcttttacatgttctagaaataaccaaaaatattattagtgtgtctatatttgcccgtgataataatgtattttttgaatttcatgctgatatgtattgtgtcaaggacaatttgactcatactaccttgttgatggggaagcacaagaatggcttgtattcatttgattcaagccatgtccagtatatccctcccatgtctgagcaacctctcaatacgaaaactcctcacatgtagtcgtaccattccagattcctcataaatcaaaactacatatatggtcactctaaataatgccaaaatagctgtgtctaagtgtatcaaatgtaactcagatgttgagaatgattttaccctttggcacaatagactagggcacccctttgaaaaagttgtacaaactgttctacaatcttgtaacattcatatcaccaataaaatttctcattactcaatatgttcagcttgttgtcttggaaagattcataactttccattcccaaaagcttcaaacactgttatttttaagcctttacaacttgtagtgtctgatctataggggccatctcacactacttcttacaaaaattacaaatattatattcatttttttgatgtgttttcaaggtttacatggttgtaccttttgaaaaataaatcagatgccttcaaggtctttctaaactttaaagcaaaagtataattgcaactaggcaaacaattaaaatgcttacaaatagactgggggtgagtttagatcattttctaagtacctcacagatcatggaatacatcatagacatccttgtccaacaacacaccaagaaaatggcttaactgaacaaaaacacaggcacatagttgagaatggccttgctcttttagctcaacattccctacccattaagttttgggatgaagcctttaggactgcagtctacatccacaatagacttcctactcaagttctaggtaaaaaatcacctattgaggttctgttcaaaattaaacttgagtatacaactttcaaaacctttgggtgtaggtgttttccaaatatcagaccatacaataggcataagctagagtataggtcaacaccatgcactttcttgggttatagcctaaaccacaaaagatacaagtgtctaaatctaaatgggagagtgtatatctacagggttgtcacctttgaggagttttcaatcccctatgaaacactctgtcaaaaaacatctcacacaccaaaatcaaataagtatccaagtgtttttgctataattcccacctgttctcatcatcatttgctcttattaagtatctgatctaatgagtccacaacctaagattgaccaaaatgctcaaacaaatgttgtttcacctcatttggcttctgctactaacagttggctgccaagtcaactatttatttttgatgtagggcaatcttctggaaaaaatgttgaatatgctaaaaatctagatgcaataactgttgggttttataccctanataaaactctttacaatctgattagt

SEQ ID NO: 112420 - DNA, 2713 bp, Cannabis sativa
ggaaggctgaccttggcttagagaagtcaaggtgccgcacgggtgttccgctgcctgaaaaggtgagcccgtgacactaggcaaggcatggttggctgattgggaatgagcacattcgtatcccatcagtgaggaggttgaactggcaaatcgattttccgcagtggctaaaaacgaaggcactttgggagccagtacttctaaaaaaggtaaaaaatacctttccatctcgcttatgcttcgcgtctggatgagatggaccacgtcaatcaaggaggcttcaatgattattttctaagtgtagatcattataggtatcccgtagatgaatatctcgatagggtagacaaaattataaggagcttcgaacacgaacaatcatctcagtcttataggatacaccaattcctcctcatgtcctaaccaagttttgaggagtatgatagctttttggacatggaggatgttgcttcatttgctcagagaaaatcaaaatatagcaaagtcagtggtagcttctgaatttgagtcttgttgttgtttttgactaactttgagttagttgtgttttttcctatttgcatatgtttctaactttcctttatgccttttattttgcagaacactcaataactctctagatgggccgcttggataattttttggggaagattgaagagatcataactgagattaaggctaaggcggcggctcaattactcactaatacaactaaaggaaaaggcaaggccatagggtcatccagaccgaaggctgagagtccagtccttacgattaaggagaacgaaactgttctagaaaaagggggcccacttctaaagaagccttaaatactcaacccctccaacatgaccctcttccttctgcatccaatcctaccgagccaaatgttgcggacaagccactggtggtgcagatgcacctattctgatagatgaagaaggggaagggtttgtcttcccaaaggaggttgtccagaccctgaagcaatttgatccttcatctaacatggaaagagaggcgaagaaatccaggaaagaaaccacccccgacaccgagacagaccaacgctcaagcaaggaagactccagacggaggaaggagacagaagaggagaggagggcaaggaaggaagatgagaggcagagctcttcccaagataagagatactcgatgcatgttgaagctcaaccgagagacaaagttaaagctcaacccatgcaccttgaagtctaaggattcgcaaatgagctttgataggagtgactcaaagggtgttgaagctcaacccatagccaatgttgaagctcatcccatagacacctcgaagtctaagggtttaaaaataagctcgaggtcccaaccatctgaaggtcaaagacaatagctccaaactgtgcttcctccactttcggctgtctattttgcctggcctatacgtccagctgatgtttcagttgaggtccgaaaacaagtggcagaggctgaggtttgaaaatttatggtcgtaataattaatataatacaatgttttatccaaacatagtgaccgttattatttaacacaataagacttttatacgacttaccaaacgagcacttagtgcatgattgtaagcttatcctagcttctttaagttttgttaaactttatttgttaagcattctacgaataaggctgcacaatatgttgttcatggctctcgttcatcattagtaagtatattcaatgagactaagtaatgctcttggtgatctttcatttattgtaatggttaaagctatttgatcaataaagctcctatttttttttttatcaaaaaaaattaatttactcgaattttagttaaatattcaagggtgtgctcttaatgggtattacccataaatgggtatttaaatattgatcattggatttaatcaagtggatgatatttatagttattaattatatttcaaaaattaatattttttattttaacctattacctgatgacatggcaattattttatttttcaaacccatttttttttatgtgtgaaccccattctttgtattcctaaatgaatgaaataactaaaaaaattaatttctaaattaatttgtaatgttcaagatcttgaaagggcaggagaattttcatcttcatcgttcttaaccatgtcaagtgtatttttttcacagcatcaacatattcaatcttcttcttctttcttttttcacaacatcagcgttagattgggccatttgttcatactacaagaatgaatcaatacttttctagacacatttcacattaattaaaaggcgcgaaaatatagaggttttctaaaaatttattttacttatttttttgctaaatatttttaagaaatactaaaatttaggtttatgtgattttattttccttttccttttcatttttcatgaatccccaatcacctaaccctttcgattcgtcaaaaatgaagctccctcattgatcgatgttgtattctcctcccatcgaacaacaatggatttcaagctaaagccatgatcaaccacaagctttgtcgacaacagttttgatatttaatatatttaattatggtaacaaataaaatttctatttaatacttcaatatacattatagaatacaataaatatcggcttttcatttaatacttaaatatatattataaaataca

SEQ ID NO: 112421 - DNA, 4825 bp, Cannabis sativa
aataggaaaccatattaaacacatgccagccgaaatacacaataaataataaaatatttttgtcaattaaatatgctaaaaatggaattaacacaatccaatccaattcacacaagtgcggacattcacactttatggattggattgaatattaatagacacccctactaaaaattatcttttttttttttgaacaatgaataaactttcataatttcattaaaagtgatcaacattgagtacatctaaaaaaatagaataaattcagaattatttcattgcaagtatattagtttagaattcaagtattttttttttaatatgatagagcaaagcatagcaattaagatttgtataagtaattttggaattatgctatactaaccttttatggttgcaatataagccttatattactgttaagtattttgaaatacttgtaacactcaacaacaggcctattagctcagttggttagagcgtcgtgctaataacgcgaaggtcgcaggttcgagacctgcataggccattttatatttttatattttgtatttatttatttattttgtatttataaatttcttttttggtaccaaccaccaacgcaagaagacttctctttctcgtctcaacgcaaataccaaaacctccattgcggatcggtcgtccttctcggtcatattcttcattttgtaaaaatggtaatccttaaccctagttatgctttcttcttctcaatatatgatcaaattttcgccttttaattatgattgcaatttttttcaggtttgcttggcatgtctcatacccattttccttgttcccatcgtcaacgtactgcctcttctcttctattacattatggtatgttgctccaaatccatctattcttttcaattcatctgggtcaattttcttttctgcttgaaagaaaaataaaattaataattggggttaaactgatcatggggaaattcataatttgattttggtatgtatctctaatcgtttacaaagactggattttttttggtggtggggttgaattttggttgtgtactttgtagggaaaggtttataggcttcttgggtgggagtacagaaggccggagagggctcctgccgcttgtcctttcaaaccagcagctaaaaaggaaattcaagtgagtgactgccccccctcttttttttatgttgttcttcatttatttattttaatggttttcttcatacggttatttgctaaattgaagccaaaaattgtgaaaagttagtttcggtgtactgagaaagtttgggttttagctttctgttttgtacatttgaaaattttgggacttttttttttttgtcttgaagatataaaaaacaccataattgtgtagattttaagtgaatgatatgaagagagttgaggtatgaatgtgaagaattgttgtgacactgtggatgtagtggaaagctgtgtctcatctgtttgcttatcatgtcatagaagtacagtatggattatttgggcccaattttgtgggcaatataattagttattagcttgataaattattaatcaaggtaaaaccttccgtaatagagcgccttgctttagagatgcgcttagttagtctgaaggcaggctgggaagacaaaagaagaatttcatgctcgcccaaacgtcagtagagcagctcaatgaaactataagatagatcggtctgattcagtgactctataagatagatctctgctgcttgcacttgtgtcagcttgactccttaacaaggtgatttaagaaacttcactgtgatgacttagaaatctacaagcccacaggcactctaaaggcctataggcatgtaatcgtcatccatacaagaagagaacacttacagaagtgtcaaagtacaagttaagagtatccaggtttctccttagttccgtggaatagtagcaaggagcgatgacaatttttccctttaagagagcttggcaatgaaaagcctctctggcaataaaccagcgaaaatgaatccttggaaagggatgtggtggcaggtccatgaggtagaaacctaaccaagtctgtcttacttaactaagttgtagaagtaaagatggtcaaatacaatctctaatgctataaaagattaggctctctacatatttgatttgcttgagactcaatagactatccacaaaatatctatattactaaattgtgattcctctctcacctgtgatgctaaatcctcatattgcaaaacactcaatttcctaggtaaaggtttgcttaggagggtttttcttgatttctcgcggcctgctcttctttttctctttcaagttgttgaatccttagaatcaaaacgactttcaattgttttatagttggttcagggtcttcacaaattaggaatctccctcctggggagcatacttggtcatcaataagatagctagcaactcagccagtcattaaatcaataagatagctagcaaagtttatcctgaagcttggaaagcgaaaaggtgggaatactctttggagtttggaagatgctttcagaatggatcaaattgaactaggtcaaccattcagttgtcaatagacaaactttgccgaagcatcaactatatacgaatgatggctagggcttggttctgagctttataatattcctatcagttgcttactcatatcaaaactagtcgagactcttttgcctatcggtcgactttaagcaaccttcacatttcgtgcggaggtcacaaatctctatgtgggccttcttggccactcacaacctttgttcttcagagaatctcgctcttatgtcgtgggacttgtagcttggcattccaccgggtgggttttttattccttcaatgttgagtttcttcatggttagttaccttaaaataagaagtagagattgtacatgattgtagttaaacgctaaccttagctagttggaaacttgaatgttgtggactgattgctcctgatgataaattttgatttgtttgagagttttgagttttgggcactgtgccttgtctactcaataaagttctttaaaaatgtgtaacacgagaggttgagggttttaacttctaactggctgtagttgaatactacatttggtctgattactattcaaactgtttggaaaaatttctgatactagattgtgatttaaggctgattttagcactgtcgacagtagtgattaaagcatggtagacaggtgtactataaagtataaaaaacaatgtgattttaaatcgatgtagttgaattttacatgtgctcctggaggcttaagagacatgtgacctagaaaattgacaaatacactgtggctaagcatccagaaaatgtactgctaaatttgatatacagggatagttgtcacaaaaatagattaaagctaaatagttgaatgtttctgttcgggaccttgaagcaattaatagaatttggtatgtagctaaatatattgcttatttgcttcatgcgaggtggtaatcttaatccatttgttcaaccttgagggtaacaataggattttggcatagataaaggaatataggtttgaaagttgtaatagaggcctagaaatttgttgattctttatctgaggaaaccttacctaaagtaattacctctgcatacaggatattacttttggtggtcattttctcctctttgtatgttaagcaattatatccaaagattagcaaaaatgatgatgtgctcaagagatatttttgaaatcaaggaataacagggaacagtggtttttgggagaccagaccatctcgcactgagcagaagctcatacaacctgaacattctttcttctaactgtttcacagcttcatatacaagttattacactctcaactaactaagcatcctagttagcccttgctatttcctcccatgtttagaataagtattaagtaattgcaatgggaggtctgtctatcacatgataccccttatctccatttggtcatattgcattattgttgtctgttgcttgctgctattcacttctgcacgaactataccttttctgatgtagtttagtaatttattttagaccttttcacttattgtgatctgatataatttagtaatttatttttcattcaatgattcggtacggtttattgttattgacgttacatttccaagcaggctggggaaggagctgtgcctggtccggcagaatccgtatccaaaccggtgggacatgtggatagcaaggaagactgaattttaacctttgttcttgaaaagatgtatatataagagtctcagcctttttatggtaaaggataggctgggccttattaatatttttgggttcaaacagtaccgatttcagtcttctgtagccggttttacaaaatgtatgaaacttacatctagtctaaaaatggcctctttacatttattcattttcttttctctgtttggggtaccttatcccatgaataatattaaagggtcccagatttttgattgaagacaccaaccactgtgaatgttaagtttttctatttttaatatatatattctttcttaacaaaactttggtagtctaaaattctccactttcaaatatgtataaagattaggaaaaaaagggtgataagttttgtccaatttcactggtcaaaacgacatagttagtatagtattatgttaaattgtattttatgtaatatttttatgtaaaattatatgtggtattaacttttatggacacttaaatatataatattttagtaaaaataaaaatttaacatagtatta

SEQ ID NO: 112422 - DNA, 2348 bp, Cannabis sativa
aaaaaaaaaaaaaaatctgttatgatgctttggcaccttaaggtacccattaacatttattaaaactatatcctaccatatattttttagaaaatatatatttgatgatcaagagggaccatttcgagttattaaaaaaaagggatcattatgaggaagaaaatataataaattttcttaaaaaaaatcacaaatcctggtcattttcaacttaaagttcaagattagaagaattatttatttattaaaattattatcacaaaatcttgtcttatatataatatattttttttttttttgaaaaggagtcttatatataatatatgcacattataatatattataatggccaaaatttcaacccgccttatttatgtaataatcccaaatatgacaacctatcaaaccaatattttccttaaaaagaaaacttatatatcttttttatcacatacgcatatataccatgccatatggattgaattgaatgaaataaaaaaaaaaaaacaaccgtgtggtgccgatttggtccccaaaatgctggacttggtccttattataccactgcttatatgctttctgctgaattttgccggctcatatttataccataccatttctaacttgttgatctgttatagtacgtcgtactcgattaatacatatttatctttggttaaaatatacaaacacattttctgacaaacaagctgtaataatttgttcattttaaatgaaaataataataataacaaaataaaatggcatgtgaagttaaattccggaacatgcgtctcactcgtaaattctcaattgcctccaaatcgctgtagcctgtagttatgttatgtgtatgaatttcttattatataaaactaaaagccatatccctttaagaaaaataaaaaccaaaaaccaaaagccatcaaatataatttatcaacaatacttttttgtaacgtggaggattttttttaatacaatattattggatcatgagctcgcatgcctaattatcttagttgtcaaattatacttgtgtattaaatgtgtttgtttggagttggaggaaataaaatggatataaaataatttttattttattttttttagtttagttatattttaaagtattaaaatgttattttaattgaataatttttctataattttagtaaaataaatatttcattttaagtaaaaaaaatatgtcaaattacaaaatattattatttttttttatatattttgaattttatttcattcatctcaatcatacgctactttaatgtttattttccattatttttctcttttagaggtagtacttggaatattgtgactatacttctgatcaatattttatacataatttttctttattattatttatactgttttgatttctaaagtcaaaatatcattcattttaaaaaaaataaaagtaaaaaaggtcgaattcgtggacaatacaaattaaattttgctcaaaacatgtgtatattgaatttgaatttctttggattgataattcaaattctgagtttgactttgggcctgtctttcttacatttaactactatacctctgaattactacgcactgtgttttgggaaaacttgtctcttgtggtgcccatatttttaatttaattttaaggacttcattgtctacaaacttaccaagctactttcaagttctaacttcaaattataggttggcagactgggcttgtctctgcatcaaaattaaattggaagggaggaccttatttattattaatggaacttgaagcgctttcagctgtactacacaaattaatttattatacatacccaaaatttgaatatcaataatatgatatcatatacttaagcatatgtcgaaatgatatgatactttttgaaatcttattttatttttattaatttagtatagagatagctgttgaacggtattgtgggcttaaagctttacaagtttaataaatatatctaaataactttagaatattaatttatagtttatggaacattttaaaatatatatacatatgggtagcttatgcttgtgtacttttgaagatgcatatgcttcatcaaatttattaaaaaggagtgaaattgacatttaaatgaagagcacattataatttttgtgctcttaactttggcagatattaaactatgtttccttaaatttttcaagttgttaaaagtatctccaaactgttgagatttttagattttgtgaaatgttagttggttagttacctattgtacaagtgtcaagttagtagctctagttcggtatgttaggtaagttagttaataactaactcctagctt

SEQ ID NO: 112423 - DNA, 8989 bp, Cannabis sativa
  modified_base (190)..(190): a, c, t, g, unknown or other
  modified_base (1252)..(1270): a, c, t, g, unknown or other
  modified_base (8919)..(8924): a, c, t, g, unknown or other
cagaaagttatgtagctactgagatgtctgccaaatcagacatactcaattgaatacattaattatttattaattttaaatgaaatatatgtatattgctattttctctgtgcattatcttatgcaggtttctaattatttcctatgtattttttttattctttttctacaaagagagagagagagaganagagagagagagagagaatttgaacttggaaccacttttttgtgaggagcagtgtagtagtgtataactacaattatttcctacgtaaaatgcaacaactaacgaagtccacttttcaaaacgtttttgtaaggacaccgctagttatcttatcttaaggatcctagtcatgataaatatcatcacaaaaaagtattatgaatggtactaaacaaaataaaataacaatgaactcagttaataagtttggctccgcattattactttttctacatgctatatcttttcagtgcgacaagtaatagcaaatagacaaacctgtgtattctttacatggcgatcatgaatttcctgcacttgtttctcataagaacttaaacgcttaaacaaattgtcgatgacattaagtttgtgattatactcttctactagccgaagcttttctttggtagcctgatgaaacatttgtatcaataagaaacagaagaataacttttcacaaaagaaacgagaatgaaactgaacaaaacctattcaacagggggaagtaaagcacatcctcaacaaaagtataaaaaattcagcacttcattgaaaaatctaaaagcaaatttatctctctttatattcctagtatcacaagacaagtgtgataaatacggtttctacagtaagttatcttagcatatttgaaatataatgatgaaagcataaaggaaaaaggctagggcacaaactttattcacatgacttccacacctaaaaaataaaataaaatcactgataagtctttgaacaaaccgaggacaatttatgctgtatttcatctttccttctctgcacttcagtcatctttccaatcaaggatgaaatttgacttttcttcttagctaaaatatcccctaattcctccattttttcctgtaacatcaatcaattaatctacattaagatatctgatgttttaataatataaccaattggcatcgaagcaaccttcagcaacaccttctaaatcatgttgctgtgactaagtacaataataataataataacaacaannnnnnnnnnnnnnnnnnnaataataataataataatgaactgcacacggagagatatgtttctttgcaccaactagaaaattcagcaaaatgcaaatgttaaacttgtaaaggtaaaaagcttgaagatttcataaatttcgtataagaaaaaacaataaacacaatactcaaaacaataaacgagtaaaagtcaagcaaggaaaatttcaaccaaacatgaccatgtcaagacaaaatttgcacattgaaatcttttcagctcaatactatgttagagcccccataagactcacttattccaggaggaacaagaacctgtagctttcaaattgtaattactgatgtgttgagctagtttctaattaagctcactggtgtgtcaaacacttgtgttgtgattggccaaggaataagtttcagtcaaagatgccttagtagacctgaacatataaatagctaaccagattattgattaggtatctgaattcattttgagttgtagagaaagtaaatatactttctgagagatagcaaattatatcaaataagtttagaaattataaattatattttgaaatcaataaagattcagatttcctctcaagcattggatttctgtcttagtagtattatactagcagaaactaaaacggtaatataaatctagctgcccaaaagagagagaagagggcgaatgatataacagaagagagcttgagctgagagaaaagttgaaaaaacaatcacaacacaaacaaatcaaaattgctaccataacatagataactttaaaaaaaaaaacattttattgtttaagctattaaatttttcaattgctaggctttctaagtagaaaataaataagattaaagtattgtatacacgcttttagagttgtattttttttgtttttcctttacatctgacactacgacaccctctaaaataatcatgttattgtttaagctattcaacttttcaattgctaggctttctaattctaagtaaaaaaataaataagattattgtatacacatttttagagtggtattatcttttgtttttcctttgcatctgatgctacaacaccctctaaaatatgcataacatacaaaatcgtgagtttccaacaaacaaacaaaaaaggagaaaaaataattatcatgacactatagattatttttaagaaaaatcaattcatccaaacataaaaaagagaaaccccaaataaaaggccatacagtctaccaataagaataaattgctaacttcaagtaatcccacaattatgcaaaataattatttttttaagctatgatgaacagtgtagttgcaacaagataattttacagttgataagagtcctgcttaccattctacgatcaattttagattggataacaggtatatgacttttacgcttgtcaatgattacacgttgttcctgaaggtccctatctactttatatacccaagaccaagcgagcttcttctttaactcccgtaactctagcgatgctcgttcaacatgtttcatgttattaatcttttcttgcaattcattgagttccttctctattggtttaactgcatcctctaactcacaaacagtaccatttgcagatttcaggtgctgatcaatcatttccaaaagatcatggactcgctgaagaagagtagccttgaaaaagaactgagtaaaaaaagtgtcagagtagcatagttggacgagtactataaatataaacactggaagacactaccttaaatttgtccttgtcatttccagaatgtaaaaactctctgcttttgtcttgactcattattacacatggattttcaacatcaatctgcagaatacaaagcacaacagagtagacacccattaaacaagcagagatagtaccatctaactttaagaaaagatacaagaataatatttatgtagcttaaaaaattattgaatctttcatcttcctttgagaaaaagagtagaagtatgaatatcatgacattaaaatatgacatgctatacctgtgaactacaccacaatcataatgttttacttatgcaatacagccatccgtttgtctttgatcaacaagaagaaacaaaggctattattaataagatatcatctgagttacagcccagaagctacttaatatctgataaaaaaataatagctttgcatcaaattacagccataatgacatgtgctaccctccaatttttttggttcccattgaataagttgttttaaaattgaaactttattttacagtaaattcattaattaagttcaagaaaaaaagagtttctttgttaaatgatttttatttgagaagaatctcttcgcctattctctttgagtgatagtagcaagctacacattgtgaaagacctggggaagaagaagaaaatatggctcccttatacaataagtggggagcagagccctagctcaaactaacttaaagaaaagaaagaacagggggaagattgaatcttggaagagtgacccacttggtaccgatctccccatacgaggcaaagacctcactttaggtttaggaagaactcacgacttgagagctaagcgtcgatcagaggtgcgcagatctttattcttactaaatcctaccatgaaaaaaaaactaaaaaatccttggtgataaaaatccatatgccaccgataaatttactctatcctaaatagcacttgcttctataatgttaaaaactgctatttctctccggccatatggcataaaggatagcaaatatacctctcacatgcaccaatattctacttctttttctagaagtccccttttcctacctcaaccctccacttgcagcacaatagcttagcgatgtgttgactgtacccaatctaatccctatttattgtaaaaaaaattgccaagcatccccctcaaagagaatgtagaaaataaacgaatgctaaactccatgttctttctgcatatatctccaaaaaaaaaaagaaaaatcttttcgcatagttttttttttaaaaaaaaaactacttcgaaaaaatcaactcaaataacttgtgactttgtaaattcttgtgtgtgttgaatttgaccatccaaacacctccacttagaaggtttccatatgaatgtacatgagtttaaatggttacaccccttcatgtgtttaatttcttgaacattgatttgcaagacaaccctttcaagccatctaggttaaaacaattacatgaggatttggagtgcattaaattgtagcccaagaatcagtataccaatgatatctagctcattcgaaactaaagtaacatgagcttgcgtctgaaaagactatccaggaggaactaatgaatcaactacagctggagacacacatgtgaaactcttgtcaaagtggtaaaaacaatcctgaccagtgtggccaaaccgaagacagcttacactgaggtcaactattattactaggaaatctaccacctccaccaaaacaaggattgcactggaaaaaatgaatagcttgttcctcaagtgagacctccatgatatcaactatgtgtagtagagagtcgagaagaattagttggatattgagaatgaaaaggtcaagacgaattggttgcctccaaccacaatggtgatattggcttcaatagaagaatcaaattcttcaacaaatatttgagcacttagattgatttatgtcgaagacttctcaattcaagatccagatgtcagaagcaaagcttctatttctaaaactcatatccttcaattcgagtattagaagagataacaaaagtattatattcactatgaaagcctttaaaaatggcagcaacatgatctctggtactaaagaaagacttatcctattgaggttaaaagatagtttattttaccttgaccaaatactcattgagagacattgaaccttttttcaatttctaaagcttagtatgaaactccaaaatttttgttgaaacttcgaaagtgaaatacttcttcaaagtgctcaaaattccacttgaagtattgctactcaccattcttgtgagaatacttacagtcatcgaggacaatatccaagaaacaaggagttaatctttaacatcccaaacaatgaaggcccaattgacggtgttcgatgcttgatttgttgatcatcatctaaatggaactttggtggtaaagaaccttcatgaatgtagctttgaaatctattacctcgaacggtagcaaagacttgttgtttccacattagaaaattatggtcactgagtttaatcaaaagattatactgaattttactatataaacctcaattggatcccttgttgttggtttagccactatcagaagtatactattctgattcggcagtcttgagtttaccttgagtgccaagagaagctaaccacaaggacctgacaccatgttcaccattaatggcggaaaaggctctgatatcacgtttggcctcttaaacataatgaaacaaagagaagggagtagaaatagaaaagaaagagtttgcgatttgaaagaaaaagtcttattgaatgaatgaatgataccacaaggaattttatacaagtgtatagaaagcatatgttacaactggaaatagttatgacaaagttgtcataactaacgccaacagcacgcctagcctcctaacaaactaacatctactaaaactattccaattcaaaatgttgtctaaacccaatccatcaaactctttggtctacaaacaatctcccatgagaccaaatgactcctctctacccctatcactcctttcaataaaacaaccatcattcttaattctttctcattctacttcaccaacttcttgtgaatcctaatatgtgaagcaaaataagttggaagggctacaaaatgatttaagtttagtcctcccccacccatgagagagttaaaaagtgaatataaactaccaactaagcccatacttagtcgatgtgtgatcctatcactctcttccaacaatctagcctcatgttgattcgccaagcacaagatacctaaaatcaaatataggagagaattaccacctaaaggtagtcccatatagagctgcataatatttcattccccgtagtgtttgattagccaccttcctccagatttatgattaccattacacgttgccacattaattgaaactcccaatacaattacatgcacaacaaatgacaaaaatacaataagcaaatacatgcacaagaaaaaaaacatgctaataataataaccgtcaacgaaatctaagtgttacataaacatttccattgctaagagacaactaggctcatcaacacaaactacaagttaagcatgctagtatgtatataatgatacatttttaaaaaaaaaaaaaaaaaagtgcaaatgaaacaataaatactcacattaaaatagtctactagctcaagaagctcgtccttcttagaagtaacttttttacctgtcaaaggagaaaggaaaagatgaattaaatacccaataacattataccatttattagaacatgaattactctaatatcaccaattagttatgatataaaccctcatctttcttaccatactcttcctctcattgtctaaacactttcacacttaacgtccttcctttccacatattagaaactgcgaagctcgcaacttaaacagtttggcttgaaggaacctctcaattctcatataagattgactattaatctaaagatataaataacatatatttaagattcattatgtacttctagacatcgccaccttcaatccagctttaaatttatattccttaaccttaatattcatatatcaaactctcacttccatctaagatgctccatttagtttctttgataataaaatgtgatttttaattcaaaattatttttttgtcaaaatccaaagattaaacctactacattataattcatactatgtgaaggattgtttctagtatcaaatacttaaagaaacataaatcctgaaaaaccaagtttatctaacctcggcaatctttcaaaacagtggtgcttgcagattccgaaatcctgcgttctatggttatggtactaccatatgtctctggcttaaacgcatcatccccttcgttatttatttcaacaataacaacagtggaactgtaaaaacataacaaacaaccaacaaaaataagaacttgataggcaaagatacgaaagtaatattcaaactagacacccttttctactactagtacacaaaaccaaaaaaaaaatctataaagaaatatacaggctagtttctaaaacaataaataaacttccaggaagtgaatgcctacagtctcacctcaactaacgttcttagtccgtagttacaggaaaaatgtagcgattaaaatatgaaggctaaaggaaaactgaacacaaacctacaaccagttttgatgaaatcttttagcgttgaagccctttgagtccctttcgctcgacacccaaatgcaatacacagagcagtgaggacagcactttttccacctgaatatccaaacaatcaattaatcaataagcaaattactagcatgaaatcaagcaaacaagttaagaacaccatataaactcactcggcataaaatttgaaatttctccaactcaaaaacatccccatatataaaaagccccccaaaactatttataaatacgttcaaccatacaccttaaattctaagaacagagcgcgtgagagagagagagagagagagaggaagagccttacttccattttgaccagtgataaaattcacccggtcaattagctcaatcaccaaattactatggcacatgaagttctccaatcgaatccttctaacggtacctgctttggattgccgaaaagaagaggttccattgtcccccatgactgaggtgtgcttcttctagtctagggttaaaagaataagggagaaacaaaaccctaaagagaagaagctaaagagcgagagagtgcagaaaaggaaaggaaaggtcagtcgtccggaaagagaaaaagaaaaaatggaattgtgagtttggcgggaaaaatgttatgatgaaaagaaactgacgaagacgattactatttcctttttcccttcactttctctctctctccagtcatttcacgtctaatcttctctacttggtcttgcagaatttatttccatttttaccattataaatcgttttttattacctcagatacaaaattcaaataaaaggtgatgtgttataaaataatatagaataacataaaataagtaaaaagaaaaaaagaagagaatttcttcatcttcttcttcttttcttcttacttattttatattattttataacatgttatctgcatgagtcgttcaagctttaagtatgagtctctgctcaagtcccaatgtaagtatcttgttaaagttcttgaattgtttcaaagtcaaaatacactaaatatatatatacttatctgactgaaacaatttcaagaatcatttagtttcttttttttttatctatatatctatatattatatatatatgtatatgtttttatatatttattattaatttcatatatatattatgttcttannnnnnataatatttacaatatatgtgtctatgatgtgattataaaaaatctatataaattatacatatat

SEQ ID NO: 112424 - DNA, 3138 bp, Cannabis sativa
  modified_base (2742)..(2742): a, c, t, g, unknown or other
agaatcaagcgtaaaatagtcctaaaactagaaacaaagagtgaaaactaaccgaaaatacgtcccgaaacttagactaattttagcctaacaactatcatcatctaccgtctcatcaatgtccatctcaaacaaagaggggctttacccttattgatggacttaaaataatcctcctcagtagaccgagaacacaagttgttctttatgaccaaatgcaaacaagaatatgaaaaaatttaaaattcgcaaactaaaaatggatgaaaatgtcaacatgaaacacatataagaacttacccttctgttcaacaattgtgcaatgtcactcgtcgtcacgtcctatttctactgccctccttagttttctaatttatcattttagggaacctggttccgctacaatcaacatacttctttcctacttcctttatggcctcatatgctcaatactatatgacaggtatgtagccatgtacggtatactttgcctcctgagaaaccttcttgcccttcttcttctttacgttcttcttgtaatggtgcatgtccttactcatagatcacattaacttacaaaaagtacgctcgccccacagatacttgaaggagaactcgagttcatcaacaaatttcaacatgttcgaccaaacttggacattgccttcttttgaaaccaacacacccataacaaaagcgcatagtccaagcttgtacacatcatctgctatctcgcatctctacaactagagcaaaagtgtatccaaatgcacaccactattcccttcaaaatacatcctcactaaacggtcaccagacttggcttctatctcttccgctataggagcactacccataggtaagccgataaccatatttcatcttcgaattccttattaactttcattttctataatagtaggttatggaccaacacgccatagaaattcaaatttctagattcccagaatggaccgaaagggctggccttacccctccaaatcaacttgagtgcttcaaacttggtcttaatatctttaaacctatttgagccccaataggtaagacaacctgtgaaatgctctgaaattagaagtttaagttcaggaggagccatttgcaaaaaatttaagaaaaaaaaagagcaacatattaaaaccaaaaatgacatgtcgctaaatatcgcaaactatatcgacagcatattgctacttgtcgcaaactatatttgcttcctatcctagtgtagctaatatcgtgagaagttgtaaactatgtcgagaaacattgctatttacagaaatccccacatcaccccaaacaccatatatcgcaaaattttgataaaatattgctacttatcagtacctatatttgctacatatcctagtgttgttgatatcgttagatgtccccaactatgtcgagaaacatcaataattatagaaaaacctagaagtagaacgaccaacaacaaaaatcaaacccaaacacacaaatttaacataaaaatcaaactagtttccttaaactcaagcataaacaacaaaacaaacccatgattcgatttgcaaaacctaatcaaagaaaaatcacaaaaaaaaaatcaaaaacttatcgaataatggagtttaatagagattggtgtctcgggtcttccaatctacattgactatgtcaaaatgtaggtaaaatagcaatttggtctcgattttagggctttgggacggtggtcttgggtttcaggggctgttatcattggttttgggggcagttctcatgggtttcgattcaagaacagagaaagagtgtgaaatacggagaggcccataattcgtggtggagacggtggttggtgatggtggagcgccaaagacagtgagggggttagagtgagaaggagcgagagatactttgtgagatggaaagttagagtgagagtttgaatgggaagggtatttgttgtaatgtggaatataaagagtccatgcacaccatataagtatggaatgtttgttataacttatgcatgcttgcagggggagttcttctctttacttatttctaacatatatgtgttgcatgtttttgttttatttttgtctatcaaattaccaaagggggagattgtaaaattctttattggcatatttaataaaatagataaaaataatatttgtggtatttttgaaaaatatttttattttttattcattatttttaaaaatatagttttattttcttagtgtgaaaaggctttcaaaatcaaattttattccctattcactttgtgtgaattaaatatgagttttccttatttagaatatttgattttatctttattttttaaggaaattcttaaccatattttattctttttttatctgatttcttaatcaagaaaccgtgtacaactatgtgtgttaatatagtcaaagttgccttatttgcttatagaaactttgctgaaaatctgtccaggttcattatacctgtttgaacggactggctatctgtttaaatagattttgactttcctatgtgggacatttttcatttattgacttgattgtttcttggttgctcgaccacgacctagatggtttttaaagtttataaacacacccttaggtcgctgattttggttagcactcttggtgtatcatttcctaaattactttcaaagttagagagtttttttctttgttatgtgaagaacttgagtccaacaagttcttagtnttttattattgtgttattctgtattgtttcttgttgaaattgtgcaggttgaacaccttggatattgttcatcaagctttgggagaggtcttgttcgtgagtcactttttgggaggaaaagtgcaagtgagtcactcttcgggaggaagattgcaagttagtcactagggctgggcatttgtcggtttggtcggttttttctatataaaaatccagaatttggttttcgatccggattggtgcaatccgaaaactgaccgactaatccagaacctgtattaaaactgatcattttgaacctcagtttggtcggtttaaaccgcccaaaccaaactcttttcttttttttttaaaaaaaaaatatgatctaacttattctataaacacattattcta

SEQ ID NO: 112425 - DNA, 1531 bp, Cannabis sativa
ttttattattcattattagatcaaaatttaatgatttaatatttttaaaattaatatttatagttaaatttgtttcgtaacccttcatggttaatacccattaaaaaatatccatacatataaatattaatttaattttaaaacttcagaaattcgttatttaagaggactaataaatcacttgttttgaatattaatttagtttgaatctttggctaaagaatttaatcaaattgcccatgaaccttcataaacatttaaaattatcgtttagtcactatttagagccggggttatgacaagaataatggtatcactaattacattagcgtacaataaataaaaaaataagtaagttcagatcgtaagttcagatcggtaatcacatcacatgcagtagctattatataacatttgcttatcaagtaataatagtgaattaattaatgtacttactccctatattcctatacttttttttttaaaaaaaatacatatattcctattagttggtataataataaggttgtataactattattatagagtaatttgtgatataaatatttaagtataatttttagttgtaaataaatatttaaatttaatttttgatggtaataaaatttaagttatatttttggaactccgtaagtacctaactatcaaacatcaaatcattatccacgtataatttttttattgatatatttaaattaattttttgtaaaaaaaataaaaaataaataacatggactaattagagattatcatatactaatttacttaaaacttaataatcaaatacttataaaaatttaaaaattataatttaaatattattattattaaaaattaaatttaaatatatatctataactaaaaattaaacttaatatttatattacaaactactcaattatatatcagaaagtttcttatttccgacaattaataagttagtgggatgagatgaggtaatatttagctgtttcttcggagattttcatacacattttcatatttaatattgtacaataagacaaaatccactgcagaaagtgttgctaatcaaaacaataataattaatggtggccgtctttctcatcgtctcctcctatatatattcttattagttcttacagctatattattactactcataattattcaaataatgaaataaatttggaaagataagattaatattatacggatcatcatagtagtaatgattgaaaattatattttagggcattttatatttatatattttcttaaataattataaaaaaatgtgcaaaaaaacacaattttaaaaatatacacatttgaaatcatatttacaaaaattcatacaaattcttaattaaattataatagatatattaatgagtcaacttactatatataaatttgtataactattcttatgactaatttatatagtattaataagtaagcctactaattacataaaattgtaaattaataattacaaaacataataagatactaataataaacaat

SEQ ID NO: 112426 - DNA, 3309 bp, Cannabis sativa
  modified_base (3281)..(3283): a, c, t, g, unknown or other
taatatcaactcactaacaacacaaataaatgaattaattatcctcgcacaattaatatccaaacgaaaaattaaatactattttaaactggatattacaatgtatatactcatcaatagactagactggagcctcgagtaacaaacaatccataaaacatattctcaatttgagaagcaaccgttcaacggaataacgcccatcatcgatttagagatcaaatttatgagccaactcaataggaaagcatcacacattactactacaaaaagatcctattatacattggtcaaccttgaaaattgacacaattgattacttttattagaatttaggattgtatggtaatatgtatgtggtttcaactcaaaattaattgccaatgagagagtagtttattcattttatgtatgatattttatttctacacattagcaatatgagactaactctaatatactcttctcacgtttggacctaaaaagtatgggtataacgaacgacatttatgagaccacaaggtttaagatgacaattgaaagaatcccacaaggcaaattcaaaaaatttgtgggtgcacacgtcaggaaatttgtagatttagaaacatgtcaaagactcaacattagaaattgacacacattggttgaaaggtctcaaattgagattaaaggggagacaacaaaagctttttgtttggctctgataccatattagaatttaaataagctgcacgaggttccatctcaaaaccaattaataatgagaggagcaactcattcacttatatatatatatattttatccacacattagcaatgtgggactaattataataacctttaaatttttgtgtcgattttcaggaaaacgagtacgaggtgtagtgttgagtaagatacctttgagattatgtgcacgtgttgtatggagaacaatcgattgacaatgcgggtagtttgtgcaatctaattaattgaataatgattagaagcaaattgttgttgaatgaatacaaagtcaagactgaaaggatgacaatgtgtgctagagctagtggtggtttcacgtcttggttcatctgagctggtggtggtggaatttgtggatccttcaaagctggtggaggtatgtggcatgatgttgaagatcaaagccataactctgataccaacttgaatttagagagaaagagaaattggatgtgaaagtgaaatgtgaaaaataagctcaagctctaacgagttggctttgcttttattttgattaagagtagattacttatgtcgtttgaaacgtatacgtaacaatatattctgatgtatgaaaaaaattagatatgggtattatttttgcccctattgagtatatttcatattttaattcggtatataaagaaattataaactaattttttattgattgggaaaggtcaaatgtgatgattctgagactgtgtgtaggtatgagactacacagttgaagatggcttaaatggattgattggtattacctatatcaacaaggtgcatcttgttttttggtagcccatcacgaactccacaattaagtgtgcttgacctagggtaatttaaggataggtgatcttttgagaagtttggacaagaagtgtgtgagtaagaataaagtatgttgttaatgctcgtgttggtctgtagggccagtcgtcagtccatgaagcagcgaagagtgacatactcgtgcataagagccataaatctgtgggagaaggcccaatagaagcttgaagtagagacattaaaaattgtatgaaagccttgacctagccgaaagtgtgatcaatgaggacatcggactccgtaaggggggtgattgtgacagtcactagtcccttgatccgtaagggaaaatactggataatctatgcaattccacatcagttggggaaggttaagtgatgattttgagactgtgtaggcataggactacacagttgaaaatgacataaatggattggttggtacgtcctaaatcaacaaggtgcatcttattttttggtagctcatcacgaaagaacttcatatatagttaagcttgcttgacctagggtaatttcaggatggatgatctgctggaatattttcctaaaaaacgtgcgagtgaggataaagcacgctgaaaacactcgtgttggtctgtagggccagtcgtcagtccataaaacagccaagagtgatgtactcatgtataaaaatcataaatttgtgagagaaggcccaataaagacttaaaatggggacgttataagaaaatcaaaatatctaatattacaacaattgtcacatatatataattaagatatatatcttaaatgcctagtttggtatgtcaaattggattggactgagctattagttaggattggttttaattaggattggttttaattggactgcactggattatattagtactatactatattcggtaagacagaactaaacagaggataatttttttaatagcttttaattttgtagttaataaataattaatgagatgtaaaaagtagaatttctgtaatcctgcctaagaaaatgaggtaaaaagatatagactagtttaaacaattactgagaattgtttaacaattacagagaatttagatatttgtatatagcaaagtttttttaagctttttttggtgttgttaggatttaaagatgattgtagtatgcaatacaattagttgactttccttcccccaccttaaaagaaaatatattattaaataaatatttaataaaataaataatttcaatgaaatataataattctagaaatttattaatattttatcaaattataatttataatttattattctaaaatttaaaattcatattataaaaaataacaaataaaaaagaattaaactatgttaataaaattttaaaataaagttaatttcattattttcttttttacaaaatagttattaaatataatgcatatgtataaatatgtatattttaaatctaataaataaattacacttaggactatctcaattcatgagttaaaattgtcccaatcaaggataaaatacaagtttgagataaatttatccaaatcctcaaaatttttaaaaaacaattccaaacatgagtttggactatactatccaatctcaaacatgacttaagtgtcaaattaaacaaaaattgttcttacaataagagtaaaagtggtgtcgatgacttaaatgctaccaataaatatatctttatatattaannntgtctatctaacggcaattcttggtt

SEQ ID NO: 112427 - DNA, 2627 bp, Cannabis sativa
ttctattttaccagcgcaataccaacttttgccagcacaaaaatattctggcaaaagtgacatttcttgtagtgtgcccagttgagtgtgtacaggaagctttgtgacgataggctttgtgacgatgtttctagtagccaccattgttacagatataatttgcttcaaaattttccttagatcttaatgaaagcaccaaaatatttatcgagattttcaaaaactcaatataattaaatgagaactaagaaaataaatcaaatagataaaatagagatggagattcttacatgatttgggtattaatgaaccctagtctacgaatcaattatattgggctaagtagccttgaagtattacaccggtgttcttgacaagcttaagaaccctagcttttggctatagtatttgagtaatgaatttccaaccctttgcatgaagggataatgtagtatatataggctaggattcaggtatgggtatacccgagacccactaaggtttacgtgtaaacatagcccgctaatggattaaatacatataatacattgactttagacccacaaattcaggcacaacccgtggcgttgtgatatttcgtacggcaggggaccatttaatgctaacaggtggcatgcgtttgttgtctttgtgtactgtagctgtcagagtagtggccatcagacaaagagtatcttccctttggtggtgcgctcactttgatggcttgacgtaggggacaaagccctgacattttgggattcttcggcagaagattgccacatcagcctaggcttttggggcatctcttcaaaatccctttcgaaagcatcccaatggcttatctagagggtatatgatatttcttcttttctagatttgatgctttcccgaacctaaaaagatctgagttggggtgtaagcggcttgtatctcgcatagacctgcgactcatctctttatgtggacccatgtcattacatcaaatggacccgtgtttgggcttcaattgactatctttgacttgaatatgctacgtgtccttcttctggaaacacatataacattagcagctaaagattttgccactaatattcttgcctttcactcctaattggctcaaattttgatctttccaaagaaagtgttgaaagaagtggactcaatttgtcgttcctttctttagaaaggtgttggtcttggacaagcggcttggaattaggtatatagttctaaagcttctggtggcttaggtttttgaaatattttgaattggaatgtggtggttatgggagaatatgtttgaaaaattgctacaaaaaagataatttatgggttaggtggatccatagtgtgtatctctataatgaggattggtggagctatgttgctccacttgatagtagctggtattggaagaagatcatagttgtcaaggatctttttaaacacaagatggctctcaacacatttgtagcaaatgattatagtattctcaacctgataaagtttcttggggcaatgaagtgtggagtaggttgagtatgccaaagcataaatttattctttgattggcattccttgaaaaacttcccactaaccttgttatccatatttaatcataatattggtaagatgtgcttgttttgtggtgatagagaagagtgtgtgcaaatgtctcagtagcattaaaacatggcttggatggaatgctcattcacataggcttgatggttttcttcaatggactaaggaattcgtcgttttaagagacaatttttgaatgctgatttggtagctttagtttctcgtttatgaagaacgaggaataatggtttttggtctctagaagtgtggcagtttattcatacttctcaacaaattcttactcattaaataccaaattttttgtgtaattcctaagaaaataaaattagcatataaagattggtttgatttgatttgtaatagcttttaagagttggtttacactaccaaaaagctatttttagtgataataatttagtcacaatacaattttttttgtgattaaaagtaatttttagtttcaataaaaataaacttgtaactaaaatataatatttagatactaattattattaatttaattttagtcacaataagtattgtgaataaaaatacatttaatcacaataaatagtgatttttgtgactaatacttttagccacggactttttaattataacgtacgaatgataatttataattaatcataattttttttacttttaatcacaaattttgttttgactaaaagtaatttttttttttttagtgttacggtatatggggtgcaagggtatacaagtttagatgtgtttctgtgtaaataaattgcaattgaagtttgatcgatcttactttccaaacaaaaaaaattatctattatcattatttacaatgaggttattacgctgagaaggcaatatttcagttttaacattaattagttgaaaggaccttaattgatccttacaaggtgttaattgatttcctgtgaaattatgtcacttaaggctcgtttggaataccgtattaggtcgtattgtattgtattatattgaattagattatatatcatatt

SEQ ID NO: 112428 - DNA, 1934 bp, Cannabis sativa
aaaaaaaaaaaaaaaaggaatagaagaatggatcacttatcgtttgaagtcgagttgttgtacgatgaaaagttctgcaaccgaagacggattgaacgacgtgatgatcttcatgaactcttgaggtcgaacagtaaatctgagtatacgcgcaagaaaaacgccagtgacagtgagggcatgcaaagcttcaaaaaaatcaggataaattttttcacagaaaagctctagaatttttgaaattacgaaaatgatgaaaaggttgttcctttttcttttttaaaccattgggtttgatctccgttaaattaagaaacaaaagatccaattgatagaaatcgagggagaagtgaaaaagatggctcattaatgttgtgatgtgctttgaaaacataaaccgccaaattaaagagcatgcttttttcaaaatgaattatgacaaatataccctcagtaatcatttaaaaagcacttttcattgaaaagaactttttaatggacaattgttatacccgaaattcggctatacttcataaagtgacacgcgtcaatctagtgggataagatccaatagatttaatgataattatgtcattaaatgcaaaattgaataactcattaaatatagaataaatagagtacgttcatgacttgttggctgtataatcttaagtgatacaatgatatacaaactatcaattcatgtattgacaagaaaccatcttgcctcggaaggattaatatcgaggagctataaatgcacagcaagacatctatctcgctgaatgtgaagaagtatcgacgaggcgaattgattattggaacactaagcatataacctacattataataactaagtgtaataatttgaaagacgtgattgtccagtctgcaagagcttttggtcaaagagcagttcttaagtttgcttagtgctcatgtcattggtggaatacgagtaaactaagtcactcacttatgtactaggcgagacgcctcagcgagatacatttggcagcgtgtcctaatccatatcagcgttgaccgccttaaagacggtttaaatcacagctgtgtgattttctaatattatctacacattttaaaatggagtgtacttaaaacccacaatttcgaggaatattattatgggattcgaatttaaatataattaactacatacctatattactataaataggaacagattatacaaaaaatggggacgaaaaatcttaaagagaaaaaaggagtatactaattgtaaaactctaattctgtatccaaaaatatatgaataagatagactcgtgaactctgcagagttaactgcaaaaccacgtaaaaatctagtgttatttttgttttctattagttttctcaaatttcttataatttctgtgacaaatctgttatgaaaataggctcatgattgttaccgaaaatttacattaacaagaacgcatttttgtttttcaaaaataaaataaaaattttacttttattttgtgattaaaaaataaaaaaataaaagtgttacccgacatctaaatataaaattttttatttctttttaatttttataatcattcaatatatatattttataaatttactaaaaaaatattcaatctttctcaattttaaatagaaagctacaatttaataattgtcaaaatttaaagaataaagctacttatttataaaataaataaaaataagttagcattgaaagggtaaaatagtacaaaatctaacaaaataatgtaaaagttgaagaaaaattattaacaaaacattttaaaggaagcaattagatagtgccatgagttcttaattaaaaatactaattaatctatatattaaaaaggaaaagagaaaagaaaaaagaagggtattttgggttttgtacagaattatagggcacctaccat

SEQ ID NO: 112429 - DNA, 5605 bp, Cannabis sativa
ctctctctctctctcacatgcctattgctttgctcacacttgagatttgccaactctaattctcatattgtaaccttaagataactagtttagctcccatatgatctaagtagtattatctttggtatcaatacaactaaaaggggagtaggtgattatccgttaactaagggggctaaacctctacaaactcctgtgtttatttactttattgttctaattgtgtaacatgtggcaagcattagcattaaatttgactctactgtcggttagccaaatctgaggtcaatagcttcctttgagcttggctaaacatgatatatgatagagtgcttattttgaattttttttgaaacgtacgggtttgttacaaaccgttttgttgacggtgaaaactcagcaactaacttaaggttagaaagtcaaaactcaaacactagacttacaatgaagatgaagatatgaaaattcaaaaacttagagaaatgttcacataaacaatggaggaagagaaatacttgtatttcttagagtgaggtgttacaatgattttccaagcccttctcacatataagaaatgggtgtttatacgccctaattgtttaggtctccagtctagaggctgctgatggtggtcttgcatcttgtacctttgtctggtgtcaggtggtcccaagttgaatcagtagtggttgttgtgcatacttggtcgggatgtaaggccttataagtgtggtgcctccactacttgtaccttctttacatcagaacttgcaggaggtgtggttgtactcatctcgtatgcatgccttgtccttgtgattgtaccccattatctggttcttcaatacttagacaaatttcactaagtataactatggtgttgagaagagcacgtctagtaactcatggcacgagccaagtgacacttcaccatgcatggcctagtgacatttcagtaagtgcatgtcctactagccttaattctagggtttggcttactggccatgtttcttggctggaccgagtggttccaagcttaactttgccaactaacctcttgaatggtcattgctgaatgacattactatgtatatggataagtgacatctccatgtgcatggctaagtcacatgtagagaagcatggccgagtgacatttccattgcatggccgagtgacatttccatgtgcatggctgagtgacatgttgagaagcatggccgagtgacttctttaatgcatggttgagtcacttttcccttgcacaatcgagtgacatttccatgtgcatggcaaagtgacatgtcgagaagcatggccgagtgacatgttgagaagtatggtcgagggacttcatcattggatggtcgagtgacatttccatgtgcatggccaagtgacttgacgagaagcatggtcgaatgacctagttgaaaccatggccgagttaccgagtgttaaactgaaaaaattgacctcagtgatgtgaaaatcaatgtttgacatgttataagaaaaaaagcatctcagagttgagtagtcctgagtcataaaagtcaacctgggaggggtccctaaccctatgcccaggttgactttgggaactccgcaatgggtgtttggatttttccagttgtatccaactcattatcttttagtattctataccataaagacatgaagcatctgagcccaaggctcaagagttgaaaatacaagaaacaacacaacgaaaattaactcaggtgcttagggtttcacccaacgctcacattgacaactgaactagggttttagtttctgggatcgtcttagtgaaaatagggcaaactttatactggacttgagctggacatgtcacgaacatatttggggcataataattagattcatagaactttcttttttgagcacccagagcaccaagtgccctaggcacccaacgcttaggttgacaaattctcaacctgggccgctaccaagcatcaaacttcaaatccgtctcgggaattttcattgtcttcatcaaaaattaagaaaaaagtacttttaaggaagacacaaccaacatggaggccaaaatgagggaccagcacccaggttgacacttggtgctggcccagcatccaggatgatattttgttaacctcagcgaattctgaggagtttttccaaaaagtcttctttgaatattattcatttttgtcaaagattaatattcaagtattttttttggaggaaaaagaactttttaagggcctgaaactgaacccagagccaaggttgacactaggcactgggcctagcactcaggttgacatattttcaacctgggttgtttcctatcagtttcatgaaaaagtatttcgggaatttctttgtcatcaaaaataaaaaagatataggtaaactaagggagaaaatgaaaattctaggggcatcaaaactgacccagcgctcaagttgacaatcaacctagtgcactaattttgatcactcaaatgaaaaactttctctgagcattctctctgacaatccgaggtaggacacttcatcctagattttaggaaccttggaagtaacaaagagacaacccagaagctctgctaagagcacccagtgcacaggttgacatatggccaggtgcactaggttcttcttatccaattctgattccatctcaaccatttgtctagtttttaatagtgtatgagagcgatgaagttagaaaagtcaaattcacaacttcatatattcatttttttggtaaaatgacttattcagaaatcaagttgtttcgagtctcatgttttcgctaaataggaacatctatgagaactggtgacaagcttcaccataacatagaaattggctaagtgatgtcaaaatatcacttaggcttcagaaattacatcctagacactattttcccttggcccaccgtctaggttgaaatcacatgttaacctgggggttgggagcagaacgatcttagtaaaacaaccataactcactgaatattgatctgattgacggggttcaacttgaattttaaagatatttcaataatctatcatgtcatttcgtcactccaatcacaactttgaagttatcaactccaaattttatcctcaatagagttacaaatttaagctacaacttacacgaagtcggtcccatggaggcaactcaagtgatgaaattgacgaccgacctccttagtcaaaataatttaaatggatcatttaatattttttggaataatttattattattttagtaggacctccatccttattagaggaaagctccactagctcattttttaaattgaaaaaagtactcgtaaggatagagaatctctctatagtttctctctctagaaattagagctttcacagttaggcaatcttcttgtaattctcataagaaataaaactcgaaaaagatgtagcttcattactgtaacgatacatcgagtgaactactataaattccttgtgtctctcataaatataattaacttagaattcattctcgccaatctagtgagtgcgtgtggcctagatatctatgtctagattatgcattaacattttggttctttcattgagatccacaacaactagccaacagattgggggcatgcaagtcactgaagttggtgatgagactacattagcatctcaagtgccaggtggagaccttggaactagctccacaacttgtcagccaaggctacaagctgctcttggtactaacaccactaagcaaattccacatggggaaccacatgtggaattagaagatcttaaggagggcgatcctcgagttgaatagcttagccaaaaaacggcttaattgcaacaaaaattatgagattctctcaacaaactacacgaaaaatttcaaaactagttcatggagaactggcaaaatatttagaatcaacgagctgaggagaaataaggaaggtataacttgtctcaacaaattagagaagcttatcatcatgaaagaaatcatgtgaaccatgcaacatacaatgatttctgatctttcattaattaataaatctgattatattgaaatgtgttttatttagggaaaaaacccaacaaactcccacttgcacttatataaaactgatagtgcatttcaattaatctcaaaccttgatatccaaatcaagtgtagtacgcagtattatctctataataggatctaacaggttgtattcgatacaacctttctccattattacatctccttaatcacaaaatccttaatattgtgaaattcttctcaacatgcttactcgtcttggggtactagattccttactatttggaaactatatctgtattaatcaagaagtaacactagtggttaatccatgattggaataatgccaaagtagtatagaacttttcataggctaagtaattatctagtagccttcttagccagtttaacattgagcctcactagtagagttagagactctggattggtttttacacttctccaaaatcactgctctactcacggagtaaacaccatctcataagtagactttctagcataaatgcaagtctagaaaccttattttggtgtagtctaagagtattaaaataccacccttatcgactgtaatcccaaattttatctacctaatgtggcctatcccattaagccaaagatagagtacaggtggagtaaatccccgccgatagcaaaatagagcctccgtacgagatatagcaaaatcatgaagcagcaactgaagggagtaaatcgagctcacaaggagcagtactaacatccttggccaacaagggtgagcctataagctagccaggatctgtacataagttagccagccaagaagtgactttcgtacccaaggacactctgttcgaccaagggagacttacattttcaaggaaataatgtagaaagttttcctcaacttgcaaaaggctatccaccacactcaaaggttagccttttcttggtgaagctctagtgacctaccagaccctgcaggccttgtcttgcaaggtctttgcaggaccatggctggccaggattgacctgacaggaccatggccgactaggattccttgaaggcctatggatgacaaagattgagttggcaagattccatgtacaactctacacgtggaccaaaccatgggctgcgaattcggccctaaaagcccaacaaacaggcggagaagtatctagaatctaagggcatttttatcttatgtaaatgtcgagctaactatcctagtctcaacggatttaagttgtaaaacaaacaggcagagaagtatctagaatctaagggcattgttagtcgaggcaaacttggcactcgcatgatcttttataaaactaagcatgcctatttcgaaaaaaaaaaaaaaacaatacacatgctagaaaaccatccaatatggaagatacccatagcagcatgcctccaaacaaaaaccttgcaaaaaagtagggaaaagggggatagttgttgggtgttcaatcctagacaacgtaatgcacatattgttggaatattttttaccaggatcttaga

SEQ ID NO: 112430 - DNA, 3456 bp, Cannabis sativa
  modified_base (683)..(683): a, c, t, g, unknown or other
  modified_base (2818)..(2825): a, c, t, g, unknown or other
aactaacactacgtggcttggcacgtaacaatgacctagtatatatatatatacttaaaaatttaaaataaatttattttaatttgaaaattatacaacaaaataagaaaaatacctgcataaataatttttgtaataagtaagttttcaaaaaattaaataaatttactaacagttatcattattttatttcattgttttggagattatcatatttttaataattaagctttcacaaaataaaatttttggatctatcagtaatggcgaaccacatgaaacatgacacattgttttttgtccacaccatatactcattaagccatatattgatatttaaatgaagcatgtaacaagcatgattagagcacgtgccaatgactggccacatggcaaaaatttagtgggcctttttgtaataataaataaaaaatttaaatgatttttttatttatattcacccagaaaaaaatgattttttataataatgtaattcatacaaaaataagagaaaaaataaaataccatttatttccaatatctaatcttcaataaaaatacaaaaaaaaaattaatatattaatcaatatgataaattatacatctaaaagttaaagaacaaaaataacacaaaaattaaaatcttggtgctctagtcttcttttatataaatatatatatanatatatattctatataaagtgtggctatataactgaattcttcgtttatgagaaattcatgggttgactttttttttaatatttttaaaatatttcaaatatatatctactctatataaaatgtgggtatataacagaattcattaatgtgtgactttttttttttttttaagttttctattcaaaaatgttaaccatcctacgattttcttttattattttctgtaaattcttaatcgaaatctcctgaaaaatagaacctcctcaattagtcccttttcaattttggaggcatttttaaatttcaaagggtcttccaccatctaacaagggtagtatatattactagaggaggtaggtaaagagttaacagatttggccaaatggtaagtcgattttactgtgaacaaaccagaggagtgatgctcccaaatgagagtatcctccatagagacatcggcaagaggaacagccaaaattgcataaaccacctcatcatcaaagtatgtaaccaatctgtccttattccaacaaccatcattgttagtgaaaaaggaaacagtaggatcagggggcaacattacttttaaatgagataaacctccagcctaggatccaataagaattaacagaagagatggatctgccattcccaaccttccacaaaagacctcttttaagaagatctctaccccaaagtaaattacgctaagtgaaagaaggacaatgacccttaggagcctcaaggaaagagttttgccaaaagtatttggcctttaaaagtctagcgagaagtgaattaggcatagaaaacacacgccagacttgtttagcaagcaaagcctgattatgatgcatacaagaccgaaaacccaaacgaccagaaaattaagattgacagagtttctcccaagctttccagtagaatttccctttattacctaaagaaccccaccaaaattgagccataagactttctatctttttacaaatagaaatagggattttgaaacaagacatagcatatgaggggatagcttgaataagcgctttaagaagcacatctttaccagctctagagaacaaatggttagtccaagtgctcatttttgaatcagccttctggagaaagaaattaaagtgatcttcttttgatctaccaaaacactggggaaaacctaagtatttactaatgaaagacttattatccaggcctaaagtatcacagaaaaagtcagcctcagaatcacatgtgtttggagagaaaagacctgaggacttggagaaatttacaagttgacctgtggctttatgatacatttcaagggcatttctaatagcaatacatgagccgacagtagtagtggaaaaaagaaggctatcatcagcaaaaagaagttgggaaatagtgggagcagagcggcaaatagatttcccctggaagaggttattatgctcccgtaagctaatagcagtagataaagcttcagagagcagaagaaaagtgtagggagacaaaggatctacctgcctaatgcctctagtcgaagaaaacttatcagtaagggagccattaataagaagacgaaatgaaacagaggaaatacagttaagaataagactagtgaacctaagaggaaaacagagatgttgcataatagccttaacaaactaacatgatcaaatgccttttccatatctaacttaagagctacccagccaagcttacctgacttcctatgattaaaaagaaaatgttaagctaaaaatatcccatcacggtgcaatatctttggccgactcatgaaatcagtttccatacattacaaaagcaataagatcgtctagagttcctttctttccataacttagctcggaggcacaattagaattacatgcacaaactttttaaaagagcaaaaaaatactttaattgtagtttcaagtgatctacacttctatgaataggtaataagaaattctatgactatctaatatcattaaaagaagggtaaatgttattttcgatcctgtgttttgtaaaagctattaattgaaccctctaatttgttaaatgaagaaatagactttgtattttttataattgtacaaataggatcctgaactgatttttnnnnnnnntaaaacttaataataatctaatcttgagatgttatgacaaaacaagttatattttctgtattttttcgtgttagaaattgtctcaaaattggttatattaaaaaataaaattgttgaaaattgagctcaggatcttatttttactattttggaaaatatagggtccattttatcatttaataaaacagagagtgcaattaattacttttggaaaacacagaattcaaaatggtatttacccttaaaaaattatgaaaatgaggttctcaggttcttgagctttttccaaaatgacatatgttaatcatttaaaaaagatgtaaaataaatagaagaaagaagagacacatccagaacaataccttattgcatccataacacaatcaacgaaaaagaaataacaattacccgtaaataaatattcatttattccaaagaaacaatgtgaacaagttcccttttaaattaagtcacaagtattcaatattgatagataaccaaaaaagtgagaaaatgaaatcaacatatatattggcttgaaattcataatcgttttcttcaaagtatacacacacaaaatacaaaaaaaaaaaaaaagtcaaagtgtgaggttatttttagtattaattta

SEQ ID NO: 112431 - DNA, 5916 bp, Cannabis sativa
  modified_base (1304)..(1304): a, c, t, g, unknown or other
  modified_base (5886)..(5889): a, c, t, g, unknown or other
tttgcttgctttgttcatctccaaacattgggatcgtgcacttgagcacccggcccattgtcgagcacgactctgccccacagattgattagttggcccagccctggggcatgagcatccctttctttttgcttgggttggtcagttgtggttctattgtttagtggaaccttgtttgccgattttgttgaagagccccaatgacatattttccttcatcatttgctggggcagacagaccaacttcggggtggttaaatcgtggggtaggaatgtcttcctctgagagaccaactttcactcacagtcgcgccaaggttttttgaaatttttaggagaattcttcctactccgcagtctcttttgagtttcaatgagttcatgtgccatcctcactacctcaggatcttgctcataatactcttcttcgtactctttattgtagttctcattgtggtcatcttttgggtcatctccatgaccatctcgcatatccacatcgatgggatactcaacaacttgtttatcgcaagcttgggtttttagattcgggcgattgcccacttcagatgcttccttgtcccttgcaacacccatctgagtgtttgtcgggggagctagttctcatcattgttagcgacatcgcccttaccatcttgagttgacagtttgaccattactttgcgtgttacaaccattgttgtacatgacaactgtggtaattctttcttcaactctcaataaaagcatcaaaattgtaatacctcgaggtttaataatcagcaatcctaactcgattaattatgtattattgaggaattatattattatataatttaatatgtgatacttttatcgcgtattgcattttaagaccccgttagtgtgataggggcatttttcgtaattatgattcgagaaggataaaatcataattttatgatataatgtgtttatagactatattattatatagtatgtttactctgtcgttctgtaagtgttttctgacaagtcgacgtggtatagtcacaatcagatattttgagctgaaccgggttcgaggtctaaaatacttttttatttttggcatttatatgatagatgagaaaatttaaattattgtgatatgggtgtgtgtgttgaaatgataatattgccattgattatacgagtatggatatatttggctctaggggtattttggtcatttgaccacgtaagttattattcaacaaaatcaattattgaaaattagaatttcattttctgggttttgaacccccctctctctctctctctcnctctctctctctctctcaattcaattgtggaagacaaagcttgaagttgtgtgatttttcttgcctggaaacttgaagaatttaaggtagctaagttaatctctttttcttgttttactttatgttattcaagctttataatggtgtttttgtgatgctcttgatgttgtttcattgtgaatgcatgttggtgaggtttaagaaggaacttgatgattattgttgtttgagctattgagattatgtttattgcatataggttgttttggatgattttaggattgataaatgtggtttaaattttgggtttgtgctctgaatttttgggtatctcttgaaggtttgaatgattggattcaagcttgtgaattttgtgtaatggtgttgattgtgtatcatacttagtgatgagtataaattggttatcttgagcatatatatctgtggtactaatgcctggaaatacattggtttaacatgatttttgcttgtttatgacttaggtgaagttaggtttgtgtttaggcatttttaggctttaaaaatggaatttctgggttttctggacttagtcaccgcgaccaagtttggcagatggtgatgttactcaagttcagcagcttcccaacgtgtttgagtcttaacatttttaggtaaacatggtgcatgtcttaacacattcctctattcatgttactagttgtatttttagtatagactctttacctactgaaatttcatccttagttagagatgatttgatttaatgaagatgcatctttctttcataaaaaaaaaaaaaatagaaaaaacacttaagatatgtcaaagtaatgatgcttatcgtaggaagcttcataaatgcaatcactagagtgttggcgaagactcctccaatggtggtttgacaacctcactcaataatggtggaggctgaacgtaaatcaaggagctaaagctactgtcaccacatccagacaaagaggggcgaggaagaagaagaagacgacagagtttgagagagaaaggtgcaagcatgggtgtcttcgaaagctttggaccggtgtgtcgaaagctttggaccggagtgtcgaaagctttggacgatatctgaataagatcactaacactaacccggtagccttttttcacaaaacaaattgaaataaaagaaagttcaaataacattactttacaagtctgaattaaaacatcaagtggagaagttgtaggcttatttaactttaaatcatgcactaaatcacaaagttgacaaatgttacaaatctcttagtatttttaatttttttctaaagaaagaaaaaaaaaacttgaattcatccttcaagttattgtatctacattaataaacaactaaccgtggtatcacaacagttcaatgagttctaactattgagttcctcaatgttagttcggaacataaaatcttcactttctaattcatcatggtatggagatataagcggtgtgttgaacttctcactagtttctaattcaccattgtccaacgatctctttccctgaaacaccatgaattgcatcacaaaacaacattcatttacttttcataatagaataggtatatagatgatacaagtacaactactttgtatgcagacattttggactaactgacctttttcaaaatgtagacaaaataatgaaatccatcgccaaaagttttccattcaaaagaccatgtaaattctggggcgttgagaaaaggacgcctgaaatgtggctgtagatatacaacacatgtaagaacaataggagcaacaataaggaaagcttaagaatttagttcacaacaacctgaccaaacgaaatggagatgaaaatgccatcctgctttagaaccctatggacaccctcaagcatcttcatgaccttagttactgatgctggctttggattccatgggtccccgctgtccacgaacagtacatccttcagagttgaaaaaagagaaacacaatatattcattcatctcattcctcagaacgattaaactgaaaagaaatcacaacaatgatccttgagaacatcaaatctgaatcaattatgtgtagataaaacgcaaacaactgtggcttgaacattaccatggttcctttttcaataacaacgtcaaaagactcattgctaaaaggtaggtctagcatgtcagcttcttgaacttttatttctgacgattaaacaaaattgagaaaaagttaatacagtagaagtaaatgctattttttcactgcaactataaattgctccatgaccattgcttattgttccatgaacattcacttttctcttcttaatttaaatgctagactcaattttacctaaaatcacagtcaccgagtttagtgctccaaataatacaaggtgcttataacacacatacaaatcgaattgaaaaatatgtcaaacaattagactaaaacatctgaaatttgaaaatgattataaagaaaggaaataaattaaaaattaaacttgttaaagcccaaattgtatgataatgtataaaggaaataaacaacactacataagtagacacacaaacagaaaatacgaaaaatagataaggatgcttccacctttaaaacccttagatagcaactgcttcttcttattttcaacagcaacagctgataaatcaatgcaagttatttcggtgattccgtctctgtacaattcttcagacaactgtgagtttccacagcccagctccaaaacctgaagaatacaagtgtcatcaattttcaacgccaataaactatcccctaactaaaataagcaaaagaagaaatcaagtggcttttgcataatagcataagagaaaccagtggccatatttactcttttcagaaactagcggttttggggaatccttcacattataggttcagttcttaaaatttctagtttatgttaataataagcacgtacatatatgcattttgcaaaacaagaacgagaaactccatatataagagagtattggaagaaagtagtgaaaatacagaagaagtgggagtcaaatggggttgaacaaggtgccgaaactgagagtaatccttgagccactcgtaattttcttcactagaaaaacgattattcctgtaaatatcacaacagaaatcaattcaagtacgggaacaatataaggggcatatctatatgtgtacatgtatgtagagaataccagtatttaggatcgcggtaagccgaaacagaagatggaccaatgcatttccgaggagtatcctctgcaacttgactatcatccattgtagggtcgttggattgaatcaacttcttcttatgttatgattgctgctggcaagttcgagccgtgtacgaagcaaagaaaccctaacgcctaaacacctcaactcttcaaggaagacaacggaattacgagcaataatgcactgcaatggtcatgctaagttctgttttagtttttagaacaaaaaaaaagtaattaggatttttacaaataaactttaacatacaataaattaggtcttctgtacttttctggtacttattgagatttttagatttaagaattttttgtccaatttcatttaatttaattatttcactgattgtttatgtaccaaatcatgtccctcgaactttgacatatactaaatcatctcctgtgaactttcatctatattagacttttttaactaaaattggaaaaaaaaaatccttaaatccaaccatctgaatagttcagggcatttttaacgttcagagggcatgatttggtacgtgtcaaaattttagggacaaaaatcttaattagcctaaaaaaactcaaataaaaactattttttaaattaaaacaatttaaataattcttaatttattcataaaaaaattgagtgatatttaaacactttgaaaaatattttttattcaaaaaaatctacataaaaataaatccaaacttatacttatctatttctaactataagtaaaaataaaaatttagccaaacaatatcttaaaaaaatgccaagaggaatgtaggattaaaatatctaacgtgagctcatatgtatttatgtgtattactatataaagtttgactaaaataaagtgatcattttagtaattgtgggtcattgggtattaaagtgtcataggctaaatgtgtagatactctaagtgatatttctaatttattgaggggctaaattagaaatacttaaaattaataatctagctatgttgctcaaaaaaaaaaaaaaaaaataatctagctatgaggttataaattggtagtggtaatttataattttacacaacctattagtacaagttaatataaaatataccattgtatcaaataatactaatataatataatacaatccaatacaatactataagggcccgtttggtacgcaagactgaactggaaaggattagactaaattggataagattggatcatgctgaaagtaatcgtgtatttggttttagaatagagtggactattttatttatttccttttaaaaaaaaaacttaaattaaaatannnntatataataataaataaataaaattga

SEQ ID NO: 112432 - DNA, 4015 bp, Cannabis sativa
  modified_base (48)..(51): a, c, t, g, unknown or other
aatggaatgaaaattgtttcctttccattctattccatttcattaccnnnnaccaaacgccacctaagtttctcgttgataagtaagtggaatgttagcattgagaatgtccctctccacaatggtgttgaggttgtcaattggtttctgaacttgatgtctgctatggatgatgtatccatgatatatcaggaggaattcttattgtttgcagcaatactttttcataacctctggtttttcaagaatgatatttatcacaacaatagtcaatggagtttcttagagaggaagaaaaaaattaattgtaatttcaagggccactggaacactatgataagaaatagagagggaagaactgatggcgctcgatctctattgactcgttggactctgcccagaccaggaagaatccgggttaatgttgattttgtgaacaaagaaggcacaagagctgtaggggtggtggttcgtaatgaccgtggaagcattttggctttgtttgccatcaagatctcctttctctcgattgttcatggtgaacttatggctaccttttggggattgaaggtgctgcaacagatgggatgtatggctactaatctctactctgattgccaacctttcatgtctctatctcttctgctactcattcccattggaatttgactcttatgtattttaagttttttgctttgctttcgtctttttctgtatcctccttttgagtgcctagaacctctaattaggcggctcgtatacttgccaaatggggtcttgaacacttttgcaaagggtttctaaatttctcgaaggtgaatctctatatgctcaccaaaattgtttcattagttaagaatttgttttttagcaaaaaaaaaaaaaaaaagaaacatgtcactagaagaaaattcaagccaaatcgctcgggaccattagtatttttctaaagtaataataataataataatatcctaaaatagaaagaaagaaaactaggtggcagttttttattggttggaaaggaaaaggtgattttcattgcacaaaatttggagcacgtacaaattctgttaaagcaaaatttgtacataacgtacagattttctctctgccactgcattgcctttttcttcagctcttcacgacttcactgctcctccttcatcttctttcttcgcctgaggtaattttcttttgattttgaaagctttttcattatagtgcgaattcatgtcatcgagctaaagctgcattctcaatcttatattattttagagatttttttttttgataatctgtgtgtagtgaagaataatatcttatctgtgaatctagaaataacatttctgctttcgatttccagcttattactttcacagtttcactccatttcagctctcatctttttctttcttttttggtgacagttcagttcagttgataatgaaggtcgagtttacacctgattgcagtctgaacgacagtgatgacgaaggagctgaactgagcatttcgatgctcatttcgggcttgagatcggcgtttatgaccactgatttcgactgggtcgaggagactctgatctatagagaagccaagctgaagaacagaatcgaggagctagagtcagaaaatattcaactatatcatgaggttaagagattgaggatttataattctgagacaagagttgtcaaagagaattatgataccatgcgaaacagattgaaggttgctgaggagaaaattctagactgtaatttgagagctaaggctgctgaggagaaagttctagactgtaatttgagagctaaggctgctgaggagaaaattctagacgctaatttaagaactaaagctgctgagttgaaagttgtggatgctgaattgagagttaaggaagctgatgagaaagttcgagactctaccgagagaactagagtggcggaagatagagcaaaaaaacttgacgagggagctgaggcgaaaactccaaaagttgaaaggttagagcaattgttggatgatgtgaagaagaccgagagaaaaataattgaggagattgttcacatgaagcaaaatggggactggagcaaatttgatgaactggagaaaaaagtgtctgtgctagaagctgaaaaagaaattgttttcaaattggaatctctggttccaatgttaacaaccacaggttcctctgagtctcacaaggcaaatgaggagaagggtactgatactaatgatggatttgctgttgtttcaggctctgctcatcttccttcacctccaatttgttcaacgaaccaagattctgctaaacctttgatcacatattctaggcgtaataagaaagggaaccagaataagaaccagaaacaggggtagatgttttgtagtgggaattaagacattttgagaagcagacatggtttctttacttcttttttttttctttctttttgggtttaatatggttgcttatgacaattcagtaagactttcaaaaattccttttgttctttgttgattctttgctggttttggtattattctgctataaactactaacctgcaggtggagcacaacagattttccaagtaagatcttcatttgcattgtctcttgtcatttacttatcaatcatgtttgcttgtattaaagggaaaatgctaaattgctaataaaaactggcatcggatataatgagaaaaagttgagccataatgaggggtttgaaagaattaaatattatggaaaatattttgtagtttgtacttttgtaggtagagaatgtattagatatttgtttacggtgccatttaatgttctgtgttatattatcattaatcaccatataacttatttgatacgttaatatttaggatttcagggattaatagttcaaggttgtaaatatctgtgaagaataagtagttgtatgagatatgagtgaatggcattttcttctgtcttttcaatctccaagctctccaatgagtttcctttttaaaatctctcaaccaaaactttgaagataagacccttaatccctcttttgaattgtctaaatcgttctccaaagatatcttaacataagtgtaattaaagccttctgtttttctatccaattttttttatatttatttcattttctggaccaatttatgttgcaaaacctgaaacactgagtcttagttttctgaagtcacttgaatcacccaatttggactttcttagtgaatgttataatggcccaattactgaaactatgttttaggatgagaaattattcacaaaaatgaaacaaagagacacttgagtactttgtttgctttgagattaggtggtagtcattgggtgtttaattgtattgctttattatatatgttcaagaaacaatcatacgagggtgatccttttgcctgaattagcctagcctaggtttttcaatgacttttgcagccaatctaagttagtggtacttagctaaaaccttaatattgtctgttatattttgatgtgttatattttgatgtaatattttttattgattaaataaatgttacaaaagttacaaatttattactaaagagataatatttaatctagtaggggattgttatattatttatcaataatataatgtgtagattaaatatgtgtaacaaattaatatgtaacacataacaattgtgatctttttgtaatatttgggggagttacttgctactatgagtaacctccaccattatcaccaacactaagagtgtaaaagatgttacacatcttaatttaaaattcttagtggtataggagttatggtgtgtgcatgaattatatctctataggagttatggtgtgcatgcgttacatctctttattgagtccataacatccatgtatgttatgacttatcaatttgaatttcaaatggtgatatcctaaacactatataaagaggtctatgtgttgagctttgtgccctaaataacactctatttcaatgtaatc

SEQ ID NO: 112433 - DNA, 3376 bp, Cannabis sativa
tagagcatttaacgtagtgtgtttctaattagtttcttcaaaaatttaaagaattttctattttaaagcatttaatgtgagtgccctagtaatcaaaacattttgaaacaaacctcttatccaagtggcggctaaagacaatcacatctgccccaagtctcattgtgctagtcttgaagccatttccatctgaaaaccttaaatgttaattagcttcaataagatacaaaagcaaaactaaaaactaaataaagctagaatttgtacatcgtccaatcgatgattttgatttctctgaaaatccaaaactcaagcaacctcgcattgctatagggtccattccaccaccatcatctagttagcaatacaaaataccatgatttagaaacatgggtacgaaacacatattaccagatctacctataattatgttcgagtgatactaccaaaacaatatttatgcttgaaaaaatgtacacaataccttgtattaacaaggctggatttccatcccttggatttgagatttcatcaactactacaaaagtggctccattttggatctatccaattttgaaaatagaacatgttcataagagaaacacttcaaaaaatcaattgaccaacccatcataattatgtttgtattactttataattgacttgatcaaacattaactaaaatagttcaacaatgataaagcttatatgtataagttttggaaaacggaatcaggtactgaggcattttcccttggccccgaaggcataagcctcgaggagcatcgagtcgtatacctcaacaataaaaagaaaaactacataaaatatcataaaatcataactaaccacaaataatttcataacaaagtcataaaattactagttaagccttcaaatcataactaatttcataaaaggctcaagttcaaacggaaaatcctaattcatagaggaattgttagtctattcctagttccaacactaattaggagttgccttgactttaaataatagtaaaggtgataatgtgtaagggagattaagagtgggagtagataccacgagtccgtcacgattttgtgatagaggctgaagggatgtaatatgccccaatggtttaaggtttttagggtttcgtttatctttcctattctttttatgaaaaatccgttagaaaaaagcccaaaccaaagcccattcaagtcatttaaaagcctaaaaaatagctcttaaaaaagttctaaagaaaagcccaagaaagacccacaaactacaaccctaacacacaaaacaaagcccaaggctataaggcgtgtgcctcatatacctcgcctcaaaggtgtgcgcctcatcagtgtgaggcatatgcctcaaaggcaacagctgaggcatagccccatatacgtttatgcattgcctcgccttgactgagttacaaaacagtatgatgtacaaatttattatatgattggtgcccaaaaaaaaaatgtgtagtacctacagtaacaaattaattaatagaacataagattatgagaactcctatcttataaaccgaatatcactacaatacttttctaaaatcaagacaacttagccttggacattttcattcacccaaatctataatgccttgtcatagttgggactctatttgccttcccctactggcaaatcgcttttcatttggggtacaccatagtgtgagcacttggtgcgacgcaatgtagcatcctactgttgaaattgatacaattaagaacatgccaaaagttccctttaaggatcttgttttttttttttttttcaaactagactttcctcgggttgagatgatttggacttcctaattatgttagtttcattttcacgactcctaatacacttgaaaatattttaaagtatactatacaataagggaatagtttactttggtaccctatgttttgaattaatagggcttaaactctattatcatccgtaatatacacgcctcttacatctaaattgtcaagaagacccaccatgactatctcctcggctaaactagctactaaaatatatttaaccaaattcaaatctatatttataatacatctacaatacatgaattgtaaaacaacatcacatgagtatgattaataatagaaggttaaaattggcattaactcaacatagagtgccaaaataatatattctcccctccccttctataatttaagaactttatcttcaattaaaggaaaaaagatgatttgcatataatatatatatgaagaaaagacaaaggtcacaaggaaaaatgatgatccacatttatagtttccattaacctcaaaaaataatatacatatgtatacataaaatatataaaaataataaaaataaaagacaagctcaaggcaaatcgatgtttacctcatcaattgcattgtcaagcaattctgctatggctgaaaacacaaatcaattaatgtgaaagcaactatgagaagtagcattttatgaaggaaagcatgtgtgaatgagcatcaatagaaataacacatatatatagaagaaaaaaaaagtatgaaagataccaccaaatgcccacttatgtgaagttgcattggagtgaagaaacataggatggacttgtagataattttttccatctgcaatacacagcattaaacattcatatcatgtacaataactggaaaacttagaattctaattacgcattaattaaagttatcatagaatttaactggaagttatgcttttcacagccacttgataattggttaaaagcacataaaaatttcccctaaagttcctaaacttagacccaaaatcaaaaattaggaaaatagtcttgggcttccacattataaatagattctttacaccagtagaaatttttaagttgtaatccaaaaataattcacataatagtacaatgtagctatacgaaccgcccaaaagtcatctagaaattaaagataattttgagtgccaaaataagaattcaaacaacttattacatgtgcgtctttaccattttagatgcatgtgaaacacattgtttaaatcttgatctcaacaccctaaattatctaaaatttcccaagaacttgtgggaggtccctacaactacaatatacattgtcatataaaaaaaattgcgattacactgaaaaacaaaaaagatagttcttacccatagatctaaaacaagatttcaattgtataagcccctaaaatatagataaatatataattcttctcatagaatgttctctaataaaccacactgatggctacaaacaaaagagtagggatgcacgcaaaaggctaattaaaatttttaccctctgaactttgacat

SEQ ID NO: 112434 - DNA, 6306 bp, Cannabis sativa
  modified_base (4374)..(4375): a, c, t, g, unknown or other
  modified_base (6242)..(6249): a, c, t, g, unknown or other
taggtgaaattgtgttttgcatttatttttaatattctaaatgtgaaatttttgcttaacagcatcataaaccgctaatcaatgagcaataacattcgagagtttaggattcaaaacacaacaagattattatccaataacatattaagttaagactaataatatgtacacacaaatatgacacacatttatgtggtaaattacttttgataaatgaaattcttcttaaataaaaataattggttaaagttatttaccacataagtatatgtgaatgatgtgtgtgcatatcattattaggttaataatgtttttacaattacaagtgttgtaattggaacatgttggaaaatattggacttagaatccaaagttatttttgttccttgcatataaaaaacatttcttattttttataaattatccaacaaaattggaagagaacaactcaactcaactccttcctttctctttctcccaactcactcaataatggcgctctctctttcttcctacaccatttccgaccacaccactcctttaccagctctttcttcttcctcctcttcctcttcaacactctctttttcgtcttctctccatttccccctccacctccgccgctttcggattggacccaaaggggtttctgctccctcctccaggactccacttcttccactggtaacactttttcttctcttttttctcaaattttctcaataataacttcaattttgagttttgtaactgcccttttgttcaatccctttattgcgttctcctaaactataaagatggttcttttatggatcttaatatataaggaaggagtttctgaacaatctcatgaacataattgttaggctttgaattgggttttacacttactttgttcaatttgattatttgagtactttcttcaatacttcagaggagattgaatggaggaacaattttgtatttcaaaatataattaaggaagttgttgttgttgggagagacctttacatggaatttcttggatttgggtggggatatattgcttagtgtcccttatcaatatttcttcaactgttgtgttaggattgataaatttggaaggtccttggattatcttgtctgatatttgggagctaacatgtcatgggaagaacatagttagtcttgatttctattctaacaagtagagatagaattgagtcaaaattgaaaaagaaaaaccctccagaatccagattctacagaagatgagattgcagaagctagtttatcggtgcttgttaccacataaatatttaaaatgaatatcaaggatatcacatttttaagagtcttctgctttctagccaggtctcatgtgattgttattttttcttttgattctgatttatacatactacgttttgagttcttcatctcaccaagccagtattttcctcctcttaattcaatattttttttttctgtcaaaacttttatatctgtaaatggataagcttaagcttgatttctattacttggccttgcattgtttgattgttgaactacctctgattttattgactttttctttgcatataatctacaataacgcttgactcccggactctagatttttagcaatgccaaccagttaatcagtaatgtcaaaactagcttcagtcaacatgtaattggattgaaccaaaatgtaaaacttagatgcatttataatggtgggattcttgtcaaatgtaagatcttgttaatcaaattatcattaccataattttctcacacatttcacttctttgtgtcaattaatctaaactcattggatgttcttctcatcttaaaatttatgatattcattgctggattttttattttttcttaatatgaataagcttttactgtatcctttccttctgttcgcctacattttcctttcatcgcagatttctgtccttgctcgctccatgttgatttttttgaaaacttatttttgtcaatggattgaatccatatatgttctgcacaatgacttgtaaatcttgctattgactatagaaattttaagtgaatctgctgaagttgaggcgaaatgggatctagtgactagcctcgtggtgtgaataaaaaatctcataatgttctttcttataagagacaataatctcattaaaaatgttcccttttgggaactttgaaagaaatatttgtattaaccgttcaatctttatatatgtgtgatttgcttatatgagagaagcacatgaattctaaatcagttttgtaatataattacttatgtattttgttgttaaacttaattttataggttagagccaagaaacaaacattttcctcattcgatgatttgctcgttaactcagacaaacctgtgctggtagacttctatgcaacctggtaagctctttccatctaatttattatagaatacattttatatattactaattactacattaatccttcatctaatagaggatatgagaattttttttctaatttcttataaatgacattataaaaatgtgcatatgatcatacaattccattcccaagtggagaagggaaaaagattggggaatcacctagacatagggacaagatgttcattttaggacaggacaaaactaagaacattttttgtttaacttagtttgctggcctatggcagtttcatctgtcttggttttttcttgtaaattaaaatattaagctggtaggcgaataggatctttatcagacgcaaatatttagaaattagaacaaatgtaataaatttaagaataaatagaattttttccttgaactatgagtcgatgaccctcgtagagttttgtccctaattttttttttgttgttgcgaaaatataaactttacaaatgttgcaaatattccctttcaattacattttggtcattttttataatcttttgcttatgtgaccgtgagttacagctatagtgcagaatgagggtctatttaacaattttaagctatcccaaatctaatttatttgcattagacatacaaacgttacgtctaagaatgcatatacatatttctataattcactattagattgttatttatgcatttatttttcgtttggtctcttgaactaggttagattaatttcatattagtgcttcatcaacaaattgtttaaaaaaataagcagaatgtaactggaagaagatatttgcactaattcttttagtttaggggcaatctcgcaacaaaagaaaaagttaaaggggcaaagctctacacgagtcatagttcggggggacaaattttatttattctaaatttaaaatgatgtactaatcaaaatggtttttttaacaggtgcggcccttgtcaatttatggttcccgttctcaacgaagtcagcgctgagctgaaagataaaatccaagtggttaaaattgacactgagaagtacccaagcatagctaacaaatacaagatagaggcattacctactttcatcatattcaaggacggggagcctttcgatcgctttgtaagtcaaatctgttttgttttcatattcatttttgttaagaatcaatttcaatgcatttagatatgatcagtcaggcagcttaatgtttcgaacattaaagatgcaagtgtgtcggtcggtctaactttaaacacgaagtttaaactcattataaaatttaatgagattttcatttgattcttcaagagcgaaacagagaaacgattttcataccagttttctcatttttcaggagggtgctatgcctgttgaacagttagtccaacgaatcgaaaatactttgaaaattaaacaatagctggtaagtcattcatttcttaccaatgccaatgtctcttttacgttcccattcttgagttcataatattcactttttcatttgttgttttaaaacagaattttgagggtactctgatgggaaacacttgatttgatcagtgaagaatgcacagaaactattttttcttctttcctttttcccttttgttatttgaactatttttctaatatttacaaattgattgtgtgatcataccagatatatagtagaatttattttttgatatttgatggcagatttttctttttttaaaggtaaatactattttggatcctgtgttttgcaaaaaaaatgattggaccctctgttttgctaaatgacaaaatggactatgtatttttcaaaatggtaaaaataggactctgagtttaattttcgacaatttttttaatataatcaacttggagacaattcctaacacaaacctatacaaaaaatgtaaacagttttatcataacacttctaaatcggattattattaaattttannttgacaaaaaattagtttagagttctatttgtactattttggaaaatacaaggtctattttttaattaaacaaaactgggaattcaattagtaacttttgcaaaatacaaggtctaaagtggtatccctacctaactctatttggcgactagaaaaatatagcaattactttgtaggtactcgggagagactcaaaccttagaccttgagttgttggagcaaactacggacctaaccatttgagctatctctcttgtcttggatatattttattcgatagcagttgattcttagtgtttcaaatttcagccgcatttaagaattttatcaaaatctagtctatttttggtatgaggtgatctttaatccttgcactgtaaagatacttctagtaacttactcgtaacgtagtgatggtcaattgggtgcaatcttacttcgagcatggttggccatgttttttactttgagctttacaaaagctctttactgaaaagcttcaaggagtggtaaaatgaggacggctttttggagttagcacactcgcaggaatgtgagtttttatcccgtctattgtagtacgtatgtgtcgcccagggcataaggggcatgatgacttgacatcatcctcactttcatctggttgatcatatgtagtttgttcaaggttctaaactcaacagtggcaaaattatttttaatgatttgaaaagttacacatttgtacaaacatatatcgaattcaacaaaatagcttcgtaacttttaaaaacccaagagtgcttttattttattgtaagacgttgcaatttttaagtaataatactcaacgaatatcaaaatattaatcataaaattttacaaaagttattgattggactttttattaaataataattcaaaatttgtgttttttaaaatagtacaaaatagacactgaattcaatttttgttaattttttttaacataacaaacctaaagcccacttttagcatgaacaattgtaaagaatttaacggctgcgggtcgcaggttaaacaagcgggtcacatgggtttataagccctaagaaagtgaaagagagaaagagatatgaaagaaacttaatggaggctcggggcttctctttgcttgcttctgcgacaatgggatgacgaggtggctgtgagactccaacagtggtgcaaagtgagaggctgagagtgggggagtgagctgggagagagggagtggcagagagaaggttgagcaagaagagaaagagtgagactaggagtagggaagcttcgaccagtcgtgactaatgagagcttcgactggtggtggagcgactctagtagcctaagagttcaactcttaggctacagtgtgtacaacaggtggttcaactcgactcacctgttataaacagacagtcttcaagttttgagtttcgtgggttgggctctggtaggttggctaggttcgagccaaacccggtataaatgttaggtcctcctatcaagacctcctgtatgttcaatcattagacttacaaattattcagtctaatcttgtatgacaaaatggtcaaacacgtattagctcttacatcttcaaattaatatatcacaattattgttttatatgcaacaattgtcttttgaataacatatataggttgtagttggttagaatttaaattttgtttatggtcattttcaaaaatattcagaaactaattttagttacttttagttcaaaaatattctagttagatactcagtaacttttagctcgaaaacaaattcagaagctaattttagttgttttcttaactttagaaattaagtgcatgtttggcatcataactaaaaaattgttttnnnnnnnnaaaaacagaaaattattttttgaaaacaatttgacttgtttgactttgttttttgaa

SEQ ID NO: 112435 - DNA, 7510 bp, Cannabis sativa
  modified_base (39)..(41): a, c, t, g, unknown or other
tattttcactttttcaattttaaaaatagaaaactgatnnnaaaagtgttaccaaacgacagcttagtatatcgaatattttatttttagtgatttcattgattttttatatgtattttatgctaccctctcgctggtagaatattaatataaatttagtatattattttactaatatttatgtaacataaatttatatttaaattttaattaatctattaaaaaatagttagaattatcaatctcaatcttcgtataactcaaaaaaaaaaaaaaccattcaattttttatacataaagatagactgtgtatatagtttttttagaagaaaaaaaatgctacacttagatgtgtacaattcaaagtaagatataaattatttaaggtatatgcagattttttttttttttttcaattagttatatatcaaatttttttttttaagcttagcttttaagatttttttttccaaaacaaaattgttttttgtttaaataatttatactttcaattattttattattttcaatatctaaaatattggttagtttttatttttaagtactgtttctcatactcgtgccctattttgggtctgctggagttgaagttttttaactacctatattggattttaactgttttttcaaatatcttgctttccctctttgtctgccttcagttttatcttttccttttctgcgttttttctataactgatgtgttttgtgctggttttttctgcattttcttcctgtgttgagatggattcgttactgcaatctcttgattccactttatctcttactgaagaggagagttcagttgcaattctgccagccgatgttgttcctacctcgtcaaacacttctagccacatcctcattgcacgggttctcactaaaaattatgttcatcagcctactttttttgatcaaatgggaggccattggaagggtagatatccttctatcatatctgattatggagatggcttgttcaaagttactttcggatatgtaggtgataaacttcgggttttaaacaaagagccatggcactttcaaaatcatctagtggtcttttgctctccaactattcagcaaaatgtcacagtgaacaatctgtcaagtactcctttttgggttcaaatttatcgtctaccgtttcttagcaagtccaaaactcttgccactgctttggggaacatcattagtgaattcattgatgtccatgaggaatcccttgatgagggatggggacctttcttaagagttagagtaagactccctatagacaaaccgctccttagaggccgtatgattagtttgccaaggatcaaagacaacttttggatcgatttcaggtatgagcgatttctagaattctgttttgagtgtggacggattggacacccattttgagaaatgtgtggctttcatggagagaatggataatggtaatgatgatgactttgagtatggtccttggatgaagggagcaaaactaccaactaatggctatgataagtaccgaaatgatttttccaagggtaatgcttggcctcttttgactcgattggctcgtaaatctctggtttctacaattccaaacttgagtttcaaatcacaacctcaaccgaaaagccttttccaaggagaatcttcttctgctattcaaaccaggcctttgaacaccactctcggttctttccctttacaacagaaccccccaacacttcacagtatatcattatcacaaaccccaacttctaccatcaatcttttatcctccattaccaatgcgacatctaacatggtggtctcagaaaatgttacaccaactataccaactctctcaagcagtaccaatacacttcccactaacccttcacaaacaacaaaccttactcgcatttacacccctgacataggttctgctacccactcccatgtccccattgccacatatccaccaaactccatgtccattaacactaccaccaacaacttacatgtatctacaccctttactccttcactttacaccactccaccattactcactgccacaacctgctacaaaccagaaaccagcaacgaaaacctccacccaaatcaaattttcaagagacatacagatgctccatccatgagacaaatgcttaaaagatgccgcaaccaaaatcctactgctattgctttcccttcttcgtcaaaaggtgactgctcctaccaaaacgtttcctcggcctccaaggattctgatggtgactctgatgactcagtagagattgctttgcaatcccgaaaaggattatgaaaatcttaagctggaacgcgcggggattggggaacccgagagcgttaagacatttcagattgcttgtctctcagcaatctccccatgttctctttcttatagagactagacttaacaacaactctttacttcgcattcgtcaatctttgaatttcagtcacggttcggaagctcctcgaataggcttaagtggtggactcatgctcttatggaaagatgaaattgatgtgaatcttaatacctttggctcttatttttttgactgcttcatgactactttaattggacaacactttcacttcacaaccttttatggctcacctgtggtacaaaacagatcggactcatggacattactccgtagacttgcagatgtagctcctttacagccttggttgataattggttactttaatgagattttgtcaaaccgaaacaaatcaaggggtactttatgcagtaaatctcaaatgaatgccttcaggagtgctcttgatcattgtcatctgactgacccaccttttcaaggagatttctacacttgggctaaaagtagaatagcagtaaacactctaaaacagcgccttgattggtgttttgtcaatgatgcatggacttcgtattatagccaacctaaagtgtgtcacctggaatattttcattctgatcatcaggctatatctgttgatttgtccaatgattcggcctcccagcaacataaaagacacaaccgatttcgtttcgaaaagttgtggttatctgatccagacagtaaaacgataatatcaaattgttggcagtctgacaactctatcgaccctgttcagagtgtactcaacaacctagattcatgtgctcaatccttacagtcttggcatattaaaaaatatggtcgtttgaagcataacgttgcagcagctcaaaagaaggtcgacactttaaacaattctaatcccctgactactgagacagcagttgcccttaaacataatgaaacaattcttgatgacttgcttgaacaagaggatatctattggcaacaacgctctcgccttgattggatgcaattgggagacaaaaatacaaaatattttcactctaaagcatcggcaaggaagtccaacaacaaaattgcttcactcattactgaccatggaacaaaagtcacttccaaatcagacatgagcatggtaattgaatttctctgatttgtttaaagccacttctactgatcatgatgctcttgctgaaacactggctcctatacctacctcggtcactttggaaatgaatgagattctcctcaaaccttttactccaaccgatgtcgaattggctctttagttaatggattcagacaaaagtcttggaattgatggtatgtcagcaatgttctatcaaaataattgggatatcgtgggaaacatggttaccaaggctattttgagtgttcttaatgatggtgcagatcctactccccttaactctactatcattactctactaccaaaggtaaagaaagctcaacatatgaaggacttcaggccaatcagtctctgcaatgtcatctcaaaattgattaccaaagtccttgttgcttgtttcaagtttgtccttcctcatgtgatttctgaaacgcatagtgcttttcttcccaataggcttataacagacaatatcttagtagcttttgagatcatccatggtattaagctcaaaactactggtcgtaaagggattgcagctatgaagttagacatgagtaatttcgatcgggttgaatggatttttatcaaggcagtcatggtacaaatgggtttcgcagacggttggatatcacttataatgaattgtttgacaaagaaccacttcactttcctcttaaatggtgagcttactggttctgttaccccatctagaggacttcgacaaggctgcctgttgtctccttctttattcttaatatgttctgaagggctatcttgtttgctgtaaaacgaggaacggttgggtcggttacatagatactcactcactagaagagctccacacatttctcatctgttatttgccgatgatagcttactcttttgtaatgctactgaaagctcttgccttgctattaagagatctcttaacacatatcacagagcttcgggccaagttttgaacccagataaatcggtcctctcattctcaccaaatacaactttggcagcctagatacttttccatagagtattgtccatgcccatccgagatttccatgagaaatacctgggtctacctgcttatactgacaaagacaaacaacaactgtttagtgatgtcaaagaaaagatctggagactaatgagaactttgaatgacaagcttttctcggttggaggaaaggagattctcctcaaagctgtggttcaatccatccctacttatcttatgagttgtttcaagctcccaatcaccatttgcaatcaaattgaatccatgatgtcaaacttttggtggggatctaacgagaatggcactaaaatccattggcatagttggaaactcttatgcaagaataagtttgaagggagtatgggctttcaatcttttgtacattacaatcaggcgcttctagccaagaaatcatggcggcttcttgataatcctaactcacttttgggtcggttactgaaaagtcgatattttcctaacaacagttttctagaggctccccacggtcactcaccttcccttacttggcaaggcatactccatggaagagaattttgaattctgggctgatatggaaaattggcgagggcagaaacatcagttgtgcgaatgatccatggattcctggccatcgaaatttttttccaacacattacaaagggctggcacaaattgttgttgctaatctgatcactgatgatcgacaatgggacaccaataagctacagcagtatttctctaatgttgatgttgaccgaatcctgacgataccgctaagtttcttctcaactaatgacaagctcatttggcatcctcacacttcaggtatatataacgtgcactaaggatatcattttgcagctgctatcgaagaaacggatctctcctccacttcttcttcatccacggcctggtggaagttttttttggaaattactgctgccccaaaaaataaaaaattttgcttggagagttcttcatgatgctattcctgttgctacatcactggtgcgaagaaacattatgacggactccacatgctctctctgtcgtcaagcctgggagtcaatcggtcatgctctccttggctgtaagtatgccagagctgtttggcgttctctgaactaccattttaactggaacacatatgctttaatgcaaaagggtgattatctaattcacctttcaacacttcattcagtcgctgaaatggaatcaattatttgcactttatggtgtatttggtctgagagaaaccgtgtgattcatgggcaaaaagccaaacctgatgtacaattagcttcttatgctaacaactacatgtccaactacagatctgcacaattaaagtatcgagccaaacaacaacctgcccctaatctgcccataataacacctcctgctcatgtgccttggcagccaccaattgttggttcattaaagatgaatgtggatcgccctggatcaaacttccaatcgaatcggcgtaggtgctgttgtacgcaacagtacaggccaggtgcttgctgccctctccatgcctctggtaggtaattttgcctctcatgaaatggaggcaaaggctcttttccacagtttggtctgggcttcacaatgggaactccaaattggtcatgttgagatagatgctttaatggtcacaaatgctttatatggccgatctaattgtattgctgcttttaatgatccaattataaatatttcttgtcttctctcctttttccctggtgtatcaatctcacatgtcaaacgttcggctaacatgcccgctcacagtttggctagatatactttagggttggatgaagctagctattggatggaatcttttgctccttctttatactatattgttgtaaatgacttaccagtttaatttataatgacaagtattttctcaaaaaaaaaaaagagtactgtttctcatgtatttaagttttataattaaaaaaataaaaatatctcaactatttctaaatcttgatttgtatgtttttgattatttgaatttaatttgattagtttttgtctaatttagtatttttggtttgatctatttttttaaaaaaaatcgatatattccattaagcctaaaaagtctcaagatacaatgaggagctcaaaagattaaacaactaaatccaaaaggagccccggctacccgacccgagactcatataaaactagctctctttgcaagaaagtgagcaatggtattgacagacctattacaatgagaacaagataaactataatggtcaatgtcaatgttgacttagttgtttttatttatacatataaattttctacatagtgctttttttttcacataatggtcaattttaaataattttgttaaatggtttattattattattacatcaagtgaggtggagtgacaacatcgattctagatatagagatataacacattacaaaggaggactcatttcatcgacgagagaagaatcacaacaagataaaagtaatgtctaaatgaataagagagactatttaaccttttttagtgatgtgtattttgactccacttattaatttaacatattaattaatttttttagtttattattttgtaaatataagtcgcgttgacccgtttgtatacctaattacttctcatattattaaaagaaattatgtcaaaaattaataagttaaaatttaatacaattttactatttaattaatatttttagttgattattttgtaattataaattgggttgacctatttgtatacctaattacttcttatattattcaaaaaaaattatataaaaaattaatacgttaaaatttaatacaatttttatttaattatgattaaataaaaaataataatttattttatatatataaaggtaaatagcggcgtaagtacccaaagttttatgtttgtaagcagcataaactcaatgttta

SEQ ID NO: 112436 - DNA, 1305 bp, Cannabis sativa
aaccatattaaacacataccagccgaaattaataggaaataataaaatatttttgtcaattaaatatgtcaaaaatggaattaacagagttatttggattttcgagtttctaacatccacacttggcacgcggactagctcgatcctcattgcttattcccagtgggtaagttcaaacctttaattctctctttttcttgttctttaaacttctgccattgttgagtttcaagattttatgaactccttgaatctttaggatagtttttacgcattataatctgttacatagctttaggatgtttaatgtgcaactccttgatgaaaaagattgaatattgatctttatttagacatcttgatcttaaaggttcgaagaacacgaataaaatagtttgaatcttcatgaaatacattttttgattcgtttatgaacctagccgacacttggggtctgtttgaaccctagctggttcataattctttcaagaggacctagtcagttcattgctccatttaaaaaccttggccagttcatctagggcagagcttcaatctggccggttcatggtggttgaccatgaagctggctggttgatgggaaaattccctaaagttgatcggttcatggtgggcaaaccatgagttggtcggctcatggtctgagaccctcataggttggtcggttagtacctatgggtattggcttgttaggccatgtttttcatccttatctttatttgtaatctctaatttctcacctccgtttgtttttctgcacaaatgaacccgcgtgattattggggaggtgacaaccagattaacgaggacttgctccatcttctatttgaaaactaacacttagctagttcttcttctaagagctcgtcagacagctcttcaagtgactttgaagcgagcagtgattccctgaaacttgagattcaacatcaccactattctgagcaaatagggggtgagatctatgggagattcatttgggaactgaatcaagggtggagaccgttcttgcctaagttgtggacttacattgtccgccaaggatttcctgacaccttgcctgttgggcaggcatctcctgcactaagagatcttcctgtagtagtagtttccgttactgttacccaacactctaagtagtaatcaaagctagcatagacaaagtaaacatatttaaaggcgcctccgaccaattcccatattgttgagctcatggataggggagagtttgtcaagtcaaggatgcagaacagcttgaggctggccaggcagaggggcctatgg

SEQ ID NO: 112437 - DNA, 11477 bp, Cannabis sativa
  modified_base (8968)..(8969): a, c, t, g, unknown or other
aattaaatgcaaaaaaaaaaaaaaatgaaatgtaaaaataaaaaaacccattttatgaaaactagaaaagagctatttaatattctcatttctcaaaaacacatttttgaaaacaataaaaataccaaatagacctttacccctcccagtcctactaggcaacccacagtgataaaaggttagaaaagagttaaagtgacaaaggattagtgattacacgatcaatgaagagaatataaaggttgcttgcgttaacttccattttgatgccattgaatattttcttttgttttaaatacaaaaatgaatactagatacaatcattacaagaactataatgctagcacacagaaaactacacgaaaggggggaggggggaaatatcaaagagagttttcttttcgttgtgaatttgtgttgcaataaaaacttgcaacagggtgttgatattgtgtttacacacaatatacattatcacaacttggacacaaaaaaataaaatatgtgaaaagaaaaaaaaataaacacattttcatacacatctatatgaccacagaagagtttcttctcctaaaatttgcggttaacaaacattgtagaactcctccttgaggatctttactagccagagggtcatgacttgctgtcacacctttggtaccttcttctaactatgtgggcaacctgactagcatcaacacaggtttacaagatgcgccagggatggtgtagccatggcaaaattttaaagatcacaaacctagctctttccaatcaggtaatcatccttggcataaacagagatccgcaacagatatttacagcatgctgatgctgcatcattcaaaataggcactacaagtaacattctttttctgaaacagctgatcatgaagatcttattttagaagaaaatgtgaatgaaatttataattgttacctgcagttatttctatgtttcccatgccacgtgtttgggaccaatactttttaggccaaggataaaatgttggtggcaaaaggccagtgatccacgaacattaatcatcttgaatcacttctagcagcttgtagccgaggccttgatctcatgagtgtttcatcgctttgtctaatccactccgacagtttccacggcttctgccatttccatttgaattgtaacagccactgatgatgactcctcttccatctccatagctttccagattgtcctagagctgctaactttttcgttgacaactggccaatgggtaccatctgcaagtgcaacaacagaaactcacttaatagatgaagagggaagacatccaaaatgccataatccagggagaaagaattaacctttcgagtttgatccaagaatgttgctgagcacttgactgaaccattagcaataccagctgtatactttatctgtttatgtgcttgcacaggtactggagacaatggaccgttcacttcttcagccaagttttccaatgaattgggtgagttaccctgctgaaggccatgatgaagaattgaaacaataaggtaatttctaaggtactgaaaataaagctcttggattaacaaataatgtaatataacattatattaattgccatttcatgtgtgatgtttcttatgcaaaaaaagtctcaccggtgctgatgtagccaatgcaatcgaaatggcttgctctctcacttttagttccttctcaacttcttttctccgcatgtcactctgacgcaaaatacctacaagttctctaagttgctcttgcatttccttaatttcaatttccttctcccataattggcacctgtgaagatatgtcatttgataactaagactttcagtgcaaaattcataatagagaaaccctgataaacaattttatcaaaagagaataaggatggtcttgactattcaacattgcaaatggcaagctaaacaccagataatttaaaatgtgcagtaagatcaggattaacggatctacatataagttcgagtagcaatttaaaaattagggaggagaaaaactgcagagagaacgaaatgaaataaaaacctaaaaaagcaaaaccatgggttctattttcgacaatcttattacactagtcgattattttcatagctgaaaagttgttaaggaaactaggtcaaaaccgcaccttgcatctgcaacagaactaaacatatactgaagcaaattctttgcatcccccatggaacgtaactggttccaatgcccacggctagtgaatgcacgttccctttcttctgcctctgaaagttgggatgccattgccacaagtgagttggatgaaatgctcagcatgttctcaagtgaagatattcgtgccattcttgcatttggtgacatggagcacactctgatagacaaagttgatgagagtgattgaattatgtaatatttatttatttgtttcataaacacaaagagtacctggcaaaaccgttctttcctcttggagggctaaggccttttgaagagaattcatctacttgtctcagcatggctaactcttctgccagtgcagctcgcctggggattacaccataattttaaaatgctaaaataatggtttagttaaaaacttaagcttataataaagacaactcaaatacgtacacttgactttgcttctcgtattcgtaacgtacttcgtgcacattcaccatcacttctaactcattgtcaagccaacgttgcaaagacttttcattgctctgtaatatagctcaaattgaattaatttaaactccgaaagaagaaaatacagactgaggaaagaaaacaatgacctttacctgtccatttattccattcccactggcagcaactgctaaatgacacaatgaaaaaatcaagataaaaaggaaatgacagagatttggtagaaacatcctttaacgcttcctagtttttgttctaggtatttggtcaacaaatcatatcataacagaggtctcagatgcctcatacctgagctgtcacgaacagaagatttgcgagcttctagcaattcctttagcctcttggtagccattgcagcctcttcagttttcctctgaagaacctgaatgaaagaatcatatcagtcagtttcaagtgcccttctctatctcattctttttctaccccgcattcatttactactattgcaatggcactcaactcaccagtttctgacgctggttcagagcttgcagtttatgcctttcatattcatttctcctgccctccttccgcaactaagattgcaaataaaaacccaaattgaagaatgaggcaaaatgaaatcgggtaatcaataaaatttaagatagttaataaaagaaacttatggatgagaaaataaacctatttatagtaagatatcttgtaaggtgatctactgaacagaaactaccagccatgattcacgacaaaagaagcgaatttatgtgttgaacaaatctttttaacaattaagtatttaagtgtaaatgctcaggaggaaatttctactgaagccaaaaactatctaaatgctatttgttgcataaatgatactgttcatccataccatactaagtaatatatacctgtagcaattccttttctcgtgatgctttccaatgtcgaaattgttctgcttcttgttttattctttgttgtaattgaacctatgagttcacataataaataaggtacatcgaataaagttatgaaattgttgaaagacataagaggctgtaataaacattcaaccttctgtgcttttatagaatgaatttcatcttgtaggcgctttgctgcttcatcgcttttttgtttttgctttaaaagctgcacctggttctcttgcttcttcttcagatccagaatctgggacaaatacattgtaaaagatcatacaacatggttggttaacagtttctattctaagaaactgataacactcctacacatgcacactctggcagaagaaaagatagtcacctgtgcctcgagtgttttcaacttcaaggaatggacatcttgcagtttctgagtttgtccatcagtgttagcagcaaggttttcaacttcagctagcaaacgatctctttcttgctgcttaatttaatttcaaacaagtaaatatccattttctcaataataagatgaagaagctcataagctgtaaattaacctgcacggttttcttctcatcttctaattccactattttctttccaaaatgctgcttgagggccacagggccagaaactccaaaaagtttcatctcagactacatagacaatacaaaaatgaagataagtattttacagaacatcagctataatccattcaaccttaaaaaaaaatacatcacctctttctcttcaagacgtttattcagttcatctaactccttgtccatagagttctgcagaagtgtatgctcccactctttggctacttcatcaatttcccgtgcatcacctgttgaaattggcaataccttaaataagatggttctaagtaaaaagcttaaacccatattgcttaatgcatattgtttacagactggcttaagggtactgaaatcccatcaaataggcactgaaaagaccaaaataaaaaacatttccacagcatgttttaatccagaaaggattcatacttgatatagtttcagtaatttgataatcagctgaatcgattctttgcaagcctctcttaagactctcacttctcaacatgcaggtagaggccgtagtcgtggtagctgtgccatcctgaaatgtgacaatgtcaatgggtgtgtatctatataaacatatacatatatattgtacaccatctagctataccacagtaattgtaaaaaaaaaaaaaaaaacttaaggaattgtccaccaagtagagcaagaaaccaaaagagttttatacaaattgcttgagtaaaaactagtgacacatcaaaaaagagacacatacttgagcatctctgtcatgctgctctgcaacagtacatttacttcgatattcatgaagttcgcggcaaagatcctcatttgcagcttcgagccaaacaattctttctttgagaacctgtaaagtttattacttcagtttacaaattcaaataatttgtctatcgagaaaattatgtctacattaaatacttttcactcttcattatttggtgcatgtttttagttccttttatttaactttcttaaaacaatttgacagtagcagttcccagccgcttggataccttccttagctactgtcctctgatagacaatcatcaattccacacatctatttgtagagccccattacctgtatttcatcagcagaagaacctcctcctcgcgcacaaagttcagcctgcagaaactcaagctgttggcgcatcttcagcatttcgctggacataggatctctattgacctgttgcagttatattttcatcaagaaagatatacacgtgtgagaccctgacaaagaaagacaaacttcacctataatatttttgaaacagatatatataataacgagcaacttacaataggtttatttttaatatttcgggcacgatttgcgtactttaaagtgttgagtgtctcctccgcattgatatcagcaggacttatgcaggctaaaatttgacacaatttgaagcataagacatgataaaattctggcgataatatgtgaaaggtcgaagagaaatacacgtgcaaaactacaaaaattctagatgatactcagataatcaactccatcagtaaacaattgcctattgcgattgtaaaagatatctattgcaagagagactgagaggtgatgtattgaccatatatatgtaaaatttatacaatgaccaccatgttgttgataaaaaattcaggttatgtaagagtatgaaacaacatagacccttacttagcttgagtacacaacggaaaccatgtactgcgtacaaaagtaaatttgcccacacaaaaattaaaaaaccaaaactatgatacttatcaaattacctatcataacagtccggctgttaccacctagtgaatcctgccaaaatgcatatacattattaggtaagcaatcatagtcagaataatatatagtgcatgatttgaattaaataccactaaaatgtcaagcaccagcaaagccatgtttcaataagtttttacagtctactataattttcagtccttaattcagcataatgaggaaagttaacttcgtagattttagtacatgatatatgtaggttcaagctaaaataaaatggtacacatacgtaatgaaagatgttaagactatgggcatattcaattcaactaagaatccctcaaacagagggatttggcaaaaaacaaaaacccggccagtaagtaaaccattagtaatgaaaattcagcattttaagaacttgaaatgaatcaaacctgcaaaagccgagtaagtttactatctcgatatggaacatgaacaccctctttgcgcttcttttcatcaccaagtgcactaatgacattgccaagtgcaagaaggcctttattaatatgaactcctgttcaatatccatctgattaataaacaaccacaatgaaatttatcaaacacaattcacgaatcattctgtttaccttccttaaaacgtaaaccatcagagcctgttctctttgctcgctcagacccagcaagatctactaagtgcaatttggcacacaaataatcatcattcatactctccgtaggactggtatcgccaggagatgccggattaagcttatgcatttgctctagtgtgatggtgaagatggcatgtgaacgactataacatatatggaaattgacaaatgtcattaaaaaaagtcactaatgctttttccttttttctttttgacctctgtttggatttataaattatgaaatactttgcttatcaaaacataatgtaaattttgatattttagtttagattttgtggttactaacagaatcttctgtggaaggaaaagtttgtctgttctttacaaatttagtgattgtatatgggtgatttgatcatcattgctttagagggttttctaacaaaatgtctaattctagtggtttctcagatatttccaaccatgcaggttttccatctaactttgttaacatttaattctttctttcatatttaacaaaatggaaagagacaaatgacccttaactagcatactgtgtcttctgttaccctaaccctacctggtaaatatcctctcaccaagagaacgaattgcagtgaaaaggacatcctgttctcagctttgacacgttattcaagtagtaaaaacaggcatgaaagtatatgagtatattagactcctagaaagtgtgtactttacttcaaatcaaatttagacatgccccatatcttcgacaaaattataatagttgttctagatcttgctggagcattagaagccgagtgtaaatgatatccgaaattttcatgttaaaagaatttaattaccttgactggttgttcatatttgtacttcctgttgctctactcaatgacccttgctccaggcaagtggccatttcttttagagtgcttacaccgatttcagtagaccctgccaatgtaataacgccatctgatgtttcacgaatttgtatcggcggcttgccaggtactgttactttgccagcatgcccgtttgcaatctctggtttgctaataaaagttggatcaagcaagtctcttacttcttctttcaaaatctacgaatcaaaaccatttggtcagctaactgagaaacaacaaaagacgcatagcattacaaagaagtagccagaccatataactatcaatatcaagggttagaattcatgtttccatagcagatacataatttattggtaataaggctgaattgtatccctaaacaagatataaatggcataagtcagctataaagaaaatgaaatagcttatggttaacgaaacacggtgataaagatgaagatttgaactactaatgcatcgaacgcaataaggatgaagttttttcacaaacctcaataaaagaaacatgcagttggaattccgtttgatgcttcagagttccaatctttctaaacaaaacactcataacttggggaattattcccgactgaataccatctttaaagccagtgcccatggtatatgttttacccgaaccagtctgcaatatatgaaattgttaacgaaagggaaaggtaaccaaaattgcaaggcaaatcaatctcttgctctcccttttgaggctgttcgaaagttgaaatgtaatattacctgaccataagcaagaactgtggcattatatccttggaacaaaccatcaaccaggggagcaatgcattcttcaaacattgcagacgaaggagaactggtgctcccatagacatggtcaaaagtaaacgaatgcgtaccaatctgtacctgcatcgtttggaacatgaaaacctggataaaaagcccacttgtattgtcggggtcgaaggatggttttttactcatatgcatgcacatattgacattactgtgctgtataagctcactccttttacgttttttacgaaagaaaaaaaatatatatttttgattatagaatgtttaacaatacgagttttgtaaaatcagtgctcatgaatttaaagaacttattgataatttgatacgacaaaaatagcggacaaacattccgtatttcttaacagcaaaacaggaagaagaaaacagaaattcttgtttccattggaagcacataactttcacacatattactactatacccccagtagaatttacattgcgaacaaatccactatactatatgactctgaacattagaacaaaattaggctaatttactccctttaaatcggaaatatggaaaagtaaaaaaaaaaaaaaannaaaagaaaaagaaaaagaaaatctgaattttcggtggctaactgtacccttaggtaaagacatgatatttcttttcctaagtcatgaaaagaacaaaaatctggttgactgttaaaatcttaacttaactggattcttcgtgacctcccaaattagaagttttcttcctacaagattatgatcaacctaagcactactcaatccattatcccgtatgactcgtttgactccgatattaatgccactcaattacataattatgcccaattacgaaaatttctggtgaaagctgagttccagcgaaaatcagattgtgacaccgtattagtctcaaaaagttaatccagaaccagtaatcaaattcggatctagatctttccaaatcattttgaacaaaactataaaacaaaagaagaaatgagaatgaattacagagattgctccgttgaaaagctaaacaactttaaggagtagccaatgtgtatgtagctttcgacattggaaatgaaaggattgatgagtattgcaagtaaggtgagggagagttcacctgaggcttcccagagacgacagtgacgcagtctttacaaccttgaagcttctcgtcaccgataagcggtctgatgtgaacagcaaccttcacacaacaatcttctcctgcttccatagcaagtagagaaaagaatgacgagaacaattttccagatttgaaagaaattaaaacgagagaaagtgaaaaaaaaatgatcagagtgaatgaatatgaatgtgtgaagtattgttatttgaaggaaaggatcaactttctcggagaaccgttctcatttggatgattctccgagacaactgacaaggaatgtgatacagcaacgagatatagacaaaagaaacaaaagaggagataagtcgtatgaaacttttgatgaccaatgtttagagagagaaagtaaatagtaagaggaaccgaagagagagaaagggtagtttgggcaagtagtattagtagtagtagcgggaaggaacaacagctactacatcatcactactagttactactatattgtatacactactactccaaggcaggcggttgcgtttgcgtcacttctttttttttttttgaccaatttgcccctctattttctcaacggtcttctaccgtcattagtttttctctctcttccccgctgtactactcttgtaattaccttcttaccctcaccttgtttatttaataaaatacaataatactacactacaattcggttatgacgtatcggcaacgcagcatcgctgctaaatgctaatgatgtttactaccactactactagtaccgtatttgtggtaatccaaaagtggtgttcaaacacctacaccacgtgattctccaatagctgcaaattattataaaactaatattcacaaatcaattttccttggttgatctttttttcctcttcttttgttaatatcaaaatactgtgtgtgttgccctgttatcgcatgtaacagtaattaactttgaaattttagtgtagtttgaagcacgatggggggtggtcagtgtgcttaagttatgtacagtaccattaattcatgatcattttaagttggtagtagttcgctattgcttgcatataatgcacttataaaaaggcatgtgcctataataatgtgaaacaatcctgtaatttaaaaattcaacccccacaaattatataatggattgggttttatttttttcttcttttccaaaaatagttgtaagacttttttttctttttgattaacgatatttgtaagacttaaaaacgaggatattaaatgctacttattctgattctttaattgatagtaaaggtttgagagagagaagtgtaaagggatgagaaggtaaagactaaagagagtcccacacacgcacaattagtcgacatagccagctggtggtatcccacatcacatggcctttatataactaagtggaccccactttcaaagcaggggaggagggtgagtcagtctctcacacttacagtgagatgagattaatggtcccagaattatgtaatgtgccaaaaggagacaaaagagttgagatttgagattttaagctgctttagaaggccgtcatatgctgccttgtgtgagagagtaggactttcttaaacatacacaaacagctcaccaattcatatatttccctattaaaaaaaaaaaaatcaacacctacctttacgttttagtccccacaccatccctacaatttttttttttgtgaggacaccatccctacaattaattaggagagaagagatgtgaaagtattatgattatccatttcattttattatatttatgtttccaaaaggaatttttctataattaactgaaaagacaaaaatattacaaaatacgtgtgcagtttttttttattaaatatttttacggacgagaaggtttttttttttttttttttttacaaaaataaaaaattaataattatt

SEQ ID NO: 112438 - DNA, 1270 bp, Cannabis sativa
ctctgaagtctaaagatctagaaatgaagaatgaaatgcttggaagttcaagtggataattgaacttgagtagtggaaagatgaatcaaaagaaaccatggaaaaacaaaggtatccaagtgtagaggacaccataaaaaccatcataaccataacaatagaggaaattacaacaacaataataatggaaatcatagaggaagatttaattcgagaggacctaatgatcctcaaggttgttttcattgtgtaaagccatgccacatgaaaagagaatgttatctttagaaaaggaaatccaacataaagacacacaataatcacaatgactcatagaaatctgaaagcaacttcactagacaaaaattagaatattagaatgcaaactataatgatggatatgatagtggagaagtttactttgctgctaatactattaatgatgattgcatacttgacttagggtgagctttgctttctgattttggggaaactaatggtgggaaggtgatcttgaggaacaatcaaacatgtgaaataactagatctggactagtcaacttcaagatgtttgatggcattacaagatcactcaccaatgttaggtatgttcctaatctgtctaaaaatttaatttctctaaatgttatggatgatttgcagatataatgcaagataaagaatgggaaaatcgagctatgcaaagggtcaatggtgatactaaaaggacagaaaaatgaagggttgtattacctagttggagagcctatagctaagtgtaatgcaatcgtttcagccacatcataagacaacaaagaaaccctatggcatagaagattaggatacatcagtgaaaaaggattccagattatcagtgagcaacagttactgggtaaggataaagttaccaaagttgatttctgtgaatattatattttggggaaataccataagctgaaatttagaacaagcacacttaggtctaaggggattctagactatgttcattcaaatttatgagggcatgagaaagtaagaactcaatgagtgtgttcctatttcctatctatattagatgattattctagaaaggttttggtttacttactaaaatataacaatgatgcttttcaaaattttgttcaatggaaaaccctaggggtgtacatcaaaccgctcaaaccgcccgcaccgcaaaagaaatgcggtttgaaattctttgcggtgcggttgcggtttgaatttctcccaaactgcgcggtgcggtgcg

SEQ ID NO: 112439 - DNA, 3773 bp, Cannabis sativa
  modified_base (38)..(50): a, c, t, g, unknown or other
ttttacagaattctatataaaaacctctattgcaactnnnnnnnnnnnnnaaattgcaataaaaaatcgtataaaaaattcatattgcaactaacgctgcaacccttttagaaatcaaaaccgtaagtttgaaaaaaaaaaagttgaaaaaagaggtaattcctcaatttttcaagttatagttattttactttaatcaaaattataaaaaattattatctaattatagaatgcaacatctagtaaatatcttggtatttgtagcaataacataacatagtccaatagcatgagatgagaatgtacatttgaaaacaataggttcatatcatagaaattattattacacttataagaatttcaagttattaataaaatgagcaatgcatggaaaggaaattaatttacacttaaattgaagtgagtatatataaaacaaaataaattaaatgtagggtatcatgaaaatccaaaataatgaatgtgtccacgtgttgccattggactatgaatgcatgccaaattagtcaaatagtcaactcttgtatattttggtttgcttaattaaccacgctgcagaaccttcttacttctcccttgcgaccagtaagaacctcaatggagcccatccgcaccatcgccctggcaaacttagcagcccacaacgagccatggcgggcattcaacgacaccattctcgatgtcgagccactactcttgagtgtctgatccgaagtaaacaaccctcgatgatttttcaactctgcgtagtacacgttatcaagacgaagaggagtacgagactcaagggccacggtcggattaacaccgccgttactcgtcatcatcatcggaggaggacacctggtcttcaaaaaggctgcgtatctacggtccatggaagggtcttgaggatgagtggaattaaaagtgtacaaacggtctgagaaggaagagcagtgggatactccaatggagtgtgctcccgagagagtcaccatttcttcggcggacaatcctttctttgcgaatttttcgatgagttgcttggcgttgagtgatggaggtggtaggttttggcctgcttcgtcgctcagggagactaggccgtcacggcgtcctgatgggactgcgtagttgatgcgtcccgctatgttggcgctgtcacgtgcggcgaaagcgagaatgtctgcacatgatacggttttggggcatatggattcgagtttagccttggcttcttcgattacatcgaaaccacgcaagcttgggttgttggctggatgatctctctcggctgtgtttcctggtgtggattgcagtagaactgaaccatcacaaccctgcattgaatattaaatatatgatcaaattcaaaaccatatatgatatatgttcaatatttagataataataccaattatttttagctataactattatgagagagggaagaggtacgtaataattaatacgtaccctaacaaagcaatcgtggaaatgcaatctaataaggccagcagcgaagcctggattgagtgacacagctttgtttacagctcttctaacgattgactcagctgctggacaactccttctgtaaaaccccactttcagaccagacgatcttgatgaagcagcccaggtggctgaagatgatgatagcagcactagtactactatgcaattatacaccaccgtcgacacagactttccataacccatttttgttgttgctagctataatacgtacgtatatatatagtttgaacgttatgtacggtattcggtatttgaaattatacaaaatcaagtagaagagattggaggtgagacaagtatttgtattatatgtagatcgttaattaactatcaatgaatacaattgggcaaagagaaatgaatatagatgaagatgagaatagggtttatgaggttatttatagtacttataattaattagtagtgtgtaaaacgcaaatggttttcgttttgcaatggaaaacgtgtatatatatagctatatgttgaagttttccaattttagcaccctggcttccatcagctattgtgtttattatttctttattacatatactaatttattggaatcattttcattaatgtatacatgtgtatatataatataataattcactactagtaccttattatatattaactatttccgttgttatatgtaaatttcaaacttagatcaactggcagcttcaaataaaatggtttatatcttttttgaccaatggagaagagatgaatataatatatttagtaatatacatggacattatgtatattatatatatgaactcgttttcatgagatcatcacctcatctacattttccatagacggctaggtttatttgcttgaatgagtatacacatgattagttgatcaggtctcgttagctgactttattatatatattgctaatgagctttcatttttatctatatattgcgaacaagtcgtgtagtaaagtgtaaagattttttcaaggtctagatattagttgaagacaattaagtacaaatattatatttaatattgagcatatgtagtggttatatatgtttgtaagtaatctttcggagagaggtgacaggtatatttacatagtaattgaagagagctagctagacagagaagtaaaacaaaatagtgagcttcgtagaaatttcacattagtttttttttttttttctttttttgagatttattttttagatgaaagatgccctatataaagaaggctgaaaggttgcagggtcatctccaattcaaactaaaatttcatctaaccccaacgcatgttttgcaagtttgtgagcaaaggtattggtagtacacttcacatgctggaatgaaaaattgggaaaatgagacaaagtgatcttgatttgagaaattaactctccaaataaagagagatcttctttgttggaggcgatgacgttcgaaatggatttacaatttgtttcgatctggtgtagagaaaaagcttcttcaagacaccaagatagaatttttaggagggattttgcttcaagactggaaacatcttctcactactacaaaaatcggctttaattacccatttagagggactctaaaagtttttagcatcccctcactattaattacgtgggtgactgaaaaagtattatttagtgactctacattacgggtcattaaaaccttttagaatttcttaatgggcgtcattgtacctttttataatctcacctaaagataacagctacacacaaagtgtgtcactgtatctattttttaatttattttttgaaaaatatattcgatcaaattaataattgtaaattttaaataataactttgaataataatattcagggaattcgataaaaaaaattggttttgatactaaaaggtgaaataagagtccaatttttccaaacaaattatgttactgatttattcttagtctggtaaattgtacaaaaaaaaaatagaaaagctatcatttatatttttacaagttaatctatacattccacatcggtaaaattaacaaaattattgagtataaattaaatgtggaataagttacaaacaaattacatgaccaaaatgtaaaaaaaaaaaaatacaattatttttgagatctattccgcaaactacactacaagaaaaatgagcattactgaggacaaatttcgttggtaaaaacccctgttttcgtcagtattgcgcatcaatgaggacatttc

SEQ ID NO: 112440 - DNA, 6210 bp, Cannabis sativa
aggccacaaatatactgatgtcccaaacatcttaaagtctcactaaagtgaaacaatgttgcaagcaaaaatcatttctttggcaatggctgttgttcttatgagactagtttaattttacatcattactaactagtaacaaccatcttttattaatattgatgatacatcccttttttttttttttaacttccaggtaatattaacgttgtaaatacgagctgcaccttttgacacgacacaaaatcagcacgagcacgtgttcggagagcaccagcacgaccaagcacgaaaaatatgactttagacacaacacagcatgatattacaaatcgacacgacactgtacaaaaattatgtacttaagcacaacacggcaggacaaactcgaaagacacaacacgtaagcacaaataaactacaaaaaaacactacacgttaaaagaccctataataataataataaatcatgtatttataaataataaataaattcaaataataataaaattcaaatataacaccgaatattataaatctatctttaaaatgttaggaccttacattaacaagtatgtgattgattagtactagactactagtagtatataactatttaggcacctcttaagctagctttgagagtgagttctagtgaaatagttatcataaaactattagaaaatgtaaattaaaattatatattaatttatttgtagagtgacttaaaaatttgagcatctatttgtaaatatttcaatttctaataattctagtgatttttttatttatttaattgttcctacaatatttgaaaaactgcatgaataattaaaaaaaaatgcatatagtttaataattaactcattagtgaaaaaaaaaatatacaaaaataaagtacaaattcgaacccaaaccccgtataagaaaacaagttggcctgtttaaggaaaataggctggcctgaataaatcacgataggaaaaatacaaagcgtacccgttaaaattgttggcacagcacaatacggtccatattttttctattgcattagacaactcatattttaaaaagcacaagaaaaaataagccgggccaacccgacacatatttatagcactcgataatatgatacctttactcaagactaaaaatatttcccctaatctgaatgtggcatcaaacaagctaaatgatgtatggaaatgttcaatggatcgaatacttactgttgcataaattatctgtggcacaggggctgctgcatcttagattcaagttttctcagattttcataaactaatttaactttattggatacatttccgttatgctcttcaacatctttcaaaactgcaagtagctgttcccgatatgctgcacttaacctcttctttaccctcagttctgcagttaattcctgaattttcttgtctttatcatcctgtaaaagaaaataataaataaaaagctgttaaatgaacaaggagttgaatacaaatgttaacattgttcacgtgatcagagagtgcaatgttttatgtaaaatattgctttgaagcacaaaacaaagtgcaaagataacatcacagtaagaaaacctgcctagtggtattacacatctcctcacaactataggccccaagttcaaattaccctccccaaataacaataaaaagacagccaaataagtaagaatcagcacaaagcacaattggtgtagaagtagaaaaaaactataaactgaagataatacactatcgctggatactcatcccacacaaaaagaatgaaaaacatgtctaaccccctatataataattggacacatgtttgggaagggaaaaaaagaaaaaaacaacagtagaagacggtcaaaataagtgaaaatcagtagacagaaaaaatgaggcgaaagtagagtgaaaatacatgaacagaaaagtgattgctaatagccccagccaaaggacaaaataatatttaaacatctatccaactccaattatttaggggtttccatttaagctcggcaaatagttaaaaaagcaagaaaatggataaccacaaagaagaaaaaaaaccaagaaaacagataacaagaagcatgtggttaaccagacatgtaggagtttgagtactctattttctgcatcaatgattgatattgactacaatccaaatgaaaaagagtcaaaacttgtcgacgagactgtgagcctaaatcttgttataacagtagcgaagaaactgagaaaatcagagagaaaaagagataggagctgaatgattttctgtaggtaagactcaggtacaaccttaaaaatattcaagagaccgtccactctccacaatccaaatccccaaggacccaacccctcaatgccagaatgtctcctccatttctgtcaatatgctcatgaacactaacaccccaaccaagcccaacaaaccacattaactcacatagctacaactactcatatatctgtctagtatcattatcctattaaatacccccttcataggtgtcttcatcagaaactagacttaaagcttatgtacagtattaacattttaacattttcatattacaaaggagagaaaaaaaaattgaaaaccaaaagttgggagttactttaaatctataaaattgctcaatcatatcacacctcagtcttggaatgaacttatgctgtctagcagttaaaatacacttacaagtatccggtgacccttttgtagctcaatccccaaggggtgattatgttcactcacgaatttcctaacaacccatattccattcttctctcttttcagcaaaatcatggcagtgcaaacgtctcgttgcctaccctgttgaatgtcaacttttgttcgactgtctggaagtcctctacatccaagcccacgagagattattgatccatcacgctcagatttcctagatgataacacacgagtcaagaatcctttttgtctggcataatcatcatagaatgctctaccagcttcttctgattcaaattccatcccctcatgtagttccacatcactcccaccttcaacttcaactgcacttgattctcctgcataagtttctattctctcaactccatcacccatttgcacatctactctgcacattaagacaggtgacaaataagcacattccatttccagtcatgtgtgtcaccaaactaattgttttattccccattcttgaaggaaggctatccacaaatggccagttttatatcattgaagccactgctagagacctttcagctggtcaagcacaaagtagctagtactaatactataatgagcgagtgatattgctttcctagagaatctagtcgtacttgactggacttgccgaaattaggaagataatacaaagagctgaaataacagcatgatagtgtccattcactaaataaatttccccagtctatttatgggatcaaatcaatatattctagaagaaatctttgaaatactctcattaggcatcactttctaactttttctttagagggcattccactaaattgaagcaaaagaaaagtagttactaaatgcaagcatagccctttttctttccaaaaaggaaattttggggcttgtcaacaatttttttttccttagtactttatatgaactctttcacatcttaattcaaaaagaatgcctacattttttttgaagaaggacaagataaatacaagaataaaaagcatctaacctacattaacaccatattctcaactatatcaaaattaatacagacaaaaacttccaaaatatgacaaatgtaactataaaaaatcaaacagcattctccctattttaataacctaaccatgtgtccagttcaactataaacaatcaaacaaaacaagttgttgtcctttcataattgtaacacacatatttcatagatcctacttcactaaaatacacaaattatcaaccttccgtagcacacaaaattcacaaaacttgtgtctacggatgaatatataagatatttaaactcttctataaattaagtaaaatgttaattatagaaaaaatacctctgaataatgctcccaaacaagctttgagcaaccaaaatcaaactaagttgtggaacctacatgcaaaaaacctattaaaatagtcaaaaatcaagataaacattggagacagtcaaaggaagaaagtgttcatggaaaagatacccaaaacttttcatcacattaaaaaccatagtaccttatttaataacaaatgatacagaagcaaatttatataccctaatgcaccatttccttctcactttctataatgattattcatgggatgtcatcatcatcgaatttgaaatgaattatatagcccacattgaattgatctaagaaatttaacagaggtagaacataaaatatttttctcaactcaaaatattcttaaaaaaacattaattagtctaattttagctgctcctattaatttttgattcaagtctactcacactcgaacatcgtttcaatataaaagacctgaaattgaacaacattacggtctgggttttatttaagtgcttaaattgacaagagaagagtgtaaaaaaaaaaagaaaccattgagaaaaagacaaatttatttacataaatatatatacatatatatatcttaccttaataagaaatgcctatttaatagaatttcttgtggctttaaaagattattttcaaaaattgtgctagttttgacagaaacatgtcaaatactaacaacaatgctaaatggatgcaaatgaataaaccataattgttcacaacttctctaaactaactattagtcggtagcattgtccattttgttcaaaacttctctaacaggtcattacgtaactactcagccaagtattgcctattttcttctcctataccggataaaatttgaaacaacttcaaattatctctccaatcaacaacacaacttgttccaggcaacatatttgtcactatgagtagttaaaataattacaattcaaattgcctagaaacaccataaattagattttatttaaagagaagtctatcaatgttaccaaacacctcatcaacaccaagatatagaattatccgaaacttaaacgctgcaaagtactgaaacaaaatatatgtaggaacaaatacatacaaaggggattcacatgaaagaaacagaatttttttattgaaccaaaatcaggaaattatgaaagcttctttggccctggcccttaagtttcatatccccgtagaactttatactatacagaacacatagaataaaactcaaacaagcagccaaagtttcaacctcattggcagcctcaaaactcaaaaccgtgagtacagtacctgttgttggtgaagtaaatgcttatccggccaatgaaggaaacggaattcctcctctcgatctccgatcagttaccgctgatgagatagtgacaataccgaagaaaaccacaatagggagagaaaaacgaggaagttgtgctctgatgagagtcataataataaataattaaatctccagcaaaaataaatagataaataataaaaaattaaatattgggcttatataaatattagaaaacaaaggtttgtattaaatatagggatttttgatattttttttttatttttatttatgtttagttttttaaactttttcataaaatctgttttttaattttattttttaaaataaaaaatacttttattgtttaagttatctttccctaatttttttaagaattttttctataataaactaataaggacagtattttacatttataccctgaaaaggaaaaaataaacataaatagaaaacaaaagtttctatttacaaaaataccggcctaaccaaaaaaacaaaagaaactcctccttctttgcgagcccgccgaaacaccccaatccactaaatctccactgttttctttcaaaaaccaaggaaatcagctcaaatcaagatgtagatctcaaagaaaaaacaatcaaatcccgaaaaatccaaatacaaaaagagaattaaaaaaatagagaaatcgacctccattgctgtaaaaaaaaaaatacaaaaacggttgggttttatgccctaaataaaactttttacaatctgattagttatcaatgtaagaaatttgaagtgattgat

SEQ ID NO: 112441 - DNA, 4720 bp, Cannabis sativa
tatatatatatttatatataaagggtatgttgacatgtaccgataacaggctttggtgtctcaataactaaaatcagcccacaatcatagttgaaaatgggatgtttgtgcatattatgcgttaacagctgaaagttattcttgtcttcatccagttatctccacttcagcacaagaagaaacaaacaacaaattagaaacgtcatagaatatgatccttagcaactaaacttattatattgaacagaaagtccacgtacttatccattgattaagttgactgttgcaatgatatctcctcttagcttgtttctcttaacttgctgagatcaacaggtgttttggataaatttgatattaaaatgacatctacgattccatcatctttataaggaaagcagcctctaatgctgactccttgcactgaaggtaccggttttcttccactatgtctgttgacaggttaagcaatattggtcgttttgggttgtaaattgtgcgttcgcgaactctagcaacccattttgcagcttcccataccccaaatctgaaatatgtcaaagaatgtaaaaaggttcatgaacacccaggttatacgttgctcattggctccttgatttgatgattatcaatcaagctataacttttgttaaagttgcaataagaaatgagaatacatcaaattatattttctagcccggggcatgaatatgaacactacacaactaatgagtttgaaagagagaatgaaaacagttatataaattaaacaatgtatctcctcaaggatcaattaaatgccattcctaatgccgttgagggttagacctcattatttaatatgtgacagaggaatctaaaaaaggaacacagagattacctggtattgaaagaagaggatatcatgacagcaggatatgaagcatcctcctgaatgttgtcataaggagaatatttgcgtatagcatgaaaatcatcaatattccaagggtatccaaactcttcatattcagttgctgtaacgggtaaaatggggtaaagaagagtgttggttgcatctaggaatggaacctgcaacagaaaaagtaaatggaataatacacaaaaagcattcataccatggtaagaaacaaagaagaaataaaagtaagactgttgacctttaaaactgccgcacgaaataaatcagggcaaacattaatggctgaagcaactaaaagtccacctgcgctgtaaccacaacccgcaagcttgttttcggagacaatctctctttcaataaggaagttagcacaagagatataatcttttatggaattattcttctttgtacctctaccatcatgatgccacttcttaccccgacctcctccacctctaaaaagatatcacattatgttaagcaacaggcagcgaaaggatcacttacacttaacaagagaatttaaaaaaagaaaaagcaagctagctttgaagtatgaaagacaaagcactgtatattcgaaagggaaaaaactctttaaccaaaaaaaacatgggaaacaactgtatccactacaataaaaaggtagctcagttgcataaaagacaatgtaaaggaatatttcttaaggaaggctaaggataatagctgaaaaattcctaagcccactcgaaagcagcaggcttttgctgaactctatgtaatccataggatgcatgacttacagagtaattacattaatccaaatattagcttcatatattactatagcctttaacacacctaacatcagcatatgcgataatccaaccacgatcaagaaggcttttcgattcactccgccaccgtttatcaagtatctccccataagctccatgcccatgaagcaagccagggtttttatcttgtctcttaactttgcttgagtatacaatggtcaatggaacctcaactccatcataggaggagacatgatgacactcacatgcatagaactcagacagatcattccacaagttactattatttaaattcatttcattcgcagagccaaaagttatagtctttgaggtttgttctggaatgcttggcaaagaagatgttccgtatagaacttttgttctatcatgaagaatattttgttgttgaacaatattccatttcccatttgataggtcataatcaacaacggcatcaggcatctgcagaaatttattacaacataccaattcaaagacaaaatatatcctttaaaaagcagcctctaagtaacacattcaatttgtcactataaggtatgttatgttaagaaaacctactaatcacgttgacataaaagtacaataaaaaacatcttctgaacaaacagaccataaggaaatacataccacaggtgatgatattgtaaatctcatggttgatgagtagtagtcatagttcggtccaggtgaaatttgagatacatatttcggaagaggcaggtaatttggatgaagctctttcagagaaactggtccctatcacagcaagaaggataaaggagataagaccattatggaactgtttttcaaatgtatgatgcatataacttagaagtgactaagtgagaaaaaattagtttcatcaacttaccttaccagcaggcaaaggtagaggaactgaacaaagtctgaagtttcgatcttcccttaaaatcattaccaagtttgtattgcaaaagtccacatcctccacaaccaaatccgagtcattgatgaatacatcctacaataaacaagaatgtgaattacaaaagaaagtatgaatgaaaaattataacattaaactgaaacagttgccaaaattatagataaaaagtagagttaagcttggtaggtagaaccaaatgagaattatactccttaacataaccaatgaaaagaataatcacaaccaataaaagtgtactttttaaggcatgaaaatttaaattcagcccacagacctcccatatccttagacaggtagaagcatcagctggactgcgaagaagataatgacattcaactgggtggcctgctttgggagcatcagtaaatagaaaaagcaatccttgatgatgctcaagtatgcaatgagctagaccttcacattcccatactaaagtcaagccagtcaagggatcagctgcatttatcagaaagatctaagagatggttatgattgcttcatcattttaacaggaaaacaaaatcaaaatgtttactccacaaaaagcgatacctttgaagatgtaggagtgaaaatatttacagctacaaagcggaaatctttcgtgtgtctgatgttaacgtaggtactatcatccaattcttcaagaagcaaaacatcctcatcagttgatccaattatgctgcagtataacctgtgacacaagatcaagaaaaaaaataagaaaaagaagacagcattacaatcttaaattcaaacacggaaagtcattagaaccccaatggtaaccacctgcaaggccgtttcttctgatctgtaacaacataaagcaatgcctggccatctttggcccatgccaaacccgaaacgcgatcaacttgaggcttactacataatgcaccagaattcaaattccttaaagataatctataaaagtcattgtctttatcatacatggtgtatgcaagaaaccgatgatccggagacacttcagataattcttcataagcataacctaaatatagttgaaataacaaactagtaaaacgactaaaatttacttatgccaattttgtgtcttcatgaaaccaaatcaaaatcaaaatacctccaaatctctcagcttcttgattgtaatcaagcaatttctgctcaattctcctccctgtagtgaaatcaaatccagcagaaggagatttatgcgaaacgaactcttcgttcaagctcgccaatcttcgacatagcaccggatattgctttccctcttcggcgcgacgatagtacaacctgcagcaatatcaaaacgttcatcaatttccaatttccatcagattctccataaccaaacatcaacaacaaaagcggtttttcaccatggtccccaacggagaggaggcgtagataggtcgaaagccaatcgagaagccatctccgactggaccttgctctgaagtctttcggtatcaatcatgacggcctccgcgtacttctcctcctgttccatgtagatatccatgtgacgcattgctactttgtcgttcaagcttgacatccaactgtaagggtcctcccatgtctgatcatggaagctgaagctttggggcttctgtggtggcttcggtggcgtcggtggattcgccgccttgggggccttgtagtgagctcgcctgacgagaatcgtcgccggatgatttccaacacggcggagtagcgtcaaaagctgacgcattgtcgttttgagaataggatggggttttgcacttgttgtattgtactactaatttggcgggttttactttgtgtagggttttagagtcacatgggacacaaacgacttgtcgttcatatttatctaatgattatgataactacattatattttcatgacaaatatatttagtacttgtttttaataatagttaatggaaacttacaaaaatattagaatttgaattaatttttataaaaatactgtcacacgaaaatcttttcaaaaatactgtaattttataaaacaccagtaaaaca

SEQ ID NO: 112442 - DNA, 1763 bp, Cannabis sativa
tctctctctataaatatatatatatatatggtggtccgtacaaataaaaatgtttttattttatcaaatttatatataattatcaatattgaatgaaaaattattaaaataaaatatatttttgtaggaatagaggcgagaggcttcattttcggtccatcaattgctttagctattggtgccaaatttgttcctctacgaaagccaagaaagttaccaggtaatttgaatgataatataatttttttactgttttattaggtgactttttattaaattgattaattattaatttttgaattattattgggtaggtgctgtaattgcagaacattatgttctagagtacggaagtgacaaactagagatgcatgtgggggctgtaaaccctggtgaccgtgctttagtaattgatgatttagtagcaactggtgggacactttccgctgcaattcgacttttaggtgacactcaaaataactaaatatttattattatttctaaattacttccccactcactcagtatactatcaattttgttattttgtagaacgccagggggccgacgtggttgaatgcggttgtgtcataggattgcgggacaccaatgtaggttttttcttttcttttttttttaaaaaaaatgtggtgaatttcaaattcatattgtaatttattttgacagggtgaaagtaggcttaatggaaagcctctttacattttaattgagccacgtcagatggataataattgaagtgaaatagttggctgttgctgctgttgctgctgctgggactgggattattattaatattattgatttggaaaaagaacaagaaaatgttttgagcgactactcatttgttgtttttagatacatatatcaatgtgtttagttggttattaatttagtacatgtctcaatgattctcctgcctactttttgtagattatatattgttaatacatgtatggtcttataatcttattatttcatttctagatgttatctgtaatagtcttggtaaggtatcaaatagattcccttacactagaaaaaatatatatatatataaaattgggctttcccttcaaatattttttggtttcctttttttgggtaaaattttggagttatcttctatttccaaaagtaaatttgtatacctcatacgagtattgtatttaacaagttactcgtaattttatggttttgtattttttattatttttatacttcaaactattttttatatatatatttttatgaaaattcacataacaattaatggagcaacttaaaaaaaaaatgagaaaattacattgttatactcactttactttatttattttaatttttacctttattttcatattctttaagatatacataattttatagataatgtcccaataagaccatttaagttaatataaattatatgctagacttaagtaaagagtgaatatatattagacaacccactcataagcgtccgtatattttaataaaatatcataagaaagtatttttgattaatgaataaaaaaagaagaagtattattcaacttatcccaacttaaatcgcaatccaaatctatatgagataagttgaaagctactatttttttttatggaaaacttactaaaatattggaatttagggtaactgttacaaaaacactgtcacacagaaattttttcaaaaatattgtgtttttataaaataccagtaaaacacaaaacagaacaactcaaaa

SEQ ID NO: 112443 - DNA, 3049 bp, Cannabis sativa
  modified_base (155)..(157): a, c, t, g, unknown or other
  modified_base (3017)..(3018): a, c, t, g, unknown or other
tttttttttcttttaaattgcttcataaatttttaattaattttttttatttatgtataaataataggaaaaaaaataggcctttttttaaaaaaaaaaaataaaataaaaaaattgggccttattagaaaaatgggggccttgtgcaatggccnnngctgcccaatgcttgggccggccctggtccgagggataggataatgagaaaaaattagcccattagcatcttagaaccttaaaagaaattctttagaccaacccaccacaccctcaatgtctaacaacttcttatgacggaactattaatcacgacgaaatcaacaaacctaactcatctttagtatgaaaagttgcatgttttttgataaaccctataagatttgttctaggaagaattgacattgtaagaacaaatctatacttgggaagccaccgaatggagacaagatcaattgcataaggcatggaaagatgtctctttccccacaccacaaactaggcaaccaacatcaatgaaattcatcccttgcatggccaagttacatttagttagaaactaatctaagcaagcgtgctaaataaatacttttaacttttgagggaatagagaggttccataaagtgttccaccaagaagattgcccttagaagaagtaaaattcttttttgtacatataacaaggaaaaattcttttttgttcagtcggctttttttgttattggggaatttatttctgagggaggtgaagtgaagtgaaggcacaaaaccaacatgtaatctcgatttccctctctttactctttgttttatggtttgattctttacatcatatctctttaactctctctttttttttctcttttctttcttagtatttctctctccatgagagccttttctgctctctctctaactctagagtcgaagcaacaatgcaagttgtaaaatattctctctttctgatatggttttcttttcttttatacaattttgatggttgagaataagctattatgaagtttgttagaatcttgagagagtattgagttgtttgttgtaactgtaatccccttttgttgggagttggttgtgttgctgtgttgtagagttataatgagctgttgagcctcctctgttatttatattccttgtatttttaattgagattgataaaagagacaacctgtgtgggaatttatgcaataatttctacctaaatttgcatacaagtagtctgaaaaagaggtctctttcttttatgtaattttatatttttgtctttgagggtcatatttgtttttacagttaccatccttttgtcaactcccaataagttcatctagtgtttgaacttgttgagagtcaccaccttagttcccatgtctgctaggttctcttatgtaggaactttttctacttgaatctctccttgcgtcactttatgcctgataaagtaatatttgatctttacgtgtttagtcctgtcgtggaacacagagtttctacacaggtgtacacaattatatcttactatagagtaaactataagaacctatttaagtagcttaatctctaagtgtcctttcatccattaattagcttctttaatagtttttgtggttgatatgtactcagattctattgtcgatagtgcaaccactggttcgagttggactttccaactcacacaattacctcttagtagaaacatgtaggaagaagtagactttttgctgttcctatccccagcataatctgcatcactttatagcatccatatgactacagtaggcaagaaaaatcatcaaatgcttcccaatagccctggcctagcactgccgtcttttggcaccgactgatgacagtggtttccaattggggtttcaaaggttgagatgaggttttgggaccccgaaacaaacaaaatatgattattcgcaaaaaaaaaaaaaagtcaaaatacacccaaaagggtccaggaacatgtaggtctgagaactgccactatgatgtggcagtggtcaaatttttgaccaaaaagtacgtacaacccttcagtaaaacgatcataacactcttaatgtttatccaaatgacttggttcaactttaattttaaagatcttttcaagtaagatctaagtatgtcgcatggaaatcacacaattctgaagttatcgggctcaaaattgactcacaaaataggctagcacactttactcaggaattactaagttgtgctatgtggggaccacaaggggtgttgggagagctatgacacaacctatgaggcatcatggccaagatgtttaagcccttagacattgctctccaattgtgtgacttcctagtcgagaagtgctttgccttggtcactcatctccaattgtgtgtgacttcctagccgagaagtgcttccccttggtcacacttctccaattatctaacctcctagatgagaggtgacactaccttgtcactcctcttcaattattttgcttcttggtcgagaggtgataccccttgtcactctccaattttgtaacctcctagccgagaggtgacactcccttgtcactcctctccaattctgttattcccaaaggactatgacacaacatttgcgacttcctagccgagaagtgccatcccttggacactcctctccaattttttccattccccaaggtgaagtaaaatgccacataaggaacttcaatggaggaaaggaaattactaaatttaacgacaatcccaataattgtgggatattttcctacaaatttgggatcttttcctagatttatatttatttacatttattattcattattttgtattaacataaagattttgaagtgagataccttgacgtgtggaggataactaacaaattctaggcctatatatataattataggctagggtttagggactgccttctagaattctaaatcacatcatccattattccatcgccactgacatacacatttactgtaaagcccgcttagttnntttggaaattagcagttatttatgttaatca

SEQ ID NO: 112444 - DNA, 5592 bp, Cannabis sativa
gtataaattaaagtttaacataattatataaaaatatgatatataatttaatttaatataatacaatacggcctaatacgactaaccaaacaaatccttagagaatatcactaactaatcgtgaaacactacttatagaatgtgctaaacactattggtgcctaataacaatgcttttatcatatatacatgtatgcatcttttgctgtcatattcacatcacatgcatgtgcacctgtatatatataaatatacaatcatataataaacttaatcctaaaaaccaaagcgtgcatgtgagaccatgatatgaaactttcacatcactacatttgaaaaagggacaaaaagttgaattgaattgagttttacaaaagatctttacattgatgaatttcatcatatctcaacaaaaatgcctaaaaaacactatctacttttctactttcctacatcatttcagttaccgagcaatcattgctgccgcctgttgtgaagaaaaagaatgaatgttcttcgaaatggaagctaaaaagatcaaaccccacatagccaaatcgagaaatttgaggtaagttttgtagtgtaatgactatacaaaactcgatcgaaaaggttttagattacgaaaacctacttcaagggcgctcctttatttcgcctagtctacaagatcgatcgaatttcatgtatgagaattggaaagagagattgaagttagaagaaaataatgcagaaggatatagattgattgattatacctttgacattttttggttctgtatatgagcataacactcatcagaacaggaaccattgctgaacacaaatgctccaacgagtgtccactgatgaaataatgattggaattgtatattttcttgtctgctatggcttcgaatttcgagaaaaggtaaacacctgcatgcagccatggaatgaacataatgagctcggtagagagtcccatattaataatgtacggacacttaggatgcatgagttacttttctcattgccaattagtttcgagataaaaccccgtacatgttaccatacactcaccttcatcttactttctaaacctcatttccgccacactactatactcttaagagcctggattaggtggaccctaagcacaaacctaacccgcctatttaggtcattattgtattaagagttgtgttcggaggaaatacaatagtatatatgagatactatatgtactgagtaaaactctttgcatcaaaggagcctaaaggtctcccatcatttgtaactagcttttctcatacattcaatatacgattcctacggtttaaatgtgttcttgaatttagagttctcggttcttatcagaaactaggctccccttcatccccacctaaacacgactcgcacactatagctttttagtaagcctagatgcaaaattgagctatgcaaaaacagatgaatgctatgtagatgccaagaaaagacttgtaacaactaaaccacatgaccatttaagctacccgaatacagatatctttagcccggaaggaataaaagtaaaggattcgaatcatgctcttccgaatatccttctcacttaaccagtcagtggaaaccaattcaaatgaaaatgccaacgaaaaaccccgatgttataactcacatgaaaaattcggttgaccaaaataaatcagttgtaagaaataatctaatgaatatcttgacaagactaaataaaaagatggatgtacctgttgcccaaaaccaatatcttgaatgagtatatttcggtctatacacaaatgccatagctggaattgctatagacggaatcaactggaacatcatgcacaacctaagatcattatacaatctgcaaccaactaccaaaccatattaacaatatatcgtaaaaacaacacaagaatataagagaggcattcgaacatagtaaaaaaactaacctttcatgagcggtacttaggaaagcagcgagaatgagagcaaacagaaaagtcaagccgatcttttcacccactctttctattaggcaagtagaaaaaagtgaggaatatgccatcatcatctgcgttttcccaacttattacaacgatttctatacaaacatcaaagcaagaaagcaaaaaaaaaaaaaacacataaaacaacagggcaacattgtgttagttcctaataaatcctaactaaccttgttagttatatctgttattttcataacagttaactaacttaactgtgttacttctcggtgctaaaatacacagcttataaataaccttcttcaaaagggttttggggttcaaaagggttttgtattgaactgcatatgtagatgaatgtgtaagctcgggtgagtgtgtaagaaagagaggaacacttcagagattttcgagagaagatccaactctcgaatgttgtgtacttgtattaatgctcaattaataaagatacaaagatagtgttccgaaactggagtagagatcacattgatcccttaaaggtaaggaaaacgcaggaaaacaagaaacttgattcaacaaaaaaacttcatatcgaacaagatttttttatggcctaaccggaaatttagactcagtgattctccttatgccttccaaacgatctgttatataaatggccaaataacaatagtatgcccaattattgtaggtttgatgatagacactcggcattcattttcttatctttctattcctttccccaccaaaatccaacttctaaacataatctaagtgtttgatttgtgttcatattaactctgttttgatttcgttgttgaggttctttgatcacctttgttacttagagatttacagtacaatggattcctaaagagatttttgaaaagacaatttaaaagagaagtttataaggcctaattcagcctaacaaaaccgacccgttaaggtagaattgccttcaccttattaatggaccgagtatatatcacaagcaaaaagatcatacatttttcttgaattgtttcatccaaagtcacgatatgtgaatggattagagtgtcattagagataattagacaatttaacatgtttgtctcaccatataattacactgcaacgatgtaattaagaagttccaattacactctccaattctcttgccccaaaataaaattgagtgtaattacaatgtcaatatagtataattacacagttacttccgatattcaaactttgatcagcaaaaattgaatgaaacaacaacaacaacaacaaaatgtgatatgattaattattactaaccggtaaagtatcccaaatgactctatcatcacaaggcttcaaatgataataagcagacccaaaagccacacctgtaattccagcatagaacaaagcccaaccccaaacttcacctctcaaactaaaaaaaaaaacacaattagtcacaagaatccaatcacattatcaaaactcaaaactgaaaagaaatccaaacaaacaaacaaacaaaccttatattaaaaaactctcctttaacacacaacacaaaacccaaaacaccaacaaccaaaaatgggaaatttgtaaccacattcaacgtgcttggtactcctgaaacaaaacccatataccaaaaatcaactcttttaatcaaaaatcaaaaagaaaaaggtaaagtttttcgaaaaagggtttaccaagaaaatttctcatgtcagcaaaaagatggtgttttggagagtgagaaatcttgggagtaacccacatgaagattagccataagagtgaagttcctgcccagatacgagctttactccatagctgattatgattctgatgatggtgattcataagccataccatctctgtctctctctctgtgtctctgtgtctgtaaagtttgaatcctttttcttcttttttgtaaagaaatgattttttttaaaagaagtaaagaaatgatttgagacggttcttttatggtatttgaggttgttacacgtagcggagggagtactgaatgggacagtcgaggttgtcgtatcatgatttggtgatacgaaggccaaaaaataaaaacatcaattgaaacaaaaagaaaaaatcattcatttattagtagatggaataaagacaaaattaaatattttgtaaagttatttgtgatataaatagttaattaagtttaatttttaattataaataaataatttaatttaattttttgcggtagtaatatttaaattataattttaaaacttctataaatagtgttaagtgttaagtaaattatcacgtgtaatttttaattggtcaaagtcattaaatttttattatttttttatttttttaaaatataacaataagaaaataacgcgtagataatgatttaacatttaatattcaagtacatacgaagttctagagatataacttaagtaatattattgtcaaaaattaaaatgaaatatttatttacaagcgttaaacttaattatttataccgcaaattaatttattttgtattaaaacaatatttgaggtaactttgtttgccacgtggtttgggttttttcttaaatgttcaaattaaaggcactaaatctttgtagttgttgaatttgagatgagtattgatattttcaagaattcttggcttctagaaaaaaaataacttatttgtggttttgaaatatcttagtttggataaggtaaaggtttctaattttatgaaggttggagagttgttgggatgaaggaattcttaaagatatttttgtggagagggatgtaaagtttattttaagcattcattagttccccatcaatgtataacgatatatatggcagaattgtgagagttctcgtgcttattcgatcaatagtgtgtatcgatttcttcaagagcttaagggtgatttaattagagttggtaactcggtcttttaaaaagagttgtgagatatgagaatgccttttaaagtcaaagatttagtttagaaagatgcttccaattgtcttcctcttctacttagcttattatgggtatggttaggtggtgtgtgactcttctagttagcttattatggctaagacagcaagttgaatgggggtggttgattgtgatcttgctaaagctatcggagttgaggaggtgttgagttttttgaaagaaacagggcggcatgatgtggtggtagagtcgaacagtttggtcacaatccaagctatctgaagttcgttagatatatagcttctatttttgggttctgcattttttagtgcaaaagaattctttctactttgaataatatatttttgaattttatcaagggatctgctaatcgtgttgctcaccatttagctagagtttcgtggttaaatgttggttgtacctatttgatttctctgattctgagtagtttacctaatgtacttttcctgagtagtttggctaagtgggcatttacccacaagaggttcggttgtatcccgacttcctctatcccggaacacttattttgtaatgaccgtgaggtctaatttattttgattataatatatgtacgcttttcttcaaaaaaaa

SEQ ID NO: 112445 - DNA, 3542 bp, Cannabis sativa
agctagagtactcttttcaacagtagattaggcaggccgagcccgaagctcctgttaaaccactatacttttctgtgtctattttatactatttacaatactcgcatatatcatatactatatttttcgagtactcgctatcctaagggagtactcgcatatccaatttttggtattcaagcaatccttgaatactcgcacaaaatgggtgttgtcaaaattcctccgacaacagagagaaatgtgagatttacactgatcaaaagagtctcaaatacttctatactcaaaagatttaaacatgaggtagacacagtgcttaaagtttgtcaaggactacaattatgaaattctttatcaccccaagaaaaccaatgtggtagtagatgccttgaatagggaaggtcttggggaagtttctagtaccaacgtgatctcttctcaactagcaactgacatggttaaagctggtattgagtttatggttgccaaactaagtatttgacgctttagcttgatatgttcgaaagaatcagaagtgctcaaatggaagaccctgagttggttcagtctaaggtagaggttttagctggttgggctaaagacttttcaatattagattgtgggatggtgctttataaggctcaagtttgtgttctaatcagttgtgagctcaaaaaagctgagttgacttttcaattaaaaggcttttttaattgattaaaaaagtgagaattaatagtgaaaactttcctctggttctagctcttgcagttgcaaatctggtgctatcgctaaaacaagatcaaaaaaccgtgggaagttgaaatctgctgctgagaattcgaagaaaaaagctggtaaagtagtatgtgatgagagtcgcactgatcttttggatcaatttactgagattgaacctttggaggtctcggatgtggaggttctgtaggaagacgatcttgcgctcaaagatgtcttccaagctccgttatccccttagtcttctttggaaacggtacagaggcaggaggaagttcgaattgatgctcggaatgatttcatccatttcttcaaggcgaatgatcaatgtaacggtaacctttagcaaggtatgaactcgatccctcctatcctacgatctaactctatgatgcgtaacttggagaattcatttaggaatacagagcaaagtagtaggaaagtgaagataactttagatgatattgaggaggaggttttgtttcggaaaccctcaattgtgtgttatgttcttggagttaatcctcctctgcacatacttgagggttttgcaaataggatttggaaagataaggttgatagagtgaaggtgctatcctatggcatatttcttattcgatttaacttgatggattatagagatcaggtcatcaatgggggatacattttcttcaatcagagacctgtcattatgaagtcgtgggatcctaatgtcaactttaagaaggaggatgtcaaatgtgtaccaatttggattcaacttgaggatttggagttgaaatattggggacaaagatcactttttaagattgttgggcagctagggaaacctctaatggtggattctgtcaccaaggaaaaagagaggctgaactaccctagagtgcttgttgaggttattatggatcaacatcttttggatatgctagaatttcaaaatgagtttggttcgaacacatcagttggcataaagtatgagtggaaaccagtcacatgttcccattgctttggcattgggcattccatagttgactgtaaaaaagttgcagctgcaaaacaacaatgggtgctaagaaaagataacaggaaggtcatagaaactgatgaagagggcttcactaaggtctcaaaagggaagaaggttgacaagaaagagaagtccaatgatggtgttgctgtaacagtgataaacaacaccttccaagctctgtgtttggaagaatcaaatgacattacaaaggaaatatcccaggaaatgaagctggtataattgaggaaactgcagaatatgaaggtaacacaggaggggggagatccctctctctctccaatggataaacttctatgttggaatgtccgaggagccaataatcaatccaaacagcaattaataaagtaatttattaatactcaaaagattgtttttgttgggcttctcgagactaaagtaaaggctccaaagcttggagtcttatactctaatgtatatgatggatggtgtttctcttccaatatagcttggcatgcaggtgggaagattgctattgcttggaacccttgtagattcactggtgatatcatcaaatgtactagtcaactaatgcatttgaggatttcaacagatgagggttttaatagttttgttactgtggtgtatgcttctaacaattgaggggcaaaaaggattctatggaaggacatttgtggcttgtactctgatgaaaattggtgtctgatgggggactttaatgacattttggccaaagaagagagagtgggacataggtaagatcctctactgactctgagttccttaattgtgtgaatttctataaacttgaagatgttaaagcaagtgggaactttttcacatggactaataagcaaccgggtgcagatagaatatatttcaagattgataggataatgaccaatcaaacatggatcaacaagtacgaatttgctgaagcagttttcttgaatgagggattatttgatcattctccagctattttatctcttcatcctgaaatggtgaggggaaaaaagccttttcagtactttaggatgtagaaatctcatcctaagtatgatgatcaactcagagaagtgtggaatttgagatgttcgggcagtaaaatgtatcaggttgttaccaaattgaaacaattcaaagctagactgaaaatgctaaataaagaggggtactttgatttaaagcagcatgttgctaaggccaaatctgatttggaggctattcaaaatcaattgcagcatcagccacttgattccactcttcacctacaggaaaaagaaattcgtgagagattagtgaaggtccaaaaggattacagctcctttattcagcaaaaggccaaacttgattggatacaaaatggtgatgctaatactaccctatttcatgcttgcttcaagcagagattgaggcaaaaccgcatcctatctattgagaaacaagatggcagcagggtcactgatccaaatctcatcactgaggccttcctggacttttataaaggtcttcttggcactaaacgagaacacagaagataggtagagaggatcattctaattaaaggccctatggtgacatcgagtcaggtagatttcctattgtagaaatttacaaaagaggatgtaaagtaggttgttttcagcatacttggaaataaatctctgggtcccgatggcttctctagcaacatctttcaagataattgggagactattagagatgatgtatgtgttgggttttatgc

SEQ ID NO: 112446 - DNA, 3592 bp, Cannabis sativa
catgaatctcttataaaccaagaattctgttatatatgcacaatttatatagaatagatattgactattccacttattactaattagttttgagatagaatcagataattttcaacatcgatcttatcccatattatctaattagaatctaactttttgtatctaaatgtaatttaattgtaataaaatatataattttttgttattggattagattgaatgttgttctcccagatatactacagtaaagtaaacactattattgagtttgttttacgctatattagaatcagaatctgtatcacaattattagttacatgattgctattcttataattctattagttatgtaatataatacaactcagttgttcatatatttaccttatatatatatatacttctcttttattaaatctaaataggaaactgtgaaatcatcgcaaacaacaacaatcaatggaggtagtaattgctcttattccggtgttaacggaggaactaataaaggctgcaagaacagaaagtgaatttgggagtcagttaattcagttagaaaataaactaaaacaggccactgaattactcgacgagaaaaaaagtctgaagcaggaaaaagggatagtcaaagaaactttgatccaattaaagggacaggtttttgatgcaaacgacatactcacagattgcttaatgaaaaaagaacccacgcaaagttgttgtttcagttttgtccgtggaaatgatccatttttttcgcttcaagaatccaagaaattgaaggagatcaattcacatatacaacaacacatcaacaccttgggtctgtactctggacatctagaaaaatcgagaaagtcgggttgtaatgatgaagaagattatgatccccagcaagcactgtccctaaaggacaagccagctggtattattggattagaagaagatacaaggaagctaaaaaattggatcgttaacccaacaaagccaggatttcaaatcattgccgtggtgggcatggggggtttggggaaaactacccttgtccagaaagtctttgatgaaatcccaaaagaatgcagtgtcgtatggttgaatgttaccaggaatttcaacaagcacaggattttgaagctgatgttgaaaaagttagcagatagaataccaagcaaacttgatagttgcaatttgatggaagaacttagagaagcactaagaaaggatgttaaagtaaactacctaattgtgatggacgacgtgtggagtatggacaacagttggtggcatgatttgaagtccattttcactttcgaggataaaaatatcaccatcgtaattactagcagagatagagaggctgttgatagcatgggagtggaaaaggatctaattcatcagccaaatcctctaaacaatgaagacagttggtcgttattcaccgcttgggcttttactgataaaggatctaattcatcagccaaatcctctaaagttttggaggaaataggcaaaaagattgcggaaaaatgtggaggacttccactatcaatcaagactattggatccttgctttcaacaaagactagggtcaagacatggacagaggtgttggagaagtttcataagtctccaatcaaagggaatgatgaagttatccagtctcttcgatggagctatagtgagttggatcctcatcttcagcaatgtcttttgtgcttgtctatttatcctgaagactatgtgataagtgcagagcagttaattcattggtgggttggggaaggctttctacagaagaaagcaatggaggacaagaaaactgtattggaattgggctatgagtgtctttcgaaactggccagtaggtgtttgatcgaagttgttgatcgtcgcagctacgatgacaaagtttattcttgcaagatacatgatatggtacgtgagttgcttataacaattgcagatgaagaagaaggattttgctcctttaacgagaagggtatcatacagtggagaccagatttatattggttaggcctcacagatgaaatggaattaacttcattcggagcaaactcgaaacttcgagcattgtttctcactggaagtcgtagaatcgatttcagtagaaactcaggacagctactttctctcagggtcttggatttatctgctggctgcagttctatagacgagaaaaatgtgaagaatctcttggattggatcagtacccttaaacgccttgcttgcttgaatttaagtgaactcaaaggtttgatccaactgccatcttcaatttgtgaacttctgaatctaaaactcctggtattgaatgagtgtaccaagttaaaaaggctttctccttccatagccaatttgagaaggctgatggtgttgcatatgggaggttgtcccctcgagtacatacctgagggtttaaagatgttatctgagcttcaagagcttacagggttcagagtggttggccagacaaaacccaaggtttgcgggcttcttgagctaaaaatattaacccagctgagaatgctacatattgttctaagcaatgatgagattcaaatctcaaataatgatctaaaagatatccttccgcagctcaagaatctcaaggttcttgatattgatgctgatcaatgcagagatgacaaagtatttaaaaagataaattttctgtgccctccagaaagcctgagggagctgtatcttaggagcttccacagagccaggctacccaattgggttcatccttcaactctcaaagagttacaatatctttgtattgaagatgcagacatcacagacttcattcctaaatttgaaaatgaccaatgctcagcttacaaatggggtgtacttgaaggtttgtgtttgaaggaactgaagatgctgaaattggattgggaggatgtgaagaaggccatgcctgaactaaaacactgggaggttcctcgtcgttatcaaatcaccaactaccctgatgatgttgaccaaaaagtatctgccatccccgaagaacaagctgaaaagattgaatgaatcagtgtgtattatccaccttaggactacttgtgtgtgtatagttagtaagtgtagtgttgtttaattgagtaagctgctaatgctgtggtgttcattagattattatgatgatgtaatataataatattgtggtattgtgtgtaataataatattgtgttgcgagtatttggatgtaaattaaaagtttacaattattttcttcccctgtagctaattatctgtaacacgtggatttctcattacgtttatttttttttcttataaaagaaaatgatactaaaatgctattggatttagtagtttgtggagttgcaatgagaatacatgagtgctgacagaaaagtcaatctagtcaaaaggctaaccttgagaataaacattattttagtgaacagttgagggtggtgatgaagaatcgaagattgcaagtttgtgtggttgcttacttcagtacaagtgtttcttcttgtctcaaatgatagaaaaattaataattaactcaagatctatttgtatataacatagaacac

SEQ ID NO: 112447 - DNA, 4978 bp, Cannabis sativa
  modified_base (27)..(27): a, c, t, g, unknown or other
atacttgtaagtagatctaagatcctngtaaaataaattccaacatcatcttgttgtattttgataggtggatcctaggattcgtgtgaaaatcatacaacactatttatggcatttcgaaacttttaggtagtggggcttccgtgatccgccatacacacaactctaggtcctcatcttctgaatttaagagagcccaactttgcttcttggcgagcttagataaagtagcaatttgtttctcaaacctttttctatcactttttggaaggttgcatccgtccctttatcatttaaatgattccttaggttgtttccatgtggcatcgctttctctcctttagccttttcatacttggcatcaaggtgccttcagaggtctacagttcaccaattttctttggataactttccttttttcccaatgtcctgataaacggaatcactagggtggtttatccttcccataggcttgggtactttcgcaccaagtccttttggtgaccctttaccttttggagcaaatggacatccaactccggaggcattgctggccttttgcattttttagggctagttggctggattcacgcctttttaaggaggtgacggagctattttgttttgagtatcacccactttttccttccccttgtcctttgtaggagttgaggttttagcgttgggagagtttgctctattttcactgcgaactagttccactaaagtgtcctctttggaatcttcttctaggtttttgaattttgcatagaggtgggccattatcttttccatcttgtaaagagaactattcttaatgggataaattttgttgagtctcaagaagttcattggatactcgaaccaaatctgggtcttagtcataatgatacccttctttctagtagccatctttgacatatccttcatctttgtcctcgtcatccttagttttagtgtctttgtttgcaactttcttgcaatgatgatctaggtcgtcccctctattgttagcttcagatgtatttcctcccattgcatggcttggctaggcgtgctctagaaagggagggtttacatcatcctggagaacgtcggtgttttctagaggagttttctctctcactattttttgtgtagccaccatggtgacgggaacgtaacactcagatcttttctcagctcttaatgaaagtaccaaaataattactgagatttttggaaactaattaactgaaagctttaggaattaaataactgtttaataaataagaaaaaggttttacgtggttcgtatgttaattatccctagttcacgagttagtatattggccttataggcatttatacgtattacaagtggtgtttactgtgagaccctaactctggttctctaggtttctcgtaaagaagataaaaacttagagagcattttagcagagcttcgattattttattttttttatccctttttatgaagaaataagggacttatataggctaaagtgcgtgtatgggcatacccatgacctgcctaggattttttgctaaaagcccaccctctatttgggtaaaatacataaatatattgactattggccccctaagaaggctctttctcgtggggcaaagggtctggacaattgggaccattgcttgtgtagggcacgtgtcgggcgaaagttgaacctggtagacaaacgctcagaggagccgtaagacagaacggtgtattcagaggaggtatgctcaccactatgttatgacatgtggggaaaaatctaatcccgtgtcagaaaagtataaccatcacaagattcgttcaattttagctttgtgacaagctttcgatttttcttgtgcaattggcatcatccttagactcttcgcatgactcccacgtgtcttcttgtaagcttagttggtttggtcttctccgagtctcagagggatgacaaggcttctgggtcttggacaataattctctttgtggtacatttctgggccttacccagatttggacctctcctaagtttgtttagtctttttgtgactttctataattaaggggacttaattggtaatttcttagttcgtcgccttccattttttgtcacgtatccttcatccagaaacacggataacacttattataaaagaaaagtttgtttttactaaaatagaataattagatataattttccatcaattcaagttttactccaaaatatattttaaaataaataataatttttgtaactaatgttaggatcgtcagacaccatctatctctacattggtgtgatattattcgctttggcctaagccctcacggttttgttcttgggcgcccttttaaaaggcctcattcaagtgaagatagtgtccatgcttatacccaagatccttccccattctagccaatataggactttagttgtacacccaacaatcatcccctgaaataaaggaccacattgcctcccctcagacgattacagatctaaacctgaatccttcagtttcaacactcaagatcctcttaagtaagtatccgaatccctcgatttcaacactcttgtttggaaatctaatgatttattcacatggctaattttggaatcttgtttggaccgtcaaacaccatttatctctatattggtatgatatagtttgctttgggcctaagccctcatggttttgttcttggccactttttcagaggtctcatttcaatagagatagtgtacatctttatataccgaatattctttctaattctaatcaatatgggactttagttgtacccccaacaactaatatttcttttgaaaaataatatactcgcttaatgacatttttgtagctataatatttttatttaagtcacaaattttattcgctaacaataaagcttttttatagttagtgggaaaactcatatcacattttagcaataataacaattataataaaatatatggatataagtgtatacttaagattctctaggtctctccatgtgccatgtgtgtagggctaaaatatttcttagaagtttcttatgaactttcttacaaatgcgcatatgtcttcctttgtggggtatagtgttggtagcatcaatggccactagctaagatatgtatctctttttgattgtttttttctccttttatatcttcagagttcggtttcatacatattccatcaatagcccctagttggaagatcttgtgacgattcaaaaagttctcatgtagtgtatgaaccacaactattgaaaaagagaccaaaataaagctagctagtataaatgtacgaagagcatcttcttatgtgtgtttctttaactatatatgtaataaattaagaagtttttgtttaagaatatatcatgttatctcaagtataccactatacattatttatgggtgcctattgttaatgtcgacgtcaaagaagtaggaataggtaagtgtatgcagtggtcggactgagaatttaaaatgaggagaggcataatttatttttataaggtagggacaaaagtaaacttaaaaagaaaaaaaataaatctttatgggaattgaatcattgacttcaaccctatatataatgtagtttaactattacactaaaactaatattatatttataaatatttttttattacaaatatatatatcgtaactaactacattgtatatatatttcttttgcgattttttttcagggaggccactgccccatctcgcctacatgtgggtccgcccctgagtgtatgataaggtgcatgggatttcatcttaatattaattgacaatgagaggagtagtctatgcatcttatacatggtgtttagtttcaatacattattaatgtgagattttttaacatttccctcaagatggtgaatatattttgctcaccaatcttgcaaggctcgatcacaagtgactcttttggctcacactagtattttttggcttactattcttaaatcataagcggctctttatggctcatctttttagactagttttttgatttggatcagatactcgttaaagtttagtctagctttgatactcgttatgagtatttatcttaaaaccaattaataataaagttaattatttatacatgttatttatggtatttaatttaaacaatgtgtgcttttctaacacctataacatatagggatatttacataaatatgggaaaaatagagctagtttagataaatatgataatgaaacttaataggaaaaaaatatgatatttaaaataaaatcttcacatatatgggattgaattacataaaaaaatattaaaatttccttcatattttttttttaaaagaattaaaacaaatgaaactacagtgatcgctgaagttgtcaccggtgtcagaaaaggcggtggagttagctgtcagcaccgaaaaagtcatcaaaattggcattttcgccagaaaaatcattaaaaaagtcatcggagtagctgctggtgccggaaaagtcgtcggagttgctaccgacgccagaaaagctgttagaaatgcattgtcgtcgaaaaaattaccgaaaaaatcaccaagaatctagtttcttcatcaagaaagatgaagaagccagtttcgcgactatgccaattccgacgagttttttgaagttttgttgtcggtgtcggaaaagacgccggagtagctaccgatgttagaaaattcctcgtaattgacattgttgctggaaaaattaccaagaaagtggtttcttcatcgagaaacacgtttctgggtaatttttctgacgactttcctggcatcagcaacaacttcgactactttttcgataccgataactactctgctggtttttctggtgccaacaacaaactccggtaacttttccgacatcagtgacaaataaaattgcctaaacaattaaaaatattaaatatggaatttgaa

SEQ ID NO: 112448 - DNA, 2353 bp, Cannabis sativa
acctaatttttaatattaacttgaaaatatataaataaaaaaaaacgtaaaaactaaatattaccctttatttaactttaatactctataaggatatcatctttacaagtttaatgtaactaaaaatttaaaataattaaaacaacaacactgacaattaataaaataaaatatcatgaaaataaacacacaaaataaccaagtgttacaaatttaacacacaataaaacaaccactaaaaatataattaaaatatatatatatttttatttttgaaatatttttttattatatataaataatttttttaatatatatatatataattagatttggtaggtttttaattagattttgagatacacatccaataactaatccaatcaaattaaaattcaattttcaagttttaacattcaatccaattcaattgtaatgaatatttatcttttttgtaatttaattggattaaattaattcagttcaattcgattagattagatgttacacaccccttttatacatatatattattgatgaactaagtagccctcgctaggatcttttccctcaaacctttaaaatggagaagtaatttgtcacgaggaggaagattttggttgatgataggatgttgtttgaaattttgaatccatgagtgcaatttagggaatgactcaatcaaccttacttcacaaagttcttcaatcacttcaaaccaatgagcaatgcatccaaagctaatgtccaatattccaatatcttctcccaaaaaatacttcttattattcatcattagagcctcatcttctatagttctcaacatctctatgtactccttcttccatttctcttgttcttcacctcttgttgtgaacatgttccaaatcaaagaaccctacataaaatataataatgattaagttgtaatatagtcattataatagtaaatatgaatgaatgaaatgatgctatatacaatactaccgaagacggagttatagttatggaaaagggagggttgtaagggtcgggccaaggttagcctcgagctaagataggttagggctgcgccaagaatccacttaacccaacgatctcattttttttaaaaagaaaaatgcacatattttttttattaaattttaaaaatactacatatattttaaataagtacccgataataatattatttcttaaggccccacgaatctcaaaatcaaccccagtcaggcctaagctaatagggcgctcctatcctaaagttaggcacccaaaagaaaaaacaaattattattttgacttcttttaccttttcttcaaagaaagtgacccaaaagcgagccaaggctttctgataagggtctttgggaagcaaagggtggacatgtggccatgtctcgtcgatgtattggacgatgatcatggactcacatatgggtttttcgccatgaacaagcacgggtatctgctcgtggactggattgtacttcaaaagcaagtcactcttgttatgaaggtcttcttcaaagtattggtagggtatgtcctttagttttaatgcccatatcaccctgctgctaaagggactgtcccaatccccatgtagtttcacattttcatccatatctcaaatatttgtgaaataagaaatataattgtatgttataataactttaagtcatttatataatgtgggatcaaatatctataatgttgttctttcttccataaagtgccttacaattattttaatcggataatcttgcattggttggtgttttgtttacaaaatcaaagtttgaatttaagatttttataataattaagcttgaaaaaaatactattaattattattattattttttgtaggaaaaaattacttaatggcaaaggaaactatatgagcattcaagtattagtgatacttagcatttttattaggtgtcatcaagaaaggttagggacatttataaaagttattatttacaatttttattaaaattagagaaatattaaagaacactagtagtgcctagtattgttaatatcgatattagtccaactaaatatcaggtctcgtataatttaatataataaattttaaggagtatcgccagtggcggacccaggatttaaaataagggggaacgtaattttttttaagacagggggacaaaaataaacttaaaaaagaaaaaaataatgctctttaggaattgaaccattgatatctactctatatgtaatcaggggcggagccacatgcaccccaacaggggctgtggcccccccagaaatttttaaaaattcatactaattagacataattatatatataaatacactattt

SEQ ID NO: 112449 - DNA, 4690 bp, Cannabis sativa
  modified_base (4601)..(4603): a, c, t, g, unknown or other
gtacttactcatgaagatggtaacaccacaacttcatctcttaagtaatttatttagtcatattcactaactagaagttaccagtcagttttaccaagtgcaaagatgtgatgattccaccatttcattttccagcaagaatggctgtcgaggccggtcttgatgggattattgtctctaatcacggaggccggcagctagattatgctcctcccactatttctgttctagaagaggtgagtaaaactacacatttgctttttaccaaagttactaaagcaaaaacacttgagttaagcagctatcccttgccataatgaagagtcaaattagctaagttaatgttattaaccatggctgaaggtcatccatggtgttggagggaaaatacctgttcttcttgatggtggagtgcgccgaggaacagatgtgtttaaggcattagcccttggtgcacaagctgtacttgtaagttcaatcctcatttgacaaaaatatggctttctaaattagctcataacttttgaaaagtgataaaatggttgatcaaatcttgactttggtatttgaaaatatgcaacaggttggaaggccagttatctatgggctagccgcaaagggagaaaatggggttagaactgtgattgaaatgctgaagaatgagcttgaactcactatgaccctttccgggtgtcctactctaaaagatatccatagaagccatgtgatgactcctcaagagagtcttcactcaaagctttagtttgcttttttgaagctcctactccttatcatattacacacaactataatggatagaataataaataaggcaatttctcctttctggtttgggtgagaattgaatgtaatgattatatacttgtatagaatggaattgttaggatttacaccattcagggtcacactatatttgcaaaaatattttagccttcagactttatttacgggtcattaatttgcaaaatacatggatcttttaacgcatgaagatgcactaaattcgagttaagatgactatttttactatttgacaaaaacacaaaatataaatgtataaatttttttaaaaaaaaaaaaactaaaaaacactgtacattacttataacaagtgcattgaaatatatatccaagagtcacttaaatagtattactttaaaataagaaaacctcaccaactactatcaatgtatcatacaataaataattaaagtatacagggagggtattcttcctaattgattagaatttacaagggacttacaataaaaatcaactacaaaatagcaattccaacactagcttcacaattcccctcccctgccatccaaaatctcaattccataaaaactagctaaagacgagccattcgtagcaatttacataaaactattcttctgtagtatctgtacaagccacgatgaatctaaattcttgttacttcttaacaggctgacaaatatcatgtgacacttcaaaaatattcatcaaaacaacttattaatatgagttgttaattatgaatctcttgccccacatcagctatttcttggcataatagctgtagcattatttaagaaattcacccaacctataaatttcaaaatgcattattttctcttactctctccaatggcaattgaaccttctctgtgaggaatggtaagataacaaacaagaccacagcctgaaatgtttactatgcattgctaacagagttacttttgttcacacctggaagatccatgggagaatttgcaatgctaccacctgaaccgagggtttgggagctcaattgtggactggctggacagccctctgggttcccagcactcatggcatgaatagcccctgtgcttagctgtggactcattggagttcgttggctcatttgctgggggctggcctgctgctgctgctgctgttgctgggtttgttggttcatttgtgaaaatcccatggttgagggtgatcccacctggggtggagacacaacagcctgaagtgatgagtttgtttcttgatgctgctgtaactgatgtaattgctgttgttgctgtaattgttgttgctgctgtaattgttgttgttgctgctgctgctgcaattgttgttgctgctgtaattgttgctgtagttgcaactgttggtgttgctgctgctggttcatgtatatattcatccctgctgccatcaactttggaggacccataggcatagaccccatttgtgttcgttgcattggatttgggttcaagttagctcggctcaaagtctgaccaatcattgaaagactagcagatcctggaagcatctgtctggcccctgccatcccagttatgcctgactgaggacctaggattgtttgtctgttttgggccatcctatattttgatgccattaaagcagcttgtggtaatggtccagatcgaatatggtttattgtactacccatatttgaagactggcttaaattcattgggttctgccccacgtgtcctattgcagataaagatgtcatgggtgctgaaattgcagttgcccttacagttcccattcccatggcgttgctaagacctgaaatattattgcccacatttccaagacccatcatcatttttctctgcatttgagatgtctgctgctgctgctgctgttgctgttgctgctgttgtaacaactgaagattgagagcagaagacttgttcccaatgtgatttcccaactgcatactcgaattctgcccaatagcattcaagtttgaaagaggatttgtttgaagcatcatagatctctggaactgttgctgctgttgttgaatcaattggtttggctgttgctgctgttgctgtggaagtgatggctgagagtctaacagttgtggccttgggggaattgaattcccaggtagaagcccttgagacatctgtaaggcctgagtggttccagggggaagcatccttgagtttgctagaagattctgggatgtatgaagattattgctttgcttcacagcctcattggatagctggccaggaactgcttctgcatattgttgcatctcacctgcagaattaggaggcatcccagtagtatttgatggattgcccggggtaacagtcatgtgagctttaggttgcacacgttgctcccatttatatccttcacgttccatctgcataaacagatagcatgacttaaatttcaatgaggatggcgacagaaaatgactttgaaaccattattgatatacataccagcttacagaactgttttgccagcaaatctgcataatgctgcaccaaacattaaacaaatacaaatgtcaacggaaagcagatcttatcagagatggaaagaaaaaagaaactacaacattttaaatgaagtaaataaactcatatggtacattggtaattggcactatatatacagacaatttcctgtaagctatttttgactttccacaggagaagtatatgactatcatggtgagaataggcactgttatggcccaatgtcctccctcctcataagataattatactagagaatacaggtggtgtgaccaatggcatgggatagacatgcagaaatcccagaagtagccccaaaagtaatttcaaaatctgaagagtctaaaagaaaattgactctacaaatatcagaccaagtttgaaaatcctggaggttagagcaaaattaatcaacccaaattattttttgtaacaggattttttgttctttctattaattgccccaaataactggagaaaagtcaacttcagtaattcaacaaaatgatatacctcttcactaaaacaatttgtacagcgagacttacagtatttggcagagtgggaagaccgtgctcaacattattgaaatcactctcctctaaatctaaatctccatagaacattgcaacagttccatcatttggcttctctgacatgatcatcctagatatggacctaagaccataagatgttcctgcagaagcagagggaaatttccggcaagggaaaaaagatcaaccaataacatgaaggaactcatcaacttaagaaaatacaaatactagtagaggctaaaatgcctagaggaaatagaacaaaccttgctgaaccatacgctcagaaggcccaaaggctataactctagtcttacaaatattcatgttgccccctacaagtgacttcgataaagatttttcagtatcgtctttgaaatcctcattgtttgaaggattggagagacaaaccataagcttttgagttggaaatccattaggctttcttctagagtagtcatcaaccttattctctttgtaattgagtttatgtctgaaacagtaacccatcaaatgttaataacgagtaccaaaatgcacagctattactatattacatattacacacattgctttcttatagcataataatgaaactaatatcacctacctatcgacaatataagctgtgaactggacttttttttctaacaatattctcatatttacttggaattaaagcatgaccacagatcaagaatatcttattcttttttttaaaaaaaannnaaaaaagaaaaaaaaaaaaaatggagaacaaaaaataaaaaaaaaaaattgtcatattcaaaaaattaaaataaaccaaatataaac

SEQ ID NO: 112450 - DNA, 2540 bp, Cannabis sativa
  modified_base (2501)..(2514): a, c, t, g, unknown or other
cctgacactcatttaatgtatcctgagacccatctaatgtaccacagaatacattccatgaaagtacatcatgggacaaatcatatccctacatatatattgagattaatgtaatgttatttataaataataatataatttaacatttgtgttttacttattaaacactcacctactgtttactttataagtctaattgttcataaggttatatcactttacatattttttatacatttaaaattacactacaatatcatgttcaaaaaataattaaatagaacaatctaacatttcaatattaaatttttttacagttttataattacactaaaatcgcatttaatacattaaaataacattttgggtatgattttttttttcaaaaaaatacattatattccttaaacaaaaaatatagactaatcatacatatctcggcacataacattcaactagtatatatatgtctacatatattaagatacacgcaagcaagacataggatatcgatactttttacctttcaaaaaactttatacatcaaacgcatatcaatacatatataagtatataaatatatactggtttctctgacataatttttttcggtgtgtcttccattcagttttatctctgtcattcttttatcacggagggtaggacacacttcaagcagtccttccaatctgagaaggagggttaaaggcgtatcgcagctccaatgaattttcttgcatgaaaaacaatgtgcatatgagagtaatgttgaattttaatgtaacatgtttcgacttccagaaaggaaggttgtagttgtataaaaattcaagcttagacttcgcttgaaaagatcaatgagttgaagagtcggttgaagtaaagcagacttcaagcgatcctgcccttctaggaaagatggttgaagatgtgagacactcccaataaccttccacacgtggagagtaggtttgtgcgcgtctcctgagtcctgggaaggtctaggaggttcatgtttacaccccaaggatctcctaggcagtctgtctcctccagcaaagcgcagggcattcaatggtctccgaagcatgggctcggacttccagtgggagaagcatgtcgcaaggactccctaacttatttataatgtctcaagattctcccctctgatgtacttctagggttgcagcaacaccaggtgacaagaacggcatggagtgaactttgacaaaagttctcaacttttaccaacagtaccataaccaggcctcactagtaacccagcaaacgttgacgatactgatgttttcctctcaacaggcaccatcgaggaatttgtttctgagaaactttaccacctagcaaaatggcaggagaagtagttgtcaggagacaaatctggccctcacgccagtgccggtgtcggagtttctagttggatagagttgtttcatttgacaacctttctttgttagtcatcgtaaccacatcgggtcatacctcctttggctggccctagtacctcttgcactggtctatctgagcatagtgatatcttgggggatctggccccgagtttttcaataactgaataatcttagagcataagaaagtaacaaaggtataaatattgcaataacaaccaagagatttttacatggttcaggcgttaattagtccacgagtccattttattaggctctttggctggagattgtttatacaaatacaaaataatggactttgctcctattctcccgtgctcctcttgaagaagaagaagcttagtagaaatattctggagttaatagtaggattacagaacaatgtgttttcttggtgaagaaaaggtctttgatcttaaggtgaacatccgaaggatagatctaaatcctttctcttgtgcatttgttggagtatttataggctgacctcatggcatgggctaccttggatggatcttcatagggatgaacctccaccgttggaatggtaggtggcatattttccatgtggcctttaccgatgtcaaattgtactggctacaccgtggggctttgaacacatgtcatctcaaggcaactctcatttggatttccctcgtccctatccaggggattggttagcatagtacgcaaggacatgcacgctctgcatggtagtgtgacgtgggagacaaactctgacatcctacatgggaaaaacgcatggcaagtgggccaatagcctggcatgtgcgggctgaacatccacgggtcgaaggcgtatctcggactgacgcatcctggtggaaggctcatacccctcatgggagcaaagggacctatcttctataatggagagagtcgctaactaatagacatatgttttgtggcctattctcaggttgacttctctcgtggggacctgttctgcgaggttcatgttgttatcttctcggagcacaaagcgaggcactatgtcagcttaatgactcttcatgtgacagtcagtagtcccgnnnnnnnnnnnnnnaaataccgggtaagctgtgcaatccc

SEQ ID NO: 112451 - DNA, 10299 bp, Cannabis sativa
tccaaaataatatttacctattttctaatattatacccttatacatacttcgatattttattttttattttcttatatacattagatttaataaacccaactgctaacaaatagtagttactcttttattttgaaaaaaaaaaattacatttatataattttttaatattatattctgatttttctttttaaaaaattaaatatttatcaagaacttggctggcatataatcacggttttcactcaattaattattattatttgcttaaattagaattccttactacctttttaaaccccgactgtatagtattctgtgtatatatatatatatatatatacacgcatacaaaccaatattgtggtgagattcattcagactgtttcccagatcccatattttttctctgggttctggttcttttctccttttccttgaagctctgcaacaatggtggacgagtctaggtccgtagacaaggatgatgatgatgagtgtgtggttaaacaagtggatttaacggtgcctaaaacggatgacccaacaatgccagttctcacttttcgtatgtgggttttgggtttgactgcatgtgtggtgttatcgtttatcaaccagtttttttggtacaggactcaaccattgatgattacatcgatttctgctcagattgctgttgtgccacttggtcatctaatggctaagtctcttcccactagggctatatttcaaggcaccccttttgagtttactatgaatccaggtccttttaatattaaagaacatgttttgatcaccatttttgcaaattctggagctgggactgtttatgctgctcatatattgactgctgttaaacttttgtataagaggagtctcactattttgcctgccttcattgtcatgctcaccactcaggtctctctctctctctctctctctctctctctctcgttatgaattctttctttcttgttgagtgttctttctttctatcttttgagtcttgtctttatgttactactgttgacctttataaattattaaatggcatttctttttccatgtttagaatgagttttgaatcttagtgggaccttaaaagaatcaagaatctgttaaattaccaatgttttcagtaattattattattatttatggagttgtgagctttgttttgtccaataatgttgtcctgcttagagggttaaaaaattaatccttacaatatttaatataactacaggtattggggtttggttgggctgggatttttagaagatatctggttgaaccaggtgaaatgtggtggccttctaatttggttcaagtctccttattcaggtacatacttttgaattagaaattagaatgtaatagtctttcttttcaagcccctaatatgatgttttaattatgcagagctcttcatgagaaggacaaaagagttaaaggtgaaaccactagaacccagtacttcattctggccttggtctgcagttttgcctattacatcattccaggctactttttcttaatgttgacatcattctcttgggtctgttggcttgctcctaagtctgtcttggtccaacaattgggttctggactaaaaggtcttggtgttggttcttttgggattgattggtctaccatttcttcttaccttggaagtcctttagctagtccttggtttgccactgcaaatattgcagttggatttgtgttagtaatgtatgtgatgactccaatcacttattttctcaatatctacaatgccaagaactttccaatatattccagctcccttttcatgtcgaatggtacgaaatacgacatcttgagcatcattgataaaaatttccaactagatagatctacatatgcaaagactggacctataaatttgagtactttctttgcaatgacttatggtcttggatttgctactctttctgctacacttgtacatgttttgcttttcaatggaaggtatgtagtgtactcaatcaacttccttttcttgctagagactcatgatggaagtagtttttattgatttgaaacttttcttgcagggacttgtggaatcaaagcaccagggcttttcgtggtaagaacaaagctgatatacactctaggcttatgaagagttataaagcagtgcccacatggtggttttatgtcattcttgtggtaaacattgctcttatcatcttcgcctgcgagtactacaaggagtcactccagcttccatggtggggagtgttgcttgcttgtgctcttgccattatattcactcttcccatcggtatcatccaagcaactacaaaccaggtataaaatatcaaacttattgtaagctcatgtctatacacttatttgattactgattttcctttttatgcatctttgacagcaacctggtttgaacgtcattactgagtacgttattgggtacttgtatcccgaataccctgttgcgaacatgtgcttcaaggtctatgggtacatcagtatggctcaagcactaacctttctagctgatttcaagcttggacattacatgaagattccaccaagatcaatgttcatggcacaggtcaagattttgtgtctttgaagtttattctctcgaagtgaaaaacaaagttgtatctgaaaactaataagcttttgtattgcaggttgtgggaactatcgtatcggtgatagtatacacagcaacagcatggtggctgatggggtacatccccaacctttgtgacacctccatgctgccaagtgacagcccttggacttgtccaatggaccgagttttctacgatgcatcagtcatctgggggcttgttggaccacgcagaatctttggagaccttggagagtacggcatggtaaactggttcttccttgttggagccattgccccactcatagtttggattgcacacaaggcttttccacaacacggctggattaggctcattcacatgccagtcttactcggttcaacatcaatgatgcctccagcttctgcagtcaacttcactagttggatctttgtcgggtttctctctggatatgtggtgtacaggtactatccgcgattgtggcagaggtcgaactacgtcctttctggtggtctggatgctggaacagctttcatgacaatattgatattcctttgtcttggatctcgaaacattagtctctcttggtggggaaacaacccagagggctgtcctttggctgattgtccaactgccaaagggattgttatggatggttgtccggcatactgatgatattaatttcggtttcttttcttcttcttagtctttagacactataatatgtttattttctatggctgtaaatagtttctcaatcattactcaaccatctgtttactgttgatcagtttatataaattttctcttctggaagaaaactcttcctctgcaatattatctatacaaatatgagaaaaattcaagctttttacacatacaacaacagaagatagaatctgtggttttccacactgtacaaacaaagaatatgcgtttcataatcataagctgtctagtgtttgcttctataacaatcaaggaaacattgaccctgacttaaagtgtagggcaatatcaattagaaaaacgaagattgaacacccaaaactcccaattgagagagtagttttgcagctagagatttgatctcctttgtgtcgctagctttcttttgagcaatgtcgacgagtggcatttgcaccgaggctccgtaggtgcgctttaactcgtctagttgaaatatcatctccaaaccctttagacatttcaactgcaatctaacagaatcatagctcaacaactttataattgctgtaatggcattagcattatgaagaaacttgctgccattctgtggtttttgagaatcgattaatgtcaaaagtgcatcaagagcagcttcacttgtttcaagatctggttcaccaagcattctcacaagtggatcaacagcattagcctccaaaatgcagaacgaagactggattccacaactgcccatgtgagcaggacaaccaatttcgggagaagaaaagcagcatagaaaagccccgcgtttcttaattggcttgctgaggttttttgaactttctgaaagctgcttaagagcaatggctgcattttgttttgtaatagaattttcagaagctaaaagtcgtaccagcacttgtatgagaccagcttcggctactctatgctgccattcttggttcgttgaaactgtgaagcggcatagagctctaacaacattccctattacctgacttttgtaagaggcatctctattcacattgttgagacaagtgtaaattattctaagggcctcagcctctaaaagccactgattcatctctagattcctcggaagataagctataatacccattgcagcaccaatctcttccacatcacttgaagtttcgatgattctgagcaaggtctcaatgcatctttgattgacatgctccaagaaggtgttgtgatcgtcagcatcttttgtcaagcaaaagaacaacttcactgcatttgctcgaactgagtggtgctcggcctcacatagtggaaccaagacttggatagcagaaagctgcataacacaaataataaaatccattataagtaaccatgttgtcaagcattgtaaaaagagagaaagagaaaaggaaatatagctaaattagttcagagaaatataacaagggatacctgtctcaacttcattctgatgtctaaaccagaaggaatctgacacaaagtgtgaaaagttttgaggatgcttccctttatttcgggccctgtaaaagaaatgagggagaaaaatttaaaaatgtcatcctctgactccaacagcgagacctgttcaccctcagattcttgcctggcagttgatatggaaagaaacttaattgtggcggctgcctgttcacgcaaagctggtaactgcaaaccatggctataaagaacttcaaacagcggtccaactgcaccttctttgatcatttgcagaccgttttgaggtaaactggagagttgcaggagagatttgatagccactttctttgcctccaaatcaccttgtgcaagcatttcaataagtggttgcagtcctccatctttaacaatgactagtttgctgtgatcagtcaattctatttcggctaaagtttcagccattctcattctaacatcttcaggtcctgcataatcagcaagaattaacaattatccaaaacaaaatatatactaagctgagccaggtttagacatttcaaactcaacaatggtgtcagaatttctttccaaaatatttttcatatgttcggcgtacctgaagaaagaagttgcaataatggcttaaaataatttgctttcgccatttgcttaacattgctattttgcagtgacaaaatctctaaaagctgaagagcttctgtggcaacttggttatcttcactgcttaacatagtcaccaggagaagtatgcagccctgagcatttcctatcaaatctagtgcaacattacttgtggataattccaataacagatgcaatgctaccttactttcctcagattgacgagcaagtgagcgaacgataaattgaagtgcaccatctactctagttattttttcctgccaaaaatacatattgaaagaaagaaagaaagaaaaaatgtcagctccatctttcaaactgatgtacaagaactattataacattatatgcaaatagcttaagcatattcagtccacttttctataaataaaatggatttttacttacccttttatcttcactgtcctttgctaggatggataggattacaagaacctcccttcttatttctcgatttttcgcactaagaagtccaataagaactgatatgcagtcctccagtgttgcccattctcgatgcagctctttatccatgcacaacttgtgcagcatgcttaaggcctcaagaacttcttcctcttgagttgattggagttggggtttaatattgacaatggtaatgatattgtttctgtctctccattcttcaatggattgcctaagagttttgttgggtcgtagtgctgcagcatcaaggggaacctttgttaagggacagaaattgttcccttctgcaagccatttttcgattgcacttctttcgaacgtttgtccagaagaggtttccaccggatctaccataacttcatgagtgatgctacaataaaatcccttgagtggcaacaaatgttgattgcctaaagagtttctcctctcaagatacttcttctctttctcctcagatgatgttgtagcatcagcattttcaagcaatgttatgatttgctccatttgtaaagattcctcctgttctttcctcacattggcattttctatctcacgtttgaacttttcgtactccttcttcaatgcagatttctcagtagataaaccaagagcctcagcaatttgaaacaacaaattatttgcatacgagcggttaccattcctttcttgtattcctaactcgatcttccccaaaatttcttcctccaacacagctgcctggtattcagcctccaacatactcttgcacaactcactaagcctgtcatttattgacaatgacacatccaaagaggctaacgagattaggcttagagctcgactaatctccttagtactgtcatctaaacactttacaatcttcctgcaattgagtaaaagataaagtttatgcctttctctgcaatcttcaattagctgcttagcagctttcaattctcggttcaaaatcaccaaagcactttttaagctctctgaatggtcaagattttgtttcgaaatttctttcaagatggttgctgttttctctaagtgtgttgagaatgtaataaagttttctttctgaaatacaacttttttggctaattgtgcagtgtcaaataaactaaggacaatatgagaaagtaactcagaaactggaatcactgcagcactaatcatcatatctgttgccatgttcttgatgaagattgatgatttaaaaaatgtccctttgatttatatttgaactacaattcaacaccaaaaatttctggtgataaagaaaaaaaaacgaaactcaaatcaaaatataaccataaataaatagaaatttgcaattaataaaagaaaaactcaattttgctatgactaaatagacaactaatcatcatcaccatattttggtatcgatttcagaaaaaggataagatcaaaacactttgattttagtattctaaaaccccagtttcaaactctaataagtggttccattttcttatccaaaacagcaaatttgattatatcataagaacaaaaacatttttcttttctttttctcctctaactttctcagacaccaaacatgatttaagtaagtactctaaatttctgtactttcccaattaaattctcagcaacaaaaaacagactaacatactaagagagagagagaagctgacctggcataacaagtcagcagttcaaaaacctttgcccatacttgattttccgggaaaagagcaaaattttactggaaaaagaactaagcccagaaaaaaaaaatggcctctaacctgttttccttaaagaagcaaaaaataatagagcactctctctctgccaaagtctttctctaatcaagtcaacggttttctgcctcaagttcttattggttcatatttatgtctttcgccaatcaaattctgccacgtcggaaccacgtgctttgactagtcacagtgtaatacacggcagtccactatatgaccgtgtttaattattatttaattaaagtttattatatggtttaaaaggcgccaagccaactgtcaattggccttcggcgaatgtctttttctagtgatgggaaaatttttcgaatggggcgagaattacccgtctaatgagatgaagtgagtttagggtaggatcgaaggtgatactacctactctgtattcgacccacatatataatttttaaattttttatataattttttaattattacatattaaagttattaattttacttacaaaagtattaaaagtgatttagtttttaaaattaaaattattttacatctcaacctataaaaaaaattgaaagtaaaatttgaaagtggtaatagttgaaataacacaatcatctaaagtaattaaaggttttatatataagaaagaaactcgtaaaaactatctcaattaaaggtttaataaaactaaatactctaaattataaataaaaaggaaaactaaaatagatggtggggtttgattggaggtaatgaaataaaattgaatggaaatgaaacaatttttatttcattcatttatttggttgtattttaaagtattggaatgatattccaatagaatgttctttccaccattttggtggaatgactattatattttaaaaagaaagaaaataccattctaatgtaacaagagaaaaaatttaataatttttttatctatttttttatgcattttaaattttattccatttaattcctattcctattctcattcccatttgaatgagttaatactaacaagggaatagtaatgtgaaacattactttgtttgttttgaggatttaacattgtaatgttttcccttagtaatataactacccttaaagaaagtaatgttgatacattaaaaaaggtagaattgaattattccattccattatattaatttgaatagaatttttgaattaataaataaatataaatacccttaatgttttgatttatcataaaaaaaaatattacaatatatatttagtgtgtgagattatgtaatatacataaattttatacggataatgtacataaatgacatagcgaacaaaaataaataacatagtgataattatagaaatgttcattttaattaattataaatacaataaaatttaatatttatatattaatgaatatattattttaatgaataattatttttttttatgtataattaatattaaacagatataatgaaaaaatattttcatttcaacttttttaaataatatataaaattcttgtactctaccaaaaagtataattcaattaacatgaatatgattacatattaccctacacaactaaacacattttacacattttcctacaatcatattctccttcataatattctctataatcaaattattttgaacacttcattctaaacgccccataaattataaattaaaggtgctttctagcaaggggcatgtttactcttgtcctatttagatttgagagatcctcatatttttattaattctatattttgtgaatttatccttccttaggattgttatatatattttgaataatttggattgttattttttaattttgttagaagatatgtggttagttacatgttcatatttattggtcttttaattgaaggtgtagtcataattttttttttcttttattgtaaaggatatgttttatctattttgattgattacactttttgaataagtttatggatttttttttttatttacctattgattaattttttttttatttttctctctaaaaaagaagaagacaaaattataaggcagaaaattaattgatttaagtagaaagaatatgtggacagaacaagtattatatttattttactctttttaaaattttaatcattatgtctttgtttagagtatgcaattattgttttatatttgaccaatctattaataaactgttgggatattatactttacagaagaattatctaccagaataatacttttatcaatttattaacaataagtacatctatgctagaagaattaataaaatatcaagacaaattggtataagaagctgaagttaataaataattgtacaaatacattttattattaaaggaaatgaaaattatgggaaaattatagtaaatgaccctaaattatatgactatattagtaaatgatcttaaattatacgactatgttagtaaatattctcattttaaaacttgtagcaaaatgatcattttagattatttattatttatattattttttattgcttttttcattttttagaattaaattactgaaagataatggtatatccatattagtttcgttaaaatctttttatttgaacattatgtggattttttttaattttttatgagt

SEQ ID NO: 112452 - DNA, 2551 bp, Cannabis sativa
tcaccaacaatataggctaacacaacaaagaactatccaatcaacccaagttttaataaaaccaataaaacttaatgtaagcccaaataaaaagtctaagaaataaatcaacaactgttagttgtactgatatagtacagcgattaaagaatattcatgctaagcgtgctgtacgccacgaatcatctactgttgactctaatccatttgttaactgtgacttgatgaaagttgcctcaacctctggtgtagatcaacatcacaaggttcgaccattcaccatcatgaaaggattgtttagtgaagagtatgagagaatattgaagtatatttaccttgaagattcaacattgttggagtaagtaaattatgcaattgcatcaaatttatttgttatttgtttttatttttttgtcgatttagtgtgatgaaaatattatatctttttttttttaaatcattagtgtgctagtagtcgatacccctttcaactacttgacaagacacctgcaatcgctttgtcctggtgcatgggtgactggagaggtacattctagtttgtgtttcagaatttgactttttatttttgttaatgttttatgttataggatgtactaataatgaatgatcacatgtatttgattttctcatttgttggtctcgatcataggttattaatgttatgtgtgaggttcttacactcagtttgcgaacaccattgaatattacccaaagagcaaattggtatcttagtacaagatttgcggtcagttttattgttgatattgtttacgttttttagtcttatacttttgtcttgccatattcatttatatttgaaggctttatgtgaaatgtgtttcaaaatctttcaggatgttaaggtagacgttggaagattgttgtttgaccgaggtcctgaaatttctgctcgtcaatatttttttggcaacctaaacgcgtgtgtacgggtaaggtcttttgattgtatgttatagtatggttattaaaagattaatttgcaatgtgttttgaaattatctaattgttttttgaagataaatattcctgttttcttggaagaggtacatcattcggtttatttcggtgtgcttgttcaaaatcacttcattgacgtatataattcatgccatgggtgcgggtccgtgtatatttccaaatacgccaaccttgtggttagtttttgtagttggaaattaatttgtcccttctgaagtatttctagaaaccgaagtttcgttttattcttatttatatgactattaattgagtaaacattgtagtgatggaagttttcttaattcttattatatttaaacaactttcaaggttagactttttgcttaaagatgacaataaaggttgtgtacctaatgattgggcattcaccgacttcgtaattcgtgtcaaagattctattccacaacaaaaaaaatagttttgattgctggatctatgtaataatgtccatggcgaagaaaaacataatcgaggaagatgtaagtacaatttttacattagtttgttttaatatttttgagttcatttatttcttttgttttcttgattacatattttgaaacatgcagtttaattcagaagaggaaagggcagtaattactatggatttggtgatgggggcaatcaactctttaaaggataaaatttgccacgaagcatctcttgtttgttatcctaagatctgctagcaagtgatggtcctctttaaaggataaaatttgcctcacttattgatgtattattttttcataaataatatattatttttaattaaaataattatacgctgagtcataatcaatggacatgtgtatcaaagtgatgttttctttatatataataaattaagaaaactaaataataaactttttctatcactatttttcaaagcagaggcggtctcaggagctatatataaaggtgttatggttgtataatttgcatcatacacataaaatgccttcttcaaatgcattatctgctatgtatcagcagctggaaagtaatactaacactggaactaacggttcatctagtgatagcaatggctcatttaacaactctgagaaccaacctcatgcatcctgagttcgaagtcgaagtcttgaagttcataatcttccaaatggacaaagaagacgtttcgaagtacctctaacttccccactgcctatagacatgattaccattacccggtcaagtgtaaatggttggagatttagtattcgggctctgttaacacctcaacaagaagcttacctccaacgcgtgcacaatggtatttcagcaatagagagtgcaatggaatacatccagctaaatagaattactacagagaatccatgacgactcggctgttgattgtagtagagacgatgcctgaacagttgcgagatgtggtcagcattttccgccgtacaccctagtcttccttatttgttgagaaactattttggtataatagagtatgattttggatagtggtattttattattttttgctactatt

SEQ ID NO: 112453 - DNA, 7459 bp, Cannabis sativa
agctatcggggattgtcttttttcagcccgccgaccttccttgggcttaggtgcggtttggtcgggattgtgttttgctactacaattcgatttttgctactgccattagtcttgtccctgacatggttttgagtgttttagtcttgtttccgtgattggttttttttttttggtatttaatgggctagatgtgtgctaaattgctgtttgccttctgtttttgaatgttttgagatcaattctgatctttgttgtttcaaacttgaattatgaaatgtgtgaacctttagatttctatccccactcgaaaaaaaagaagaagatttgaaaatgtagaaataattagtatttattgtgttagttagtggttaatagttgagtatatttttctacatggtgttagagctttagaaactcaaagattgggaaaaatctcaattttttcagcttttctcttaaaaagaattagggtttgatactcttgatgttctatcttagaaaatcactttgaagtatgttattgatttactcaaggagactggtatgcttggatgtaaactagcaacaacacctgtggaacctaaagggaagtacaagaagaaagacatagacaagccagtagacaaagggatgtatcaatgactagtggaaagttgatctatttatctcacacaagacctgccattgctttgctgttagtttggttagtcagtatatgcacagccttttagaacacttggaggtagtgtacaagatattacgattctaaagaagacactaggaaaaggtttgttgtttagaaaaaatgatgaaagaggcatagaagctttcacaaatgcaaactgggtaggttcaattgaagacagaagatcaacatctggatattgtaccgaggtatggggaaaccttgttacttggagaagtaagaagcaacctattgttgctagaagtagtggtgaagctaagcttgctcgggaatatgtgaattaatctggatcaaacgagttcttgaagagctacaacttgagacgacaagtcctttgaaactatacagtgacaataaatcaactattaatatagcacacaatccaattcatcatgatagaaccaaacacgtggaggtggaccgtcatttcataaaagaaaaattgtaaaaaaggaactatatgtaatttatgtgccaagaaagcaacaagctgctgatttgttgacaaaaggattataaaaaaaaaaggctttgatgaacaagtatgcaagctgggcatgtgggacttgtatgcactagcttgagggagagtgtagaaataatatttattgtgtaagttagtggttaatagttgagttgtaattaatgtctatacctagaatatttctttgtactcaccccatttaaaggcctttccaatagtgataaaaaataacattcaagagtatatttttctatagaaaatacaaactatagagtgtgatctttgaaggaatgaaaacaggtttctttttttttttttttaagttaagctgttgtatgtcaatacaaagacaattcttgatcttggattgtaagataaagttgaccctgttaaaatgtttaacttcattggctttatttatctattctactaaactttgtccagtcttattcaattcaaactacaattgttgctttgttatggctctatatagttataacttatagttgaggaccaagggtcactgcagccttatgttgctcatagtttaattgagtaggatcagattatcaattacagttgacttctcataaaagttgagtttggtatcactgtgatgttgtcttattaagattattatatgtgatgtgaatagttgatttaattatattcccatttcattatgtctgagaaataaagaaagttggtttgtctgattgacatcttcatataactttaatatctcatgactcatgaaatccagattggtgctgatgcactttctttcacaagtgccttcaaagatgtcatattccgcactaggtccatactgaaggtagaaaggcatctaggattaatcaagaatagattagacaatgaaggtacttttactcaagttgatctttcttaattattatcattgatataatttgctgtttggaaattgtataattactaatctgttactcaattcgttaatgaacagattctgtcattgttcatttcaaaatatgctgtccaaatatagaacaagacacatctgtaagattcatttttctagtgcagcgtaacactttctactgattgttgttttttttttcttttttctgcccagactacatcctactgattgatgtttcatcttatcagatttatgttattggtagctccttcaagctggggcaatggaagattgacagtggtcttaaactgagctattcagggcaatcaatctggcatgtggactgtgtgttgccgaaatctcattttccattaaaatatccttgtggagctttaatgtttatttagctaattgtgctttgtctattttaggctttctctttgttttccttaacaactattccacatataagtactgtaaatacagagatgcaggaaacttttctttggaaactggtgctactcgagacctctctcttgaatcttcaaatgctaaactaagatatgtagtccgttcagatggcatgatgagagtaagctactggccatccaatgagaatgataaataatctaatgagtgttgcattgcataagaacttgagcatgttcctaaaagtgttacactgtacttgaacttccagtgatggccaaaatattttgcttgctttataggaaacgccttggcggggtgctggtgttgcaatccccatgttttctattagatcggaaactgatcttggagttggagagtttcttgacctgaagttgctagttgattgggctgtcgagtcggggttccatctcattcaacttttaccaattaatgacacatcagttcatggaatgtggtgggattcatatccctacaggtatataaaaaacttttatatagacattcatttaaataaagacaatggtggtatcccatcttatttcggaatcccaattcgctacaagattctgctaagtgatatgttattttttctgttctattttcttcatgggcatgcttttcataaattctgatgctttgtgatcaggcagtaatattatctttattgttgttgctatactttacaattcaggtttcattactttttaatagaatcttgtctcatttaaagtttttggcctaacttattttgtcctgcagctcactgtcagtgtgtgcgttgcatcctttgtacttgagagtccatgcactttccgagaatatacctcaggatattaaggtaagaattggaacaattatttgcttatttaaaaagaagctcaagttaaatttatgctgtcccaaaaagtatgcattgtccatgctgaagaacacttcattatttggatatgcaaaattgcaatatggtgcccacattaagtagtttttcactgttgcaaatttcagttatctgtttgattgcattgaaggaggatttggtgttaatactatctatgagttgatgttactgtagagtataggcacactgatggtaaaatctacgtaaaataaaagccttacactattcatttcttaagaatacattatctacttctaagatttggaatttgaggtattgattttaaatttgttttaaaaagaggcaagttaggttaactcgtagccattaacttgatctttttcagtttttacatatccataattatatataaagaaacagaacatgtattcatgaggaaattatttggttttttttaattcttaactgattaattttccatttcttccatctatctttcttacaggtagagattgaaaaggcaaaagaacaactagatggcaaggtaggccttaggcattctatgattaatatatccttgttattggttggaaattcctcctatctcagtagttcttgattaaaagatgaatctgtttgctttattgaacaaagaaattccaagcttttgagaggtctggatctctccaactagatctatgatctcccaatttaacaaaatatccaactgactctcaatcctcactaggccacctgtaagaatctgaccaggacacaatttaattaattaattgataagggctgactaaaatactattaattaattaataaggaccaactaggatacaatttgtttaatactcctagaatgtgcatttaatattggcctatcagttatctcgtgaaagaaggcctcaattgtttgaatgatgttttgttgaaagcacttaggaaagtaatgggaaattctaataagtcaggttaatgagagtatcattctttgttgctctcactatgaccaattgttaataccaaattttttgtttcctcatctttggggtttgcttcctttggcataataatagtgataatgtaaggatattactataattgcttttgaaaattaatttattatattgtgttctgcaggttgtcgattatgaagccaccatggccactaaacttgcgattgctaagaaagtttttgcacaagagaaggagttgatacttaattccagttcctttcaggagtttctttctgagaatgaggttttaaattttctgttgcttcttgcactaatattgaaaatgatttgtttgcagcaattgataccttcactcctgttataattttgcgtaggattggttaaaaccatatgcagccttctgctttttgcgagacttctttgaaacatcagatcacagccagtggggccgcttctcttatttttcaaaagaaaaggtaatcatctagttgaattaacaggttggctataaaaagttggtaatctgcatcttttttggttcttctttttcttgcatgtttgcgcctactatttagttttatatcttgagtatattgtctgatcagtttgcgcacaaaagtaaataattagagattgaattcagtatgatgattatggaaaaggaatatgtttcaaatatatcaaaaaccaacaaagctttttgtctatattacagcttgaaaaactcgtctctaaggacagcttacactatgatgttatcagcttccattattatattcaatatcatctgcacttacaggtaagtagttctacgtatctattttgtacatcacttgatgtctacaaaaagataatatggcagaattgtttgggtatgttgtgaaatgccagttgtcagaagctgcagattatgcaagagaacaaggcgtaatattgaaaggagacctacctattggtgtggacagaaacagtgtagacacctgggtttatccagacttgttccgcatgaacacatctacaggagctcctccagattattttgacaaaaatggacagaattggggatttcctacttataattgggaggaaatgtcaaaagataactatgcttggtggcgagctcgtttaacacaggtttatacgcgtaacgaatcttaattgtatctttgctttattatattattttatgagatgaagaccaatgtttccttgacagatggcaaaatacttcactgcttatagaattgatcatatattgggcttctttagaatttgggagctcccggagcatgctgtgactggactagtaggaaaattcagaccttccatccctcttagtcaggaagaattagaacgagagggagtatgggattttgatcgcttaagcaagccatatattcagcagcaattcttacaggttacagaattattcttattttaaatttcaacagattcttacaacttagagaaattttgggttttcatgtttgtgttattaatcgtaatatcagcctttctcttgtagattacaattttaggtcttgtctaaagtatttatgtttcattgttgtaaattatccatttatcattttattactgatgcctttacgttttaagtttttctttttcaggataagtttggagtttcttggcctgttattgcttcaacttttatgaacgaataccagaagaaccaatatgaggtgtgataatcatagtcagatttttatttttctgcattttcgtaattgcagttagaacttagagttaaatatttgtaggtatttcagtatgttatgttgttctttgttttgattatttacttgtaggaagcagcaacaaacaataggttaaactttaggcattttttcatgttcttttgttagagcttcatgtcagacagcattgcggctgtttagtagtttgatctcaagtcatgtcgaacaaacactttttagtaagatgaatattatttatttataaatttttggtaagaatagtaaaatgcaaaataatcatgattgccaaagttgatattttcacacaagcacacttttagtatgatttatgaaatagccaattagctaggattttaacatatgcaatatcaacggtagtattaaggatatattggataaagcttgctagatttcttattgatattgatgaaacgaaatacaaaatcccaagcatttgagaggcttggtccctctgagatgacctagaaacaattctttagttgattctcatgagctaggctcatctatttatacaaagaaatcccatgtcgttaataacacacttccctttaactccatacccatctcagccacagaaacaactaaattagaccatcaaggaattaaagaaacatcacttctctcatcttcaatactcgtgtttctcattccttctactacacaatctcccacctctttaacgcatcacaagtctttgatgttgcataggatgtctccctgttcttctatatcctcttcatcaccttctaccacagatgcatcactatctgaggagtaatcattgatttcctcatctcttgggtcttcgtcttcttccctattatcaaactgtagattgccagtgtttccatggcgttatcctctcgatttggccaaactgatttcgtcttccttgtataaactttccactactattcattgatgataacctcttctaaatcattctactctctattattcaaaaccgataatcctttatcttttttctgctcttcataattagcacagaaattgatgacagcttccagaaagttctctatttttcaaaaaaaaaagaaagttctctatttttaggccggattcgacgacttaaatgcccttcaaagaactcacaaattattttaattggtttctttgtaggagaaagaaaccagtatctcctttattcaatcaccctttatagaaatcgtgagttgtttcagatggtttctttttgggctattttcaaaaatatgggaaaattattaaggttatgataaatatggcataaaaagtaaatgccactaaatatggcattatttaaccaatc

SEQ ID NO: 112454 - DNA, 3531 bp, Cannabis sativa
  modified_base (27)..(29): a, c, t, g, unknown or other
  modified_base (1679)..(1691): a, c, t, g, unknown or other
actaatcagattgtaaagagttttatnnngggcataaaacccaacagactcctcgagtgatttcctttgagctgagatattgtgaaatcatgctgacattagaacgtcaacatttactctaatccttggttgttgtcttagcattgaatctcttatcacattgtgtgattatgtgaatattgatgtagacttgaagttctttagcattctctcgactatgttttagagaaggtggtcttgttcatctctttggttttatagtagaggaggcctttgttaactccttagctttgcaacggaggaggcattcaacatccccttggctttgcagcggaggaggccttcatcatctcatcagctttacagcaaaggaggtcttcatcatctccttagctttacagcaaatgaggtcttcgtcatctcctcagcttcacaacagaggaggtcttcatcatctcctcaacttcacagtagaggaggtcttcttaacgaatgtcaatgatgtattgtagcagtcgctggttgttctatggtaaattgagtaagtgaccaactcccgaattaatatactcaagataggggtgatgtcttccccgacttgtgtgcaccttagagtgattacgggtgcggtctctattttttccttggtctttaaccttagaattcttcatcgtctgttctgttgtattcacaacggaagaggcctttttcgtccccttagatgtcatgacagtgaaggaggtcttccacttcccctcggctgttatcacagcaaagatcttcttggaaaatatcaatgatgtgttgtaacatttgcatcctactctttggttaccaaggagatagtcgataccaactgctgtcaagaacttgacaaacaagtgatagatgagtgagatggcttggaggtcaatgggtgttgaccttataaggagactctgtgttgatcactatgaaagtagttatagtgatgttttccacgagatagtttcgactgtgagtggctttcttattttaccacaaggagcgatgtcgactcacatgcaatcatacatgagatgcttgcgtggctccggatatcttagggagtggcccactcttttcatggtctgttttgattagaatatttcgtgatgcttgattattaaccatcacatttttttcatgatatttaaaattttgttgaaactgtctaagctttactactcttgccccagcgttgatctcttagtgactgggtatcttgaagatatttgttgtgagtaagattgtaatatcttagaaacctaattataataattaaggtttattatgtattatgaattaattagcaggattatgatcctactaatctaattcagcgtgaattatgaattttgccataagtagataaataagcgtaatttattatttacggagatttatttagaatttgtgaataaaatgtaagttatttgtggaataaaagtattttcaggtttatcgacctcagaaacccaatcgaaggctaaacaaaacatgtttagttagaaattttaatgggattattgaggtaagttagttttaaaattatcagagtaatttagggtactcgggttaaccaaatgcctcagggttagaaatttcttaatagctaaaaaatggcaaaataatattttcttaattattattattattannnnnnnnnnnnntattattattatttgttattattattatgaattgaaaagtatatatataaaaaagataagtattaatcaaagttaagaaaaacaaagttaaaattctcttctcttctccttctctctcgagctaagaaacaccaccgccatcacattttttccttcatttcttttcctaaaaaacaccaactccttaacttttttgtggcagctagaggtgtagcaagttgaagtggaagctaaggtaaggtttcgttcttttctttttttgaaaaactttaggtttgaaggttgactttttattttgtaattactgagagtttagtgagctttgagttttgtttttggggtgttttgggattagttttgatgctcatttgatagttgtgctgttgtttttggatgagagtcaagtttgagtttttaagctcaacgcttgagttctcatgatatttttcatgttaggcaggattttgatttctattacatatagattgttgtatggatattgtatgattgttttgtgaagtttggaatgaactggttatgttttggtgagattttgagaagttgaaaattggggtttcacatttcttatagaaaatgacagaacgtttccctgacaggaaccactgaaaatgacttgccattttctaatcggcttattgtttttattggtgtttagaaccctcatttttcatgttttctcgatgtttagggtgttggtaccctagtgacctatagggggacttacggtgatgaattaaggacttataacgggttagatcaagtgcgtaactgttattttcgttgttgagacatagcgcccgggattgttgatcttctccattcaggtcgaccaacatacctaaattgaaacttgaggtaagaaaaatatattcataccacacaacatgttaagatacaattattatcgttatgagtcgatacgattatcaccattgttgagtcaagtttgagctcaaacatcacaatcagcccacaaaatcactccaaataaacttttaacaactcaataaaacttcagaaaacaaaccccaaccacctagggtttggacaaaaccaattccaaaaatttgcatgttcaaactatctaaaacttaccaaaattaaaggaaagagttctaaggttttactttgtgtctttaccagtaaattcccactaatttcttgctaaaataaacttaaaaattacagcttaattagtgtatggttctctttggttcaagagaggtcacgagagagaaagttcaaaaaatagatttttcttattttttaaaaagataaacttaataattttttgttttatcttttactattgctgctagaaaaattaagaaaaagggtttgctaaaccactaaaagacaaagtcaagcccctaagtaaaattatttttttgccccttacttcacatttaagcaaccttaaatcttaggagtaaaatggtcaaataccatcacctcgcctaactcctaactccggtattctaaatattaattaaatatactttgccaaaagaaaggttctaaaccaaacccatatgactctaatgactaaaccatcacatttctattggtaccgagcaaaattcacaaaaatattaaattggacatatgttatatataatacactcagagtttaataaaatctctacaattgcaaaattataacactgatgtctatttcttaaaaataggatccacataaaccaataaaactaaaactgtgatttttattactgaaggagaagattattgtattgatcttcttgattgatgccaaagtttttctcattcccacatcaacgtcttcttttgtgaggggttc

SEQ ID NO: 112455 - DNA, 6579 bp, Cannabis sativa
  modified_base (58)..(62): a, c, t, g, unknown or other
  modified_base (1510)..(1510): a, c, t, g, unknown or other
ttttattgtattatttcgggttgtattttttatcggtttattcggtttggtttgagcnnnnnattcgggttgggcggtttgtaaattttattgaacacccctactgtcagcctccacaacaacattttctcccgaacttatcatcttggctcaaaatcatattaagatccctcagtgtaggtttgttctctaaacctacaattttgtttttcgagtttacctttctcttgctctggctttcctatgttctagaatcctctcctatctcaatgttatgtttgctctgagatctggggtctttggttattggtttgacgttttgttggtctacgagtttaaagcctgcgaacaaggagttgtataggtcgttgatctctggtctactggtgtttattttttaaaacatttggtttggtcttgccgttgtcgtggttccaatatgcttggttctcccaacttcctctatttgttggctctatgtagcctgctcctttctctgtgagctctcgaagtatgtggagatgatgccatctcaaggcacaatattttgatagcaacgaagatccgtctcattttgagtgagaaattggattcttgctttcctcatgaaaattcttttatggaattgtcgtggactaggaagtttgctggcaaagagggctctcccggatcttgtctctcgtgaagatccacatgttcttttttgcatggaaacaaagttaaatggtcaacatatgagtgaggattggcatcttttgggttttgccaacgctactagggtgggggcgaatcgcttagctggcagactgtttatgttggaaagctaatttcaatttcaaagttctttcaaatgacttatctgtgatccctattatggtgagaaatattcttaatgacctaatttgggctggcttctttgtatggaacagagagctaatttttgaaaaatttaaatttaatgtactaaattttacgaacagataggagtgcatcaatatatccattttaagagagtgcattgtaaaattttccaatatattatttctcaaccgtattacctattaaataactataattaaatgtcaattttaaaaatattttaattcaatgatccataataaaaaaaaattagaattttcctacttaattttattatctaattaaaaaatgttaccaatatatatcaaaatatatttatatttaatattacttttagccctctctctaactcaaattaatttatttttatatttctcttggtccgatagaataacctcaaccatataatacaaaaataaaaaatttctcatatttttctaataatatactaattcatgggtaataacccaattaagattgcactcatatatatatatatatatataagtatataaactaaaagaagaagatgtaaaataaaattgataagattcaccatcgataacaacatagggtgtgatggagaaggcagcaacaagccaacaacaacaacaacatcaacaacaacaanaacaacaacaacaacaacaaactacaataacatcatcattatcttaacacctaatcctaccactgacttttacctaattttcctctctattgaacacacaatagtcactactactcttactacctacctagtcaacaccactaccaaacttgcaatgaaattgatgagatgagactacaaacagatatttcatatgtcctccaaaataaaatctaaacaggctactactactactacacaaccaaattagaggggaaataatttcacttccatggcatgctagacatgccttgtggtggattattgttattattattattattattattattattgcaggctcctgtactatggttaagtgggctacctggcccccctgaagattcacttagagtaccacgcgacagtgggctgccgggcccagttggtccactcccgacgccaaggttctgtgagatggacaatggctccacctggttggctgattttgattctctacggccatctgagacaaaactccctacaaccacctgcaatgcagtgtatttatcttatctgttaatgcctaaattttatgtatcattttccaaagtcataaaatcagtagtttcatcaattggggttagccgtgggcatattgagctcgatctgtgcctatctgcaatgctacataaaccaatgcctaatttttttgcaaaatcataaccaattattcttaatttaataggaaatatgttataatagatgtgtttttcgattctaagacagtaaatgcagcagataataaagatcaaagcacatgtacctgaacaggtgtagcagccatgagaaggccagccacacccccacctaaaacacgaccatctgggccagacaacgagacgctcagcccccctgttcgacttctctgtccaccattttcagttaaaagaaacgaaccagagagtgacagaatttcaaatcgtccctgcagatgagtgtgacataatacattgattgaacttttaaccaatgtaacatatactaccaatgaggaggtaacaaaagagaactacgaacctcatacgtaacagttccaccagatgtggctggctggcgaagagtgacattagatatggctccattggcagagagaatgcatacagccctcggaccatgctgagaaaatgacattatttttgaagatacatcctgcaaaaaaaaaaaaaaaattaaaaaaccaaattacacctctctaaatttacatgaacacatgcaccacaccacaccatccttttgcttatacattgcaagacgaaatatacagggaaaatagtgacgaaactacctctccagctttgactgtgataacatgtggtgtaaatccgaaccctgctgaccctgcacaaaacaacacttacattaatcaaatgaaaagaataataatagattaaaggacaaaattcatttggttcagaaccatattaaataataaacaacgggatgtgtacccaaacaggacaaaattcatttccataaaataagtcgacccctaataaacatggtaagtatcttattagactcattgagaaagaaatttaaaaggccaaaacaaagtgatcctttgatacttaaatggacatcaaaaatcaaatgtacaaacttcaaactcatgaacctaattaagattataatggtttaatttcatacataaacaaagctaataaaagtaagatcttgcatgtggttgattcctacaaggtccatttcaagtattttagtattattattgtgtctccaccaaatattataaataaaaaagtgagaatttttatttacccatgccatccaattgttgcttcttggaagaaccaggtggtctacctctagctttcttggtggatgatggagaaccgggaccgccggctaagccaccgtccgagggaggaggagctacccccgtatgaggagaagagaatccaccaccaccggagtgactcaccggcacagaaggggaaagagccaatgccatagtgccatctgggccatattttctgggtctccctcttttccttttcattggctcattaccactacccatactcatgttgttcatgtttaacccaccaccaggagacactatagcgccaccggtggaaccatcacccgccaccgcagctccggcggaggattggtaagaaggtgaggtagctgcaatgggtttgtacacaccactcccatctgcagcaaaaggcattctcatgttctgtaacatcggttgtgacgccaccggacttttctgtagaccaacactgaagggctctctacttgctaaaagtcctgtttcagatcctgacatcttccctctgttaaagtttttcttttttactcaaattccatacaatcttacctgaaagattctcaagatcagaactttgctctctactatacattactattactcactcacacatcattttacagacccagatagaaatatatttatatatatatatatatattaacttcactaaccaaattattaaaccctaataactactggggaagcataaaaaccagttacagcttaaagttatcagtaaagatggaatttttttatctgattcaagatgaattaggggcaaaactcagccattacccagatactaacaagtttaaaattacaaaatataaagtttcaattaaaatatttaaaaattcaaaatttaaaagtttatttttaaaaaaataaaaataaattaatgaagttcactgtaaaataattaaaaaaatataaataaataaataaataaaaaaagtgaaaactaagaaaatgagcagcaaaatcactgcagactcaccaataattcagaaaaaaaaacaacaaaattaagcgaatttcagaggaggatgaaattctattctagggtttctgctgaaaacgaagagctgcttcagaagccttttttctaagagaattatcaataatatttagttttcgacaatattataattattattttagatatttatttttacgttttctttcttttctccatgccttgcctcttacgggttttaaaatttaatgttaatttatttttttattttttttcaataaataaaaagcaggtaaaaagcaggccaatttgctttctcaaccaaccacaaaaataatagcgataataattaataataaatataataaagtaaattgcatttactccaacgcctctttcttcaaaattatttcaaattaataatccccacgcgccgttacaaattaaaaaatagtaaaggttacacgtgtcacaaatatggggcgagtagattgtgtcgagggtggcttagaaatgtgtatgtgggtgtgattttggatttatttggctcttttgttttgtggtttctttctttggtagggttgttctttgttttctttttcttttcaaagctggtctcactatagttaattattatgcattttattcaaaattatatatatatttattctaaccaattaagtttgcttaggtgggtgggtaatcatgatgatgatggtttttgtattaattcaaaaaatgaacatttttctttgacataaaccatttgtttaataaaaaaaaaatgtggcatacattttcaaattattaaaatattattgattcacttaataaatatgattaaaaattattaaagtttattttatttaataatttttattgaataaaataaaaaatttaataatttttttattatcttttcccttttattataattaaaaaaaaaaaattcttcacaagctgaatcacatcattacccacatattccaacattgctgttaaaaacccggtgtcataccatccggcccaggaaatttgtcgggatacatttggaaaagagccttcttaacttcctcatccgaaacaggggccaataaatcaacattctgctgtggagagatcttaggctcgatacaatcaacaacgggatgccaatgaggggaactaaaggaaaatagatcggtaaaatattcagtcacaacatcagccagacctgaatcccaatcaacccaatcacctaaggaattgcaaaagataacgattatgctcaagttctttaacatacatacccttctctggctgaaataatgaagccatcatactgtctcatcacatcgaaatcgatagcccgggaggttaagaaacgtccaacaatacacaaacgttcttcttcccccttattttgattctcgacagtatcgtaggatagtacaacctcatcctcaccctcaatttttatcccttcatactgagtctccaaatcacccacctgactattgctagacgccataccaattacgcaaacaaaccacgaacacaacgaatctcaccagagaagactaccacaccatctcaatagagaagacctaaagggctttgtacatgattcagcatatattttttttttcgagagagatactttaaaatgtgacagattccaaataatttctgggtcgttgcccgatggactcaataatacaaacattgtgttgattctgaagaagaaatgccctgtcaatatgggtgatctgtgtccaatctctctatgcaatgttttgtataaagtcatttcaaaagtcctcactaacagacttaaggttcttcttcccctggttatttctgacacccaaagtgcttttattccaggaaggttaatttcggataacaatatggtatcttttgaggttatacactatcttaagaggaaaaggcaaggtaaggagggcttcatggctataaagttggatcttagcaaggcctacgatcgcattgaatggggcttcttacgtgctaagttgggttttgctaatcatttagtggatctaattatggccacgatttgctcggttcggtacaaagtgacttataatggttaggagttggggctgattattcctaaaagaggtattagacaaggtgatccactatctctgtatttgttcttgctctgtgctgaaagcttctcttctttaataaaacattttgagttgaatggtgcttgttgacttcgcttttagccaacgacaatga

SEQ ID NO: 112456 - DNA, 4188 bp, Cannabis sativa
  modified_base (1750)..(1755): a, c, t, g, unknown or other
ccaccaataaacaatccgtctcaacccaagctgaagtataagtttgatctttgagccaactcaaagcttcccgaaagctcaatgcttcagccatggtcggagctatatttccattatgtaacttagtacggccttcgatgagcaaaccattgtggtcacgcaccaccaaagcacttccgaactggttctttctttcaaaaatagctgcatccacattgatcttgatactattttcctgaggtttaaaccaacgctccgtcccatcacagtcttgaagattagaccataatgactcaatttgagttttttgagcataattccattgataaagatagcttttcgcagagacaactatagctgaaacattaaactgtttcccttgccatacaatatcatttctcgctccccaaactgcccaacaaagagcagcagccaatccttgtttttctgttgtcaaaggcgtgaaaacattcacacaccagtccagaaaaatactccctgctgcaatcccagtagtgtcgatgcctactctttcccacaccaatttgaccactctgcaggttagaagaatgtgtgctattgtctcatccatctcctcgcacaaaggacagcgtgtgttgactggaacacgcttagatgctagctgagaaagggtcgggaggcagttagaaccagccctccacatcaggtttttaatctttggaggcagtttcaaggaccataacaccttccaaaaaccagaagctgcaatctctgtaccaacacccttcaatttttgttgtagagcatatgcactcttgaccgaatacattccattagcttcattagataaggtaatttgctactattgagggttactagcatgccgctaataataataatagcatgccgctaataataggctactattgagaagatatataagtttatttttaacaataataatagtatgccgctaataataggctactattgagggttactagcggcataatctcaatctgccgctaataattaatagcagcgagtattaacggggtaatttgctgctattattttcagtcaattttcaattttgagactacgaaacatcattagcggccggcgtcgcaaaaccattttaaatttaataaaaataaattaaatgtagtattttaaaataataaaattatttaaaaattaaatataatataatttcaatttctaatttaaataataaatttaaaaattaatttagaactaaaataatattcctacaatactcattgttcataaatctcaaattaaactaaataaaataaccatatatatttaatgttattcacgtttctggatgagcgacatgtggcattttagagggatatctggtttgcgtaacgctcgccctaggcctttttgtatacaaaaatattgacctcgcttttagccaacgtcagtgagtcaattaataagcgataagagatgtaataaagacagagcaaaaatcagtgaacaataaagaacagacggttttaaagaggttcgacccctttaggtcggtaatagcctaatcctcttagattgtatttacttgagaacaaagaacacaatgtttcctctcccaaagctctcacaatgaaatctctgaatgttttctcttacatctctctctaaagcaattctttcgatccatttttcagtgaaactggatcactatttatagggctaaatgtatgagtgaatgtttcccttttgcttacaatatctatannnnnnaagaacatacattacatatttagaatacgtgaaatgagggattaggataacctgctgtatccctttgatacaatcccatgattgtagggattgtctttatgcttgggcttcacgatatcaattctgaagtagtcaagtcttgatacacgactcggagagctaactttaatttcttctcggattatctaccctttactctgctcggtcaagcagactttgtgcatgcagatgtattgcttgaagtctgttcggagcatttctccagccaagtgtaaagaatgacagacacgtgtcactagtacatgctgccatgtcatagtgcgaacaatgagataacatttgcctcccaagtctgcacaggacttctgaagtcgctcgtagacttcactcgatttgaatccgtgtttcaacgaggagtggcacgtgttcgatacgtctattggtgatccgatgtgattctggctaagagtatctttgatattcatctctttaatgcttattgattcgtacctcaaaatcctccaaaagtttgcacgcttttgacgatttctctttaggtacttgattgcccaacgtttacttttaggagaaaactgaggcatttaaattttgaaatgaatacacttcctcactaatttgcttacaaatagggtaggaagtcctaataaaccacttttatcatttcctttcttgatgattttagaacaagaacatcttttcctctcaaatccttcgaagagtttccagaaagtgtcgatttgtgtcatctgaacagctctaaagcttcgaacagtgagtaaatttttcatctttttcctttttaatatttgaatctttgattttctgggtttctattatagaaaattcaatagtcttgaacttgttctaggagaaccgtagaaaatctaggcttaggaatatgagattttgattttgcttaaccatatgacttgattgtaattgcattctgatgttgatttcacgatattcggtttcacttgcccatttggggtttagtaaaaattaacccttaatctgaagtcttaaaattttgggttataaacctaatatcatgcaaaattcccctttttaatccttcgatcagacctggtcagtatattttatttgtttttgttcgatatcccgaccaaatactcatattaaatttgacaagatagtcattgagactcgatgttcctttctttagcttttggagtttcattttgaactcaagaatctttgaagagaatttcgaggtgaaatgctagtcaagagctttccagatatgtcgggcacagttgcatctaaccatcctagtgagcaagctttcagtcattgaagagagaagccaggacaacaagagctggtcttgaacttcccaatcaacgaactctggattgtatcttagagtagcttgatctgcgtcactgagaaattttggaggaggtggagtgtcttcgatgaatttctgtagtagattgccacagatggctgcaataacatgttgcttccagagaaggtagttgtaatcataaagctttatggagatggtgtggttgaaatgaactgtgttatcattttgatctctagtggaggttcttgaagctaaaaactatggtccttgagttgcagactgagtatgttgattactaggacctgttgaagtcatatccgttattaatggagaaaatggctctaataccatattggaggtgttcaacctcttagccatgaaaacagaacaaaacagagaagagagaaagagatataaaaggaagaaagaggaagaaggatagaaagagagaaagaaatctcttatttgatttagtgaagcatacaacaagtttatatacaaggattaaccttaggagctaaagactaactaacaactaaccaactagagtaagtttatagatagctaagaaagcaactaactaaccgactaaacaagcttaacaactaattgtcctaacaaccgctaataataaattaaatagtaatgcgggaatttttccgcctagtttagcagtagaatattgcccgtcgctaataaatctgtcgctaataaatctgtcactaattgtatattttcttatagtaagtaatgaaaataatttaaatattttgttatattttcttgtagtaagtaacaaaagtattgaatcttatttttaacacttcaaaattttcaaatttttctgtaaatttaaaagtattttaaataagtataatttagacaattataataaattggattaaaaagactcttttaaatgctaaaatacataaaaaaaatgtacaaaaatattttatttgtgagtaatttgtggcataacctcattaagtagtcaggtttttgcaactaactcccaattctaaaattttggtggtaaaatcttctaaactgatattctgttagcaattagtcatttc

SEQ ID NO: 112457 - DNA, 3011 bp, Cannabis sativa
  modified_base (29)..(31): a, c, t, g, unknown or other
ggcccgataatgtccatgagtactccaannnatggagacatatgagtcccctcgttgtcctcatatgcccgtcctattagtcccactgactagtagtagctcacttcagcactaaggtgccaggaggtggtggagagttgacaccagggtacccccccttaaagagcattctgagcttttagccttctaccaagaacatacatgattttggctctgtagacatatggctgaaccatataccaaatcacatagtttcgccaatccgattacaccattgtatttgtagacctaaataaataacaaataccaagtcctgtccagatccgaacaatattgaagatatttacgaaaatgtcactgccatacaaactaagcatcagcatgcacaccaccatgcgccaccacttgaccaccacttaaccaatttatgagcatcacctagcttgtaacgtaccatcttggcacgcaagttacactatatatagtattacattatgcttaaagtaaataagtgatgtaaaattaaaaactagcttacttaataaaaaaaaaaaagtactctaatggtatgtaaaaaatttaggggacttatattttcaactcaaaaatatataaaacaccccatatttaagtttatcctattttattttttaaaaaaatatatattttttataaaaacatcctaattttattagaaaattagttctgtaagttacaccccttatctagaatacactctacacctcacatttttttaaaattatcttattccttcacctccttcttaatcttcctctttcttaattgaaaaatgtttaaccttcctcctaatatcttcctttttattaacccttttagaaaaatgcatgtgaaaatggaaacaatgcataattattttttttgtccccttacaaccaaagagatctgaatttgttgaattttagaaaatattacactcaccggtaattagagaaaaaggaaaaagttgagtatataaactcaatacattaatatgcttaatacactaataaaacaatgataacatcactcactaaaacaatgataatatcagctatgcatatttatatacataatcgtatacagtaataaattcattaatgaaatttcaagttccatctatgaaatctctctttttcagggattaaagattgatagtgtaaattttggattaaaattggttcaaaaaataactcaatgttatatttagtctaaattttataattttacacaaatatattagaggtaaattaactttattttcgataaaaaaaaaatatataaaaaagtcaacaaatacattaaattttgattaaaagtataaaaatctaattaaatatataaataaaatgtaaaaaatcattaaaagtactaatgactggccaaagaataaataaaagagtaacatttactatagtataaaatttgactcatgttatattttgtgctaaatttagcataacttttagcatgtgtcaaatttagaccacattatataccaccattagagtttaattttatgaacatggactgcaaaatatatgtacactatttttatagcactctatttgagatgctctaataaatttaaaaaataaaggtgtacttgttgaaaataaataattttataaataaattaattttaaagatatctactttaattatttcacacaaagataaaaatatcttaaaaattttggggtatacttataatactaggggagtaaatataattcaattaacccttcaaagggctcgcccctgttcctctgtgtgaattccttcacctgctctgaatccttcacccttttgggttatgctctcgctccgtcaaagagccttctggtgcatacttctagagcgcgactgagatagacaacctcttggagaaaacaaagaatctgaacctcatggcagaagacgattaggagattgatgactcaagtgcggcagaggtagggaaactctgcttccttggccgattgtgtacccagtaggaattctgtaagtcccttcttaaaactattctctgttgaattggaaattgactaagaaagaatgggattttaagttcaaagagaaaacaaaccaggcgatattcctcgtacattctttcaaggacccacaacaattagatcatgtgttagctaaaatgtcgtgggtcattcaaaatgagttcttgattctcaaacggatggaacgaatgtcaatatgttgggaatctaaattgttgttgttcctattggaagggcgagtttggaacctccctattccctcaatgataaagaataatctggctcggttaccaagtatggtaagaatttttcggtcaatgaacttgatgttcctaaaatggccgacagtggatattttttgttcaaggtcatgagctccattcgatccaagatttgtctcaaattctcgttccctttaatggtggtaaaatttggctccaatttatatgtaaatgattacaatttatgtgttttaatggtgggatgatgggaaaagagggtaagcaatattcgaaacaagtggctatggttgagaaagaagtgggcaatttgactcaggcatatgggactcagctagagatagatcctcttctcgatatacgggggattagttcagtaggcggcattagcgaacatcattaagttctctacagggaaatgtgtctgggaagggaaagaccttgatagtggatacaaagcttccagggagaatcattatctctttgggactctcagtacaagggatgggcataagatgggagataaagtgatgtttcaagaggaatcttcagggactaaggtcatctcgatgacttccagacaattgatagagctaccaaattctgagtctcctgtggaagtgtcacgacccgatccctaggtcgtgacagatatgtaatatccataacttgggtggtcaaatgtcacgatttgacccttgtaggaagataaagattataaatgatccttttatttata

SEQ ID NO: 112458 - DNA, 4751 bp, Cannabis sativa
gtaaaataattcccaacaagaagccacctgcatctctggagcaggcattgcaggagcaccctgctgcctcaggcgtctgatctcttcgtcttgttcaatgattctggctaacctactttcccattcttcggcagcttgcgacgggttaacatctcctcgactgcgtgccctgcctcggccacgtatattcgaaggaatctgaactccctgaccaccactagattcgatcgtgttaccctaactcctcgtgtttcgcctggcgtccattctaatagaacagcctgggaaaccaagagctagcctggtcagatcgtgatcaagaataatttactaattaccacttattttagaaattaaaacatgtgtctattcagttatcagactactaacatgtttcttattaggcttttcttataacatactaataaaataaattattaaagtaataaatattttaaccttctagttatgttagctaaaattctactaaaaaatagaaaatatgattagacatgttctaatagatcatactatcaattaaattttaacttaagcattaaaagaaataatttttcaattatttaatattatcttgagctgttggtgttgtattattggatatatactatattttatgtaaaatattttaaaatcattcaatatgactatctcgtgtattaaaaattgcatttaaaataattattaggtgggattaagtaaattgggttatctatagacaaataggactcttgggatgatttaattactaatccaaatttcctaacaaagttattaaatacagagttccctcactagatgacaaagataaaactgttggaaggcagtttgactttgtggttagtggttaccaggtttctgtggcttctaatgttctcgagagaaactaataatagaaaataacaaaagacgaagtgcactgaatttaaagggtatatgtcagtgattcaattaagttaatattgattttattataggaataaaaatgtggatatttggtgttaagggaccatctgggttctctgctcgttctacagctgaggaggttactcgtggaattgatggaactggtctcactgcaattgttacaggtagttttttttttcttggtttttttttgttatttctcaaagttgttatcttggtttttcttattttggtctgtattccattctattatgtgtttagttactgagaaaatatgaggaggaagagatgaaacaaacagcttctactttgttatgttgtaactaaaatttggtgtctgaatggaaattattggtcttaaatatgttgcaatctataatgtccactaaacatgtgcttgttgggctttagttgtaccttgttaagtggagttaactttatactatataaaagctacagatagtgtttttctcactattataatgtgaaactatttttaatacaatccttaatgaacgactttaaggactgaatagtgatcaacaatgaagaaatgtgaaacataacatcacttttgatagtatattataataagttaagaggaacagacttttttcagagaaaagatttagattctcaatttaattaatcaaaaaggtgtaactcaaatcttatataatactgttatgtttaatatgagtatttctaacaagtcctataagcaacaaggtttcagtttggagaaaaggtttcaaatttcaatccttttcttttgtccctaaatacatgttattacactccttgcatttgttccatttctcatatccactcttgatcttgtttcaggagcatcaagtggtattggagcagaaacaacgcgtgttcttgcactgcgcggtgttcatgtcactatggctgtgaggaacatggctgcaggaaagagtgtgaaagaagaaatcatcaacaaaaaccccgccgccaaaattgatgtcaaggaactagatttaagctcaatggcatcagttcgaaaattcgcctcagattataggtcatccggtcttagtctgaatctcctcatgtaagaaattgagttactatactgaaaatgtttcaatgactcactttattttttgtcttaaatatgttttttcttcttctttagattcagtactaagttttgaagcttatagtttttgactctttgtgagaaagtaacaatgcaggagtgatgggtactccattcactctttcccaagataaaattgaacttcagttcgctacaaatcatttaggtatgattttttctttaaccacacataacagcaattattattccaatatttctaccattgtttgagctgagaaatataccaattttttgtaggtcattttcttctgacaaaccttttattggagacaatgaaaaaaacgtcaaaagaaagcaacaaggaggggagaattgtgattgtatcatcagaggctcatcgtctttcttctaaagggattcgttttgacaagattaatgacaaaaaaaagtaccacttttgacttgaaatgtttgatgaagattttcttttgacttctttcttttgcttgattttctagttggtttctctatacaggtacaagaacttctctgcttatggacaatcaaagcttgccaatatattgcatgctaatgagcttgcaagaaatttaaaggtaaccaattcaaatttgaccaccgtaacttagtatattgattaataaagagtaattggtgcaattagatactttctaaaatgattttgataattcatgaaaaaaaaaagcttttctaatagggtgttgagtgtgtcaagaaggctacttcaaaaatgtcatttttcgtagtgatcttgaaaagaaattctattttcctaaatgctatttccaattacagttcttctttatttcattctttctgtaacttccttgaaaattggctcaataggcagaaggagtgagcataactgcaaattcagttcatccaggtgcagtagctaccaacattcttcgcaactcgggtttagtattcggtatatcttcaagcttacagagattcaaataattttttccaagatgtatgagcataatcctaggcattgttaagaaaaaaaattaaaaccttatgttttggcttggtgcagacactatcagagtccttggaaaatatgtaatacaacacatgatcaaaactcctcaacaggtatcagggccatgatataatcagtgttcaactaaatcccaacaaagattacctaatatttaatgtatttattgttttggattaaattttgttacagggagcagcaactcaatgctatgtggctttgcatccacagcttaagggtgtaacaggtgagtatttcttggacagcaacaaagccaaaccaagctctatggctaagaacaaggacttggccaaaaagttatgggattttagcttgagcttgactcaacccaagtagttggacccaatcctatattagttccacttcactgaaaaatcttcacatatatatatataaattattttgtgtcattgtggaagtgttgagggttcaagtctccttaatgtatcacaaaatatatattaagatctgtatcaaaatttatgtatatatatataagttaaaagaaattaaggaaacaaatattgttccttacatcattatgggaactttagttttccttcttgagttaaatttattctgtcgaattatttttataatatttcgtagtattatcttttatctcaataagatgttatatttgagatatttttatgtcttttcaaagtgctatttttaagattagccattaaacaattactttcaacaaaagatgaattcagttggaataaattctactattgtattgagaggccaatataatataattgttatatgcccattgatttcatgtatttttaatttgggttttctttctgcatattggtctttgatgccagtggtatcttttttaacttccagttccagcgagaaaaatagcacaaaaaggccaatgggataaggtataaaaactaaaaatattctaaattgtaaaaaaaaaaaaaggttatgggagatctgtctctggttttgtttttggcttttcaaagaaagctaaacttcacacatgtggttccccacatgttattttgacagaacaataataagtgaaaaactgaagattattctttataacaagatggaatcactttctttttggattggtctaagaaatactgtgcaacccttgtttttattgttaggttatgtacaatgtacttgatcataaaatccatttgattttattaataaccctccatcaatccatctattacggttctctcaacaattctcactgagattggaaaaaataacagagagatttaaatgttagagcagggagaaagaacagctgagatcaaagcttataaaatttaaagcaaataataaaaaataagtgcagatcagcatggaaaggaagaaagagagagacacaacatgaataagatttcttgtatttgatgcagatatagtttaggtacaataacagtatcagcaagaccaaccaagaccattacaggagttaggagtgatctgctatatgaaatgaaccatagaagagatgaacagcctggcaaatgtcaacccttcattcatcttcacaaaacctctgcttcaaattcttgtttccatcattctgtacaatcaactttagctgctgctgctgccgccttttttccccagaaaaggaaaccaaaaaaagaaaaaaaaaaa

SEQ ID NO: 112459 - DNA, 2270 bp, Cannabis sativa
  modified_base (660)..(661): a, c, t, g, unknown or other
ttttgtggttaaatgttacaaaccgtaaagttcaggtggtttagccgccaatatccttttaaaagagaattgttaaaaggcgatacttaatacttttgttggtatcatattattattggtataattaagtattaagtatcatataacttaagaaaataacttttaagaaatatggcttaggtttgttcataaaatacttgatctaatccaatctgcacgatccaattcgcaaagtgtaaatatctgtacttgtgcgtattggattagattgaaaattttaaattttgaacttgtgcagattggatgttgattgatatgcaaaaataattgatcaaatccaattcgcacatatttataaattatacatatttttaacattttatatatgcaattaacatttaatgcaaaaactaatagtaatttaagaatctgatacatatgatataaatatatttcaaaacttaatagattaaatttatattttattattatatatagagaaaatataatttgaaataaaattaatattttctttatagaaataatgaatttgttattttatttattttaatttgttgttggaaaataaaagaataataatttgttttgttttattattacttatgtaaaaaaatatatatttttttaataaatattaannaatttaatattgaaaagtaactaattcaaaataaccgatccaattcgcacttttacagatttaattgaattggatttgagccattatgcggattatactggatccaaaatatgaaatccgcacttagtgcggatcgaatgcgctatgagcaaaatagtgctaactgaattggatgaacacccctatgaacaaacataagctatggatggatatattccaatccaccttattcaatcacaccgtcctttaggaccgatcttagggtatatagagcctaaggcaaaattaaattaaattattttgcatgtggtccaataaaatatgaataagtgtactcaatgatatttacactatgtttgataagagataaaagtggatggagagacgtggaaagagataacaaatctttttgtttggcaagaagaattgaatgagataaatgagaggtgagagaatagcaaatctactcgaatctctaatttaaaatttctccaataatagaatgattaaaactctctctcttcaataattgtaaattacataaataccctcaataaatattattagaaaataattataagaataaaatagtaattttattaattagtaattatttatctttcaattacccctttcttcacaccaaacaatataaaaatgttattactctcccctccctctcttatattctccatccattcattttcccttctttctggacgttatcttttggttttaatcttaacaatttgaaatgatttagctaaaatcaaaagataaaagtaaggaatttgtgcatcaaatataaaagaaaaatttacagcaaaagtccttataaaatttattttgatgcagattagtttctgacatcgagaaatagtgacaataatccctaaagtcacgtttcttgtaagtctattagtccttattttaacgaatgtgtttacttattcaaaaatatcacatgtcgaaacattattggtccaaattataattttaatttattaaaatattaaaaataaataaatacattatttaaaaatcataatcttttttctctggggttttttaatttttttcttcgtttttttcatcttccaacaagtcgatccaacaactacaaaaaacccaccacctactctcttgatatatcctttctcatcctctcaatctctcattaaatctcaatcactctctctccccttctctctttcatcttgctgaacccaatcttcagactcctctttcactgtcaaagtccagatgtggcgagccctctccaccatcaaggtccaatcgcagccaacctctccaccatctggtcagttcaacaatcacaaatacaaactataatttagcaaagctgttcaaatctcgtcgatggcgaacaaaggtggttcgtattgtttgggcagtgatgagcttgtctagtaaaatctcatcgatgacagaagaacttaagaacattctagctctgccacattcgaggagaaggagaacgagagagtgctttagggttctcgggcattgggaaagttgagtagtggggcgagggtggctggagtacaactgtaacaccctaactaaattaggcgtattacgtgatttt

SEQ ID NO: 112460 - DNA, 4959 bp, Cannabis sativa
aatttcaggatgggtgacctcttgggaagttttcccagaaagtgtgcgagtgaggacaaagcacgctagaaacacttgtgttggtctgtagtactagtcgttaatcgaagaagcagccagagtggcgtactcatgtataagagccattattacgtgggtgtaagggcccaatggaagcttgaagttgggacgttacagtaggggaagcaaaaggtatgtggaattgtctaaagagattgtgtgattagttggggcaacgagtcaataagcttaaaacttctattttcttcagcaagaatacctctgagtatacaaagttggaaattagaaatgccctgggaattggtggcccgaaaggcatcaccaaatatctaggcctccctttattccgttttagacaaaatgatgtagattttaactttattctggataacctaacatctaaactgtaagggtggaaagcaaaaactttgtctaacattggtcgtgccacctttataaaattagtggggttaggtatggctgtttatgccatgcaagataccaagctctctaatttccttttttttgaaaattaatagcatggttcgagatttttggtgggattttaaaaaagaaaatcacgggatccacttgaaggcttggaacaagttgtgccttcctgaatccaaggccttcctaaatcccgtggcggccttggattcaggaaaactaaagaaatgaatcaggcattttttggctaagtgggggtggaaacttcttacaggatgctagtctttgtgctgcaagatactagaggctaaatatctcagaggaaatgatattctcaagtgtaaggctaaggttccaaactagtagtcttagaaaaaaatggtgaaagccaatgatatctttaggaagggggcttgtaaagtgattgttgggatttatgacctaagaacaagtaattaatggataatatattagagaatatataaaatacaattataagataaatgacatattaattataagtgtataagtattaaatatttgaaaattccttattcatatagagaaggaataatcttgtaatgatgtacaagagaattaagatgatatgatatgaataaaacaagtcggtagtgtattaaagtaatgtgaatctgtaatatggacctgctaagtacgatttaatatacactatacttcttgcgtgtgtgattttgattcgaatcacatatgttgataaaaaatgtaataaagatattgtgtataattcgattgtgcatgactggaccgatatgtaataaacatttttcattaacgtgtcgtttaccataaaatagttattcatatcacaatgatgatcattagtagatcagtctgaattctgagtatacatgaactcctatttgcgttcattgagttctttgatttacttgttaaaatttctcagagaagatgattcttacaacttttattttgggaacttaatagcatgcttacagtatattgttaggcctgttgatagaatctagtgaccgcgacattcaaaaacttatctacttatttaatagtgatactattactgccatttgaaggggggtagtcatatggtggagcattttgtctaatgcacgcccaaccagatcagtcttgataaaccactttcctattgctaacaatacctgcccaatttgtggggtagatgagaaatttattgagcaccttttcttcattgtaacatggcatttcatctttggcgctctttcccttggggtatctttcctgtctctggtaaaagaattcgtgtgtgggattgtgtcaaattcatttggagccttaagcacaaaggcataaatgcatatgagatcttcctttatgcatctattgttattgacatgatttggcggattcagaatgataaagtacataataacatgatgaataatgtgaatcaatgtattgactctattcttcactcttacgcagattatatagattcccttatcccttccccgcctctgatttaatgcattgtgtggacccctcctccttaagattgactcaagtgaattgtgacgttaaagtaagagtggagcacatgtgtattgtagttgttgctagagaccggagtaaggtggtttgagtgaatacgacaaaattgaatatttcatatgtactttgtggtgaggctacccgtatttgtttagctttggaagtggcgaaggatagaggctacaagtttatcttgtggaaagtaattttaaggtaatgattaattctatcaatgatatagaccctaagttgggaaggtgaaaaattgagaactattccatattttatgaaagatttttttttttgttggctgtttattttataatactgtaaaaacttgtaatttttcggcctataagtagacttttgtctataattagtttgggtgattatcttttctatctaatcaaccattctttaaaagaaaaaatgttcatttgttgtgcatctagaattttttactgctattagaggcccaaaacaaaagaaaaaatagtacttgattccagtacgaacaaaccctaaatcattcagtaaattttaatttattttgatcaagcacccgaggaatagtctcagtaacaaaaatggcagcgccaccagtgggggtgccgggtatggaaggtggtccacctgtagcgccacctccaccgggaacagacatgaccggaatatgcttcagggaccaactatggctcaactcatatccgctggatcgcaaccttgtcttcgattacttcgctctatcccccttctacgactatacctgcaacaatgaacagctccgaatgcgctccattcaccccctcgacttctcccaactctcgtaatttcttcaactcttctatttttttttttgttttcactctgtaaatttccagttaattgctgaaattttgaaaattgggtttgatgcgaagggaatttctattatggaagggaaaaacggaaacttttgaattatatagacatttgtatttagtgatatgaacttatctggaagccggtaatctaaaacttgtcttgggatttttcaattcgggtcaatatgaatatttggagcataatgtttctgattctctggtttaatttgagactcattaatcctataatcttttgttatattgagaaaatgtttataactttagcattccattaatatgatctagatcttttagttcttgagattgactccaacttgttgggtcaaaatagagttgatgatgacggtaatttgtttggatcacaggaaaatgactggcatagaattcatgttgagtgaagttatggagcctcaccttttcgttttccgtaagcaaaagagggatggacctgagaaagttacactgatgctgacttattatgttctggatgggtcgatttaccaagcaccacagctttgcaatgttttcgctgctcgagttgtaggtgctttattctttcagagttatgttgtattcttattatatctttataactgaaaatgatttctttgaggcacaacactatcacgggtaacttccaatcctgcaactttcaacatgtgtgtggaagaagggtgtaatttgaagttgtctcgattcaattgttagtgttcttttagttttgaaaaaatggacattttggaagactacataacagtttcatagagtatttcgaaattagaagacaatatgtttaatgtggattgtctatggatgatgcaggggcgtgctctgtactacatatcaaaggcctttacaacagctgcctcaaagtcagagaagataggatatggtacatcatcttattaacttgttttgcaccttttttattaggtatttgaaagggttcataaatgttttaatttagtttgatgatacttgttctgtgctatgcatctgtatatttttgtgattttgaatattagtatagcaagtaatgagctcaactggtactttgctttgctgttttggactaaggacgttttaatcttgggccttggcaactggtagaattcccaaaggtattaacagttctgtattgtaaattttaatactcactcgtgttatgtctgatgcagttgattccgaaaatgacagtgcagctttggaaccaaaggttgccaaagaggcaattgattttagagatgtaaaacgaattgatcatattattggaactttacaacgcaaggtatgttatctttcttttcttttctttttttttataaacacaaggcaaggtagttatcattcatctaaaaatgtacattctaccataattgtggaaaaatgctttaagaacataacagtagaccaaatgtacctaagggaaaagtccttgaattgatagcagttgctttttggtttgttaagatcccatcaattgattactggtttgtctagagttaacactgaacttgggtaaacttaaatccacattgccatttgctaggtttgagacatgagaatgagtttttgtatgctttttaacatttgttttatctgcatatcgtgaaggaatgtcatggactcaagatatttctttaaaaattctacattatttttgattaaagataattctgtaaacgcgtgaaaatcggtgtagtcaatgtatcaaatgcacaaaaatgtgtctgatgaatatttatggatttgataaaaaagaaaattatgattccctaataatatttatatttatttgacacatgtttttgtgtatttattacatttttgtatgcatcccatccaattacaacgtgtataatatctctcttacattgtttgtgattatttaacggaaaagttaacggttttttttttttttttttttaattttcctgttagggggtgtttggaatgagttaatgctaacaagggaatagtaatgtgaaacattaccttgtttgttttgagtgtttagccttggaatgttattccc

SEQ ID NO: 112461 - DNA, 5643 bp, Cannabis sativa
  modified_base (3995)..(3996): a, c, t, g, unknown or other
  modified_base (5071)..(5076): a, c, t, g, unknown or other
gtatatgtttgtgctatgatgtgtgaatgctggtacatagtattttatttttccttactgggctttgcagctcaccccttatttaccccttatgtgcagataaataagccggtaagctttcggtgacaagttgagtctggacagcatggggtgtatctcgtgagatcatgtaactgcatttggtcttggccatcttctgctgaaagtctttttttttaaaaaaatttattgaacatatcgaggatgttgtcgtttaaattttctattacttttacctaagtagtaatactttatttttaactgggtacctatattttgaaaattgttattttttttaataaaagcaatattagtatcttaaccccagtttatttatggcatcttattttacgtaagtaagggtacatcaaacttgtttaataatagcatgaacagagagttttaaactcaaaagtacaaaggaaaatcttatatttttctttcttctaaaggtctaatgtttaattctgcaagtatagatatgatattaatcagaatttatgtgcacaaaaatgaaggtagaaacagaaaatggagttatctgatatcatattagagaccataatttaatttaccaataataagcaaccaaaatatcactattttccttcatgaaactcaaaaagagtgcatattaacagaaggaatcgccacattttgtgctacaaagccttatctatagggctcgaggtcaaacgaacaagcctacgagtgttacctgaatgaagattttcaagtagcctcggtctcgctaatcacaaatgcttgaattagactctgtgcagcatgagtttgttccggtattccagatataattatcgcagtttccaccgctccggccttaggctccataatagtaatatttgcatccgaaatctgaaaagaatgccaatgtagtttcgtgtttgatttcttaaaagttaaagaacgccttaatatttgttaagggattataaataagagtgattcgataaagtggcttcaaaatacctgacgaatttgtttcaaacattcaccatcttctccataaattgcgggaacaactgaatgaggaacaacaacttcaaccgtcgtgctagaaactacagccggtgggccgactctacaccgacacataagagaataggtaaataagaaactcgataaaaacattatgcaaatatcctaacaacaatgcagacctttcgggaaatctatcgaagtctggcaaacctgggccaccaccttctagaagtccctggatacaccgatcaaattcgtcatgttagatgaaagctttggatttatgcatttcgtctccaatgacaatcaaccatctgatcaatctaatcattgatcggacaattgtgggccgaacaatattcatccccgaaaagaataaaaatctgtgccagttaagattgtatatgtagtgaagtacaaaaaaataagagctattacctgaggaccccacggtcttctttcagatagcgtcgggccaccaaacctatggaaattgttcatgaaagggacacgatcatcacgaggtcggaaaccaccgtgtgggtgcagatcaaacttgtgtaaagatggaccaaagtttgaatgcattcctggaggtgagagctctcttggtcccaagtatggaaggaatggaggatcaaaaaatggaggatttgcgggataattcattgaaggaaaagcttcacgaaagaaattatgctgcaacctagtgctaatctgtataagagcatcttgaaccgcttcaaattctccatttaccttttaagacaaagaaaagaatagtaaacagtacaggttaggagatatattacaacaagtgatcaatctaaaggtacaaaactaaaacattcaacatataattgattacctgaactacttcttcatcttgtaaagcacacttgggaatttgatcctttccccatatacgaatatgtgctcgtgataactttctcatttccgctatgatggaaccacccttgccgagaagacaaccaatctgattggaggaaataagaagcctggctgtaacactctggtccttactgtcaggtgctgcccgagctattttactttgcacacgaagaactgcatcttgaacagctgatacccgatcatctggatgctgcagcagtttattaagtcacatgttttcattcaaagtatgcgtgaaaaattagatagtcaaatcattggaatcgtaccacatgacccgatacagtaataacacgatcctcagaatcagacatgccttcttctatgactttaacttcacaaccagtgtcttgctgaattgccttgatagcggttccaccctttccaattacagcgcccactctttcagtagggcataatatccggaaagttagtatttctaatggtggcttcattcgaccacgaaaaccatcatgaaatttaggtactaatgagggagcggcagaatgaaactcaacatcacgaggcctgtcagtataggttgctccttgagcagaaaaagaacgaatggatgatggtaatgcttcaggtctaggacgaggttgaccaaataaatgagaagatggtcccaaaaggtttgtagggaaaatttcatgatcacgaaagggaatccccaaaagctgaagagagacaaggttaagagcttttcttactgcctcaacctccccagtgatctgcaccagagtaccgaaaaataatcactgccttgttctaaaaccaacatcgaaaaaagcttaaaatatacaatcaataccatgatatcagatatgtacttcataacaattcttccctttattcattaaaactttattacaattgaatttgaagtactctcaaatccccactcgtgtttacgctcaatgattaagcgtataatatttcccatgcaaaaatttatgaaaacttctactctactaatgaggacttcaacattctgcaaactgaggcaaatcccaattctccaacaggttgaattatctattcatcaatacaatttactccccaaagaagaaagtaaagatatacatacataaaaacctttaaatatgataagtataaacactcctattaaaaacagtaattgaattaaatttcttagaaccatctatttcaatttcttcattagcatcttaattacagcttaaaatattaattagtatacaaccaaaccaattgccagttctatcaaaaaccataatggctaaccaggacaaacagactatcccatctcaaatttcatgcctataaattattgaaaggtgtaactttgatgaacttgttctaaaaaacctacattataatgtaaatttgagtcaccaaagtactgaacccattggaaaggaataacaacacacatatcacagctgactaccatttacactacttacagtcaatgcaactgtatggttgattatataaatataaatatatatcactcgaacccctacttttctgtttttgcacctagagaaactataatattttatttatagtatccacaaattttgaataatttacagtatcaaagtaaagtttaaaatagtacctactataactataatgtatatacatataacgaaaataagaaattgcagtctcctaagaattttcatatacatatatatttgttatattacctgaaccaattcatctaaagatgtagcacatggagggagtttatcccttggaagaattctaatttgagcaccactatcagatgccattagcttaatcacacttccaccttttcccaaaatacatcccacttgagatgaaagtacaagtaacctaaaaacaaaagcttttttgctttgttcttcatcattttctccatcttcttcaaccattttctcaaaaacaatcatcagagccttcttaagtgatgaagtccttttcttttcttcttcttcctttttctcatcaccatcatttttactagcttcttcttcttcttcttcttnntcttcatcttcttcttcttctttctctaacccaataacgaaaactctctcttcacaatcaggaatagcttcttcaactctgaattccacaccagtttcctccttaatttgtgaaactaaacagctttcttctccaataagagaatcagattttgaaattggacatagaacacgaaaaaaatcacaggtcgaagaagaattcgaatttgaagattgcttttgacgatttcctttcccatctgactccgtaagactctcgtcgcgttgtctcttcgtgggtgttaatgaggagacagacattgtcttcaacaacaccccaaaaattcaacctttttccttgctaaaaccctaattatcgatttttgaaaaggatacgaaatgtttatataatcaaaaagcccaatttttatttttcgaatcctgggaaaacgcagtaagattcaattcacgaaaatgcaattgaaatcagctgaaaaggaattgaaattagagagacctttgattatttaagaaaccaatttagttcagagaaatttgagtgagctttcttctcgagaaacaaacacactccttgtaatcacacgtgctgttagagaatagcacatgctgtctataatattaataaggtcttagaataatttatatcataaatacacaaatttaattcgttgtaaataaatatttaaatttaattttttacgataatatttaagttataattttaaaatttttataagttcatgaaagttaagtgttaattaaattgttacgtgatcgtcccgattggttcaggtaattaaatttattttttatttaaaaattaatttaaatatattactaagaaaataacacgtgaataatgacttgacacttaatagttaggtatctatagaagttccagaaatttaatttaaatattattatcattgaaaattaaacttaatacttatctacatctaagagttaaatttaagtatttacgtcacagattactcttttatttttattttcttaaaaagtaaattgttttaggataaaaaattggattatttcacaaatatacaaaaataacaaannnnnntacaaaaatacagttgtatggaattttaaatatttttataatttttatgattttatttacagagaatacagttttttgatatatttttatgttgtacacttgttaattaattattaattttttgttatttgtatgttattttatgttgttgtttggatattattttcctgttacttttacgtaattttcgtgttatttttatagaatactgtaaaaatgtaaaaagaataatctttgaacgtaaaaatgtaattttttttttaaaaaaaattagcgcattatgtaattgtcttaaaaaaataagaaaagtgttatgtcgagactcatgtattagagtctacatgcatatgtttaacttgaacaccatccatttaataattttgtcgaaaaataaatttcaaatacaggttgaccagggccgtctcaaggtgatgagaggcctagggcgaaatttgaaacaagggcttttttctttaataaaaattaaaataaattttaaataaatttggacacaatatcaattttaatttattttttttatatagtgtaatacaaatatttaagtta

SEQ ID NO: 112462 - DNA, 2149 bp, Cannabis sativa
tgattttattcttgatatttaaatattattattttcaaaatatttaattaaatagaaaattattaataagttagaaattttaatttcaaaacaagttaaattcttcaaaaaaaaaactgtgtttttgactgtttaccaaatacacttttatcacaacttttagcttttccaaaaactatatcaaacaggtccctaaacttgtttatttcatgtgagtttctaatcgtatgtattattgtgtctgacctattttgtagacactattattaaccatgttgtcaaagtgttcagacggtctcaaaactcaaaaagttccaacgcatattgttattattattacatattttgaaagtgaggtggtggcatcactggcatgaatacggcaaccacgattaaggataaaaaaagtaattcattataatggcaaatgcttgaatagattcaacaattgaatcgacggagcacaaaggttaccctgggttttagtcttctaatttatacaactcaaaatgaatgacgacttggtaaaaattacaaattgaactccataatgcacaacaaaaataataatcagaattagaaagacagaagaaagatcacattcccccatccctacatttctattttccttctccttttacatagtattcagttctaaatagagtttaattaatggaacaaccttaacgaaaacaattttgtactttaccaccctataatctatataattaattacaaactaggaagggagaaataaaaacaaagcataatgttgatggaattgcaaaaactcacggcttaggcccctttctgtggcagtgtttcaaaggccgagatggtattttcgaattttatccgatgcagaggggcgccactttgctttatagcacaagctgttttgtcttcaagagggcaacgtgcttttagcatggaaaagacgtgattgtttagcctccttgctttcttcattgattctattaggacctcccatcccttcacccaaacaaaagtacatttcatcaaagattatatagaacacataattttagtttggtagtctctactgttacaatactaatatacatgggcctgattattgatttttgaaatcttaatgctatataagcttaaaatagatgaatgttcatacctgggaaaactgaggattcctgggtgattgtacagatgatacagtctctacttctgcaacattgaggacttgatgtgaaaaatcgaaaagctcgaaatgtatctgctgcccaagcaaataaattatcgtgcaaccaccccatgctactgaatcacccagcaattcacgattgcctgaagatacttgctcagattcttccaaatatccctacaattcatttattctgacacattagcaggaatacaagatatacagtaagccggcaaagaacacaagccaaaacttggatgtgcttctaagttagaatgacgtgtatgtgtgtttgcatgcacatcgttgtgtaatacaaacttattgatatagttgtatgactgtaaatatagataggaaggaagaaataattcagatcattcataacaaaataaattgttgcaatttgaccagtgcaataatatattttggctttcaagataatttcttcaagatttcaatagaaaatgcagtaaaaatgctctaacacatacactgaggatttgacatatatgccaacataaaacttttgcttacaatttgaagcccactgtatattctgtagaaatcctttgaagttgtaatgtcaacaaatcctgttttgggaatagcactccatttactgcaatacttatccaatgctgcacttgtaaaggcgagggcatattcaagcacacttccagtattcatgtttgccttgtataaaagatctgcgattggagaacacttctatattttaaatgaactataaagataaaagcaagactcacatatgacaaaaattttacggagaaagcaagcaactggaatatcgagtaataaaactttcttgcccccaaagagcacagaactaaggtgggtttgtttgagaggaatgaaagtataagaatgggaatgggaatgagaataagaataggaatagaataaaattaaaatacataaaaaaaattgataaaaaaattattaaat

SEQ ID NO: 112463 - DNA, 2092 bp, Cannabis sativa
ggcaggtcgggtccaacatacttagctttatcgggcgacttcgagttggacctgtatccgcccgccaaacccgaacattttacaatttaataatttggttttttaatttttctaaaattaaacttttaaacttaacataaaaataaaacctaaaactaagccactagaccaaacacccctgaccctgacctcgactctccttacccacccagattaagccctaagccagaccaaagcccccctccgctcaatcgacgatggcggccccattcaactgttctacccgagatcggccctcccttgacgaagacgaccggaagccccaaccagagctcgcctctcctttcacacttgtcgttgaagccatctctcctccttgttgtcactagtgtgccttgtccaatagcctttcctcctcctcgatccacgacatccaacaaccggagcccaagtaattttttaaaaaaccggtcgtcctggtcaacccaaacttgttgacttgcaaacacgttgacctgatgaacccgatcattttatgggctagcacaagttctttttttccaaatcgaaacccaatcaactctcatgatgttcagtcctaacgagagatgcccaaacttacaagcaaagctttaggaaaatttacatagtatcctaacttttgtcattttttaacaaaaataatgtcagacggtattttttacttttttaatgtatatttttataagtttcataatgcagtgttaagttttcactagtattttttagttgttttactgttgttttgagttgttttgctttgtgttttactgatgttttataaaaatacagtatttttgtaaaaattaacctaaattccaatatttttataagtttgccaagctttaagccattttagcttcaaaaagatagtcgttatgtaatgatattgagactcaacaaaagatcaagagattgtgtgttgtttctttatcttgcaggaaattgtggaagaacaaataaatactatccagtcgataagggaccctcaagtcgaggggcaagcagcccaatcaaaatcacataacttgcaaatattatgaatcattagaatcatcatattttgatttatattgttcttcgtggaagtattgaagcccgtctcaaattttgacattcatctaaaattaataccttcatggagagtgaagatagaagttaagaaatctagaagttaatctcagcttttggagacaactgattaatttaataacttgaaatccaacaagattagtgcagtagttaattgatagtgaatgaatttcaaggattccaactaaacaaatcttaaaatcaaatgacttccatgaaaatcaagacccaccttgccaccttctctatcccatcaaagcttacaatcaaaagagtttgaatggaggctagggataataagaccaaataaatgagatgatgttaattctaagccaacctaatgaatgagctatgaaacaaatatacagcttcaatgttttccaattctacaataggcataaatatcaatggaaatttgagattaggccaaaatagcaaacatgacttaattcactaaaattaagccaaatcggattgggcatcagatcatgcatatcacaaaatgtgtagtgaaaatatgaccttatatattagataactaaaggccaatgggccaatggcaacccttttcatttcttaacaatttctctgtctattttttcaaagtctgaattcaaagtactttctccattaacacaactagaagttatttatattaacactaatatttgaaccttgtaataatttcgatttcagatccaaataaataaaaatagccactgcttaagaactcaaaatagatccttgaatatttcgaaaagcttcattttcattcatattgaaattaaaataattacagtcacaagacaatccaaacattgtcacatacagtaattagaaacctaaccctacaaagattaattcatcagcctccaaaaccgtaaagagttcggccttgtcttttcaaagcatagacgacgtccatggcggtgacggtcttccggcgagcgtgctcggtgta

SEQ ID NO: 112464 - DNA, 4349 bp, Cannabis sativa
  modified_base (62)..(65): a, c, t, g, unknown or other
aagaatataaattgaaagaaaaaagttaaaaatacttagtataattaaagatataaattttnnnnaaaataaaaattattaaaataggatgtacttaacaaattttaaggtgtaaataaaatttagctaaattatatcaataaaataatatataaatttaaacgattatattttttgttgagtaaactatattataatttacatcagttatttggagatgctaacggaagaattgagttttattataacctatgtaatgaagatgtagtagagaattatttggttaattagcaataaatatagatgggaaaacaattattatgagttataaagagttggccgcttcgcaaatttaaaccgtcattatgctaattataatttattttattttttatcacgaccactttttttgtagtcacactatcaatattcacatataattcaaaaaaaatatatttgaaaaaataattagtatacatgaccgccgctcttaccatgtctaagttaaacttgcgcaatgttcaaaaagataaaaactctaatatatatattttttttaattaaatccaactttttaattaatatcatatattatttttttccaattttttatttttttttattatttttattttattgtattgaaatacataacaaatttaataaaataaagacttttcatatttcataaaatatataattatatgacaatatttaaaaatattatttataaattatttttttttagaaatttaatttttaaaataaaaaaattggattcaaaatgtttaagattgcctataaactaaaacaaacactacataatcatcacgaaatcatcaattattaaaaattaaaataccaaaagataataaatgacgattaataaagaagttgatttcaattaagaaaaaaaaaatattcatgatgataattcattaacataatagtacgtaactatatgaatgaaggtaattagttaattataagtagaacaatcggttggcttaaacgaaacagtatttttgacacgatcataacccaccaagaaattcatctgagccaaattcccgtaaatagctatgccttgagccgatacaaaagacaagcacaccactgtatcactcacttgaacaaacgtgttaagctgactcagctccacgtcagcgcctttgaaattcatagtgatactcggcgaaacaaaatctttgccactcgagatttggtagcacagactcaacgtaccactggggtcttccacccgcttctcatttttcagctcactcgccaacgctgactcaaaatccgagtagaattcctctggtaccagcgtcagtgtagttcctgaatcaataattatgttgccttgggacactgctgcaggtgttgatgatgacgatctgaaattgataaatttcttgttcttcttaccgttgaggcttcctacggttataccttcgagagtaaggtaatagaaagtgtcggtttcaccctttacgataggtgtggagactactcccgcgccggaaacaactgcgtttgatccaaagctgagtgtgcttgagtttttcgtctgatttccgccggagataaaggggaccaagcagtaggaaaactttcctccgatggatgatgttagctgggaagtgagggaatcaactccaccgccgagtccgacaatgcccgaaccgcgttcgtcgaaagttccttacaaaaatattatcatataaatacttaaataatttacattttattacgagtgcttgtaacatttttttatttcgcttttttttttaattaaaaaataaatatattttttaaaattatattgtataaaactatttattattttttaattttttaattaaaagtttaaatttttttaaaaaaattacttttaaatttattttacatttttttaattaatattttgaggtacaaacacaactagacttagacttagaccctatccccaacttcaaatccaacataaataagatcaacaaacaaaaataaaatttacttaacacatttttattttttgttttaaaaattaaaaaataaaaatagttacaaaacatatttttgtttttcaaaaacaatattttacttttattttgtaattaaaaaatttaaaaacaaaaatattgctaatcaccatctatattattaaaaaatcagcacattaagataaaattataaagttaaaaagaacatacattttttacaaaactaataaaaaatgttacgtaataatatataaatatagtaaaataaaaatataaaaaaaatacattttgagggaacgcccgaaaatgtttatataaaatttaaaatattcgtgtttcggatagttcaagcaaaatttcttttgtttagtttttcttgtatattatcgttttaatattcaattaataaatataagtatatgataattaattaatattgtataaaatagaataaggttatcacgccataattaatattatatatataccatcactattgtggctgcaaccgatgatgaaattggggaaggtgacgggtcttccagaggtggaagagagggtgagaacgtcagtagcaatgttaccgttggagaaagattggtcgccgtaagagacggagtattggcatgaatcgtcgagggaggagcaagatgttttagctccggtggcggacttacaaacagaggaatcacaggtagcatctctgtatgtttttgaagagttgggtttgaagagaggagccacttgcttgtaacattttttgcaagggctgcactgagtccacgtcagatcgctgcctgtgtcagcaatggctaagatatcaaacggcggcgttccgatagagattgacattaggtactcgcccccgtctgtgtacaaggttgattcaactgacgaagttgataattgatgagaggagtagagtgtggaggctcgtgtgatggagcggcggaatgcattggctaaacgctgagaatgagtctgtgatgggttgtagagaggggataccgccgagtcacggtggatgatctctacactgaaaccatcggaagaatacgagtgagaataagatgatagtgatagtagtaataataataatactatcaaacactgagatgagaaaagagattccatgttactataatactaaataatatatgttaattatttgttatagtattgttttgttatgatctaagctagtagaatatgtatatttatatacaagaggtattggctgattagtgaaactatttgaaatttccatttattgccaaattttggattggaataatcgataggtttgatatatacaaggaaagtcaatgattttgttgtgttttatgtttgagctttgtaacagtagtgcttagtatatttaccccctaaaagttattattttaaattatatgaaataaggaccactaatatactttttaatatttctgtttatattgttattaggccggcaattaataattttctagattattgctactatattatatgtatataatacattataacaaattaagaaatcatagtaacaaaaaaaaatcacgaagcatatcaattcaatccttgtgtgaaagttgatttttttttttttttgctttctaatctgatctgaccgaattaaatacaataaattacccaattaagattagtatttttttttattaaatttcatgcatttattgataatacaaatattgcatgagtacagctcactgatacaaaggattataagtagaaaatcaccaaatctgtgattttatttctttaattattgtcaacttttacagaaagttataattatttttcttttttctacactatgtatatgtatcataataaggggaaaattctatgtaaatttactcaaaaatatgtatacatagaaagatatctatcactttacaaaaaaaataaacatatatcactcatatataagagataaaataatatctctactgaatatcttgttctcactaataataatgataaaaaaatggattatcttatatatgatttttttattttttttagataataataatagtatttctcaaaaaacaaaaatagtaataatagtatttctaattattttatttttttacatatacattttacatctctcagtgtttcagtttagtttgataaaaaaaaatacagaaattactcattgactcaaaaatgaaatagagaaaaaaaagtgatgcattaatctttctgtattttaaattagggaactaagccgcgctttgcgcggtattactcaatttttgtaatatttttatattttgaaaattttatattaattaagtgatataatataaa

SEQ ID NO: 112465 - DNA, 6475 bp, Cannabis sativa
  modified_base (49)..(53): a, c, t, g, unknown or other
  modified_base (123)..(128): a, c, t, g, unknown or other
  modified_base (262)..(269): a, c, t, g, unknown or other
  modified_base (6408)..(6436): a, c, t, g, unknown or other
tatatatattttaaaaaaattaatatgtagtaaatatatttttataatnnnnnttagctaatttattatatttggctatttttaaataatagacatttactaacttaggtgccgtttggtaannnnnntgttttctaattttttaatcataaaataaaagtaaaattttgttttaaaaaaataaaaatgcgtcatgtattctgtaaccactttttttttttaatttgaaaaacagaatacaaaagtgtgttctgtaaagttnnnnnnnntttttattttttaattttatttcagtcgagtttaggtctggggtgggattcgggtttgggtcagaggcttggttcaacgccaggaccgtggagggatttgggtccgggtctagttggagtctaaaatattcattaagaaaaaaaactgtttaaaaaaatattgaaagtgatttattttgtttttaaaattttgattctcaaataaaaaattaaaaaataaaaacagttttatagaaaatatttttgaaaaatatttttacttttttaattttaaaatcagaaaaactaattaaaaaagtattatcaaatgccaacttaatttctaaatttaggctcattttgtatctcaaccctttacttaacaattaagtacttacagaagttccaaaattataacttaagtattattaccactaaaaattaaacttaattatgtaaaaattacattaattatgggaaaattttaattacatatttatttgcaactaaaagttaaacttagatatttatactgtaaattactctaatttattatatttgactattttttttattatttattttttttatttttttacctaattagtctatatatttggaggcattttcgttgtaaacaaaaatccgagttgtggtatttttacaatttgtgggagatggcccatgaaagaaagatgaaatataagagattgtgggggcaaaggtgaaaagtgggcgagccgagtcaagaagagtaagagtcggcatccattaccccgtgattacaggggtttttgtttttgacgcttttcaagggtttagggctttagcctttccaattcccattcccattgctccacctctgttggcttggcttggctgcaagaatcaccaggacggcactctctttctctctctctctctctaccctttctttcttttcctcaccaacttctcttctcttccttattattagggtttccttaccctaaggcggctagggtttctgactcatatcctaatttgactcttattctaattcaactttgcttatacactcaaatcttccattctcttttaaacatatccgatccttatattctcatatacacaattcaattcatacatcacacactttcccatttgtttttcttcgtttttgtggacaattttgattttttgcaccaaatattcatgtggggtttccctatctttctctgatcattcattaaacttccaaacacagtctttgatttttcgagtgtttttttatatgatatagcaatctgggttcctacctttatattctgtttcaatcgtagtgttcttgattagagttaaacttcgattatttctgtgatcaatatcatatataaaatttaaaattctgattgtgaaacatgagttttcctgactctcgttcccaatttatgcaacctataccggcttatgttggtggcacggacgccattaattgttggcctcaattttcaatgaacaatgaagaccaacaatctgaatttgagcagcagccacaacctcctccattcaagagagcgagaaattctgatgatgaaagccaatccaattcttcaccttttccacctatgaacactagaatgatcccaccaaatgctccagtcaataagggtgtcagtaacatattcttcaagacccgcttatgtgccaaattcaaagtggggttgtgtagaaacggtgaaaattgcaactttgctcatggaatagaagacatgcgacaacctcctcctaattggcaagaacttgttggtggacgtgaacgtgataatgaggatcgatcatcatctgggaattgggaagatgaccagaaaataattcacaggatgaagctttgcaaaaagttttacaatggggaggagtgtccttatggtgataggtgtaactttcttcatgaggaccctgctaagtatagggatgatttgggtagatttagggagagctcagccataagcattggaaccacaccaccaccaccaccggttaatcagggaaatgtgcctagtaattcagatgataatagggctgtgaactctgtttcagattcatcaagagcgattgtgaaaccagtgtattggaagacaaagttatgtaacaaatgggaacaaacaggtcactgcccttttggtgagaaatgtcactttgctcatgggtatgcaggtacacagtctgctttacacagtaagttatattttacacctttagccttctttaaatttctgcagttgcctttttttttgttctatattacttgtttgtttgaaatgaattttacatgatgcaacttcgtattttaagtacatgcatagatacctgaattgatatgtctgcccattgtctttaaaattgagaaacaagttagaatgtctccatttcttataaaatgaaatcccttttttgtccgcaattaacttcaaagtttgtcacccttaatgtggttatcttctcgacaccgaaacatccaacattgttttagaagttacttttttagtttaatatgctcaaaagggctcctctcccaaagaggtttcgtttgattgaatcactaaagttgagttgttacatgactttgtaacccttattctctatagaattctggattgtcctttggatagctgcttgtggtttctaatttgaatgtgatcattaatatcagagttgcaaatggctaatggaagagttgaaccagactctctgaatattggctccttacagtcaaaacctcatgctgttgctattgattctcttccgagtgcaacaactgcagctgcttttgatgaagatgtgcagggtaagaagtgtctgttgaagtggaaaggaccgaagaagatcaaccgaatttatggcgactggcttgatgatcttccgctagtgcacaacctaccgagtagagtagagagttgacggaatggaaatcatgttctttctggtttagaaattttaaaaaattttgtaccaaaagaaaagtttttgtgttaattttttcttcttctgctgtttgctttgagttcatttagctttctgtttctttacagtgatgctatattcttttcccttgcatttcttcttattgaaggtttgtgagatatagtaggattgcaaattttgaactagatattggttctggaagtgtccaataagagtcttcgatagcaagtgtgataatcaaggttagtgttcatgtccgcactgagatcttcatagataatgattttgaccattttagattatccaagcaatacattggatactcttgttcttcataatttggtataaggttgttttaatgcaacaatttctatcttttatctttattttttttttgtggtagaagaaataattcaattttattgatagcaattacctaaaataatagtctggaacctaattatgactggcaacaagattaggattagaattttacatatgcaaatgcaaaagtaactgatctaattcacacttatttaaatttgttttaaaaattataaatatattattaatatttaaagtaattaaacaaaactaattaatagtgtaaggaataaaaataatgtgagggcgtcaaagcaatttcatcatataagaatgtgaaaattgataaagtgataagaggaatgcgaggatttcaagaaaagcagagctgagttgggggtagctagaagagtttctttgaaggcaaagcagtgatgaaaatgtgcgagggaataagaggatagaaccacgtggaccaatctgaagagaaaatagaaaattcgcaacatcaattctcgcctataaataaaggaccccaacattcaaacaaaggacggattcctaatcacactagccttatcaaaattgtcgaattgttcctccgataatacacatttcttgaattcgagttcattgatcgaagaaagaactatctctgatttaggagaaagtgtgcaataaagtagagttataattttttattgggataatccttgtgtaaagaattcaagtgtaattataaatttgtgttgagctaatttttagcatcaacaactagcattgtctgtgggaatcacaagaacaaaaagttgaggactaggctaaaatctaggatgggatccaaagaaaatgttggggaatgtagaaaaaactatgtttataagtgaaggggatgtgtaaaattagatcattgatccaactgctactctggcggtagaaatgcgagaaattaaccaaatgatgactgtgtaagataaacataatgaggaactgtgacgtcttgcagaagataaattctgacaagaatagcgtattgctgtggagaaccgtcaacatgatcaagttgcgaattagcaacataatcaggacacgactcagtgattacagaaatttatgcaagaaaagcatatatgcgcgcaaaagtgaacaaaacgtaagttttaactcggaaactttttctggtgacgtggacatcaatgttagacacgtgacatgaaggatgacgtcacagtgttgagtagacccgagtcataacagttgacctgggagggaaccctagccttacgcccatgttgactttgggatctccaagatggaagttgacttcaataacttgaatttaactcattatctttcagtatttagtaccatgaaaatatggtgcaacctaatccaaggcttgggagatgaaattacacaaacctgcaacccggaagccaacttgggcacctagggtttcactcgacgcccaaattgacaccttcaactatggttttagtctccgggatcgtcttattgcaaaagggtcaaaacttgcattgggacataaactacacaaaccatgaacatattcgatatatcaaaatcagaattaaagcaagttcatttttaagcaccgggggcaccggggcccaagaacctaacgcctaggttgacaatttatcaaactgggcgccttacaagtatcaaattagagatttgatttttttttttattccgtcttcataaaaaactaggaaatatgtcctttcgtagaagaaacaacacttcagggtacaaaaaatagggcccaccgcccaggttgacacctggggctgaccttgcacccaggttgacatttgtcaaccaaggccatttcaaatggagtttttttgagaattgtttcgagaaacttctttgtttttagaaaatattgagattcaactattttcaagaaccaaacggaatttttggagggccaaagttgggacctagcgcccaagttgacatattgtctgccccgactgtttccgatcaagttcagcaaaaagtgttatgggtgtttttttcatcatcagaaataatgaagattcaagcaaactcagggagaaaactacaaattcgagcccctagaaacgggacccagcccctaggtagacttagtgttgggcccatcgcccaagttgacaatcagcttaggacactggcttcaattgctcaaatgccgaattcgatgtgaccattgaatccaaaatggtcaaaagcagggtaggagacctcttcgtcaagttcagagccttggaagtatcaaaattgagatcttgggagttcaagagtaagtacggagcacccaggttgacaaaaggcatggtgtgctaggttttgcttatccgaatttgatgttgtttcgaccatctatctaatttttcacaatgacaaagatctatgaagttagagaagtcaaattaacaactttgtatttctcatttctagctcagcttgggtgttgggtcatgaactacattcagtaaaatagtcatacctcactcaattttaattcgattgacacgattcaacttgtattttgaagctaattcaatgaattattaattcatgtctcacgctccagatgtaattctaaagctatcgtcatcaatatttacccctaaggaagttatgaaaataagctgcaggttacccgtagtaggacccatcgggttcgaaaaatggccatcaacaccaagagctaattttcactgttagatcatcatcagcagtcaaaaatatcttgttatactcaaaattcagctacacttcagaagttgacacatatccaacataaggaatatcaatcaattttgagtgatatagtaatgtgttgggttttatgccnnnnnnnnnnnnnnnnnnnnnnnnnnnnnatttacttattaatatagatcataaataacatttaatgt

SEQ ID NO: 112466 - DNA, 7127 bp, Cannabis sativa
  modified_base (6943)..(6946): a, c, t, g, unknown or other
tggacagcaaggttgcttccatctcgtcaggttagtccaatcctatgaatgatgattactgaagtatctgtatgttcaactagaataggtccatttattctttctcattttgggattttgcaaatctgaacatgggattgatttaaacttagtttctgtttgcacaatgctaagaagtctagaaattttgtttagggacagtctaaatgaatagttgtattctcttaaccttaagagtgtctatttcattctttcttacattcctgtttatgtaaaaacttgcagtttgggtacattgttttgacgacctctgctggaatcatggatcacgaagaggcacgtaggaaaaatgtgggagggaaggttcttggtttcttttactagtttgtggttgagtgtgagggttatttttttgacagcattttggtgaaagttctggatagtattagtagggccgtgtttattactgtttagactatgttttgagtaaaactaattgttttctataagcatttcttaaatagaggaatttttgtttttggagtttttgcttcttttatttgttgcctataagcaccattcatctatgtttctggtttttaatttgcttgttttttgtatcatatagctcataatttagttcttctacctaattgatcgttactttgtgggactaatttcaagggtctggtgtgttattctaggtaagtccactacatgtagatagagtagaatcaagagaaattggtgaacattgccgttttaaaaaaagaaattacaataatgagaaagaaaatacttctttttttgaagcaatgagaaagaaaatactgatagcaattttaactaaaaattcaataagctgaaaattatgaaacattatattattgttgaagtttatgcttcgtttttgtttttatttgtttttcataagatctcaatttttagtaattttagtgtttttaaagctttttaaagacaaaaatatgaaaattataatgagaaaaaagaaatttcaataatgcttagttggattttttgttgtcttaatttggtcaaaatttgcatttttaattctgaaattggtctagagttaagagtgatcacttttcaataataaattgaaatattctgagttttagatgctaaagacattctatttgtgattgaaaataaagtcttaagttttaagctaatttttaattatgatccattcacttttaggaaaaaaaaattgaatgaaaattctagatctcttttttatttttttaaaacatcttgtatcgttcaattccgagttatatcgtgatagttatggcgaaaatactatccggtcgtcgcagtaagaaattgaaaatgagaaattgcgaaaatcaacaataaaaaggggaaactgcttgtaaggcctcgggtcttggtgttttttttttttgtaaacttaaatttttggttttatttaaatagggttgaggataccattcgaaaattgaaaggaattctttgtgtagaagttgagcaagaagtagaaggcactagtggaggacttcaaacagtgttcttttaaggattattatgtaaaccacttgagtttattttatagattaatgtaatttattcaatttctttttctttttattcaattccatacaatttattttttaattttgtaattatttattggccatctataattttttaattttatgtcgagtctcacttagtttactttattaaggattatagaaaatcattaaccaattataaagtgccaccttgtagtgatgctaggcatcttggtgccgtaaattgtcatatttgacaatattttattgttattgttgtgtatgtctcttctaatttagactatcaagactaatcgaaatattttaattcttttaaaaaaaaataataatatcttacaaaactaaagatgcaacagaaatagatgaattgttcctactaaatatactatcaacttcaaaataaaaatggcaccaaaatatgtgtcaccttattagcagattgtttaataccagtgccggccctgggcataggcgggctaggcctgtgcctagtgcccacctagcccaggggtctaaaattcttttttcctatttcaaagttatatatttgttttactgattttgaaaaatgccatattttttctaatataagggcccaaattctttttttttttttctatgacccactttatttcagggccggccctgcttaatactaattacaaaaaaattaaatataaactataaataagagtatgataatccgaaagtagggacagatcatgcttttgtttttaatcaaatcattgatcacattaagactatcaaattcgagcatcatatccaaccatctatcaaccttgatccaacttagcgcctctttaatgtccaactactgttgttttggttttgttttctaattggtcactttgaatttttgtcagatacaaataaatacatgaacgttgtcacattattactgggctgatcgaaacactaagatgaatatactaaaaataattatgtgtagaaactttattttttacctgaaagaatatacagtagctggttaccataattggcaatatcgatcaagcagtgatctgaagttcaatcctaaattgaatatgattttctcatgcttgctttgacttgggagcaacattagtacaaatttgaagagacttgagattgactcattattggagctatacttaaattataaaacaattataattcttcccaaaagtgtttcttttactttaatgtattaaaactataaataaataatggaagaaagaacttaagcatatctatatctactaattttattaagtaaaagctgcccacaaataaaatggattggaaaacttgcaaaaattagctctccaccaataaagaatagtgtcaaatgtatataccatcttgatgcctttagggggttttgatctgctcataagaaaatgcagataggcccctcaaatccaaccagcaatattttctgttacataactttctgtacttatctacaccgagaatagtttccccgggtttctcagtatcctttcctgaatatgaaacagcagctacctgttaccctcaggaactcgcactccatagagcattctcgtcctcaccacatcgtcgatgaacttctgccatccgctcaacagaattgcaaatcccactgcatcgccaatcaaatgaagcaacgcagatgttgcctgcctgagccttccactcacaatctgttgaaaacaacatatcatttacgattccctaacagcattttgttcatttcttaactgttcttaaaaaaacaggcaactggtttttccccatattttttttgctgggattaacatgattgactgaccaaactattaatttagcagggactcgtttattttctcccagactcaagttgtactaatctatgtgcttgtgcatatgagaacaaagctgtagaatttgttcattttcagcccaaggatttataatatgagtccaagagattttgtgaatgttaagaacagaaaactgaaccccaaaaatctaaaatttggatgactgaaagaactaccagttcaacattcagtcaactaaaacttccaaagtgaccataagagcacaagttcctttcagaggcaaaagatttcaactttaaccaccgcgattgcatagacatagaaacatttcaggcttagtattactaatttcccgtagagagaaacatttgtaaatatataaaatgatcttgcaccaaaaacatttcttaggtgtatagtgaaggataccaagaaatttaaaattattaaagaatgttcaatttacctggtggggtgccgcaacaaagtcttctgtcatcaatataatccacatctaatccaataaaccaagatcctgttgaaacatcttcattggcatatttgtgcagcagatctctgacagaattaagcaataaaattatagcttagttgccaacgcgttcattatatcgatcttagaacttaattttgagtttacaagttacgactagaagagaacttactggtttattgatatatatgtggctaactcttttgagatagcatataattgtcctgtagcatgccggaaatatttgttccctgctgtaccgaatttccaatactcgggttcatggtacctcacccccctattcacaaaaataatacaataaaaaccacatcccgatactgtatcaaaataaagaaaattaagaattatacttactttcgagccaggactggaccagacttcatacaaccaacataaactcgagatttcgtacgatacctagatagtgttgccccaagtgtggctgttgaaaataaaaggcaaaacttcaaataaagttaagaatggggaaattttagaacagcaacaacagcgaacagtttatgaatgagcaacatcatcaactgagacttctgtttacctatattaacatgaacatcatcatcaactttgacataaaattctgcatcccacatagccacagcagtggaaaaaaaggtttttgtcttggctgataactccatgtaaccctcaacatgattctgagtaaatgtaagtaaattaataaattatacagcctgaactttagcagacaaaattaaatggacaagcaactcaccagcctcataaagtctccctgcatgagctcctcggcttcaatagctttatcaagaatacccccagatgttgaactaaaaggaaaacgataaataaaaaggatgctcaggtcacaaagctattaggaacaaataactataatcgcattagacaaatatactcggtattatactgacttggggaaaggtataaattctaacctgtgacctataacaaagcgtatcactatgcccttctcttcttccaacttctttcttgtctcgcctggtaagaataattcaagcagatctcattagtcataaataagcagctgaacagcatgaaaatacaaagaaaacaggacgactatataaagcaccttgaggcatccaagtcatacgaaccgaatctcttctcttccggctactaaatgctgtattgattcctacaaccattgagtactttctttttgaggtagattcaacagtcttcaaatttccagatacagaattttcattatgtacagtctcacgggctgcccttgcagctgctaacttcatctccaaatctgaaactgtcttatttatcatcctgcatatcatatcagcaataattgtagtagttccagtcaatgaaaagactagagattaacaaatgtaacacctctacagcttaaggaaaggaacaagaatgacctaccgaatgacctgttgagtatcggccaactcttgtagaccatcagtggatgcattcttcacaaccttttccaccatgagcataaaattagtaatgtcatataaatcaaatttatgttagtaaagctgagattagaagaatgaatggcttgattatattctataattggatgaagtatgatgaacacacttacgactttcgtactacaacccttggattctatgtctaactgtttattgctcgtttcagatgttcttgaggtatttccaatttcaggcataatccacatcctgctacaactccaaaattatattgcataaagttggttatgaatcagcaacaatatcttatggtaataaagtgaaaatgatacagttaaacaggaaataacagagttttgaatatcgctgttcacatagcacgatccattaaagataattaattacttccaacaccagttctacatgataaactttctagcaattatattataagggggaatgaataattacgattttcagattttcatttcccccttatatataacggggattgaaagttctgatatactaagccataactaaaatttgactgaataattaagaatggaaactttcattacaatgccagacaaaaccatattacaaaattcacaagaaacaccccaactgagagcataaatctctcaaatatgaaaaattatctgagcccattaaagaaaagtacctattggtgaagaacattcctgcacaaaagctgccaaagcaaagcaaaagagcccaattccttctcataacatttcttttagctaaatcaccggtaacccctcctttgctcctcaccgacattttgttccctagtatttccttgggaaacagaacagcaagaaactaaaatcaaaggattgaaagagtcgcatgtatatatgtacacatatagaaccaagaaacagacttagattcacaaatggtctagtttccatacctgctcagcatcaactctctcttctcaaaaaatgaaaaataataaacaaagtgttgtagttgcgtagaagaagacccatcaaccgctttcacagatgaaagcaccataaaaatgtagaagaatgaacggtacgctactgtcactcaccacagcgcagcactcacagacacagtgaccggcaaaatctgacccaagctccatcattgacccaaatccattaaccaagacgaacccacttatttgcttttacttctcagtcgaaccaagtgaaaaaaaagcttgcattaactctacctatcacttcatctaaagaagaattaaacccagaccattaaagatgagatttttatgagcatttcttcctttttcatcagaatatcatatggtatatttactaggaaatttctgatgaggtatattaacgttttcaactgctaaatccaggaattacaaggtttggtcgtttttattgcgagaggagttaagtcattttcttcataaacaatttttggtcgtcgttgtcaagtttagatcaacggttcgtgtgtccttgtcttcttgtttagtttttgccaattaatgtgtttttttttttatttttttannnntatttatttttttttttataaaataataataataaaattactaaaaattctataatgcactctcttaaaagtgagtatcccaaataattttttagttaaattttttctcatagtcatgtaaattatatattttttagggtgattctataatgcaccattagaagggatgtactgatgcacc

SEQ ID NO: 112467 - DNA, 9865 bp, Cannabis sativa
  modified_base (1854)..(1857): a, c, t, g, unknown or other
ttacacattaattattattcaataaactaattattatccaaaacacaacttaaaattcataaaaaatatactaataaactaaaataatgcaaacataaattgtaaattataaaatattactagaaatataagataaaatactaaacgggtccccgtcagtgcggggagtgtgatccccatccccgctccgtttaatatttggggacaaaaagtaatccccgtccctgcctcgttccctatttaggcggggaatccccgccccattaggggcgggaccccgcggggccccatctccatgggagaaatgtgcatccctagttggcagtggatgaagagatgaatgctttggtaaagaatgagatttgggagattgtgaagttaccgagggacaagaaaattgtatggtgtaaatgggtgttcacaataaaaatcaaatctggtagaagtattgagaggtataaggcgagacttgtggccaaagactttaggtaaacctattggaatagattatcaagagatatttgcacctgttacaaaaattaactatatacgaattctactatctttagcagttaattataattggcctttgaaccagttagttatgaataatgctttttttaatggagaccttgaagagaaagtgcatctgagtgtctcgccaggtttcaaaaaaagctttaaagttaaaaaagtgtgtaaattgaagaaatctttgtatggtcttaagtaatctcctagaacttagtttgaacgctttggtaaggtattgaagttgtttggttacactcaaagtcaagcggatcacacaatgttctacaaacattcaaagaaagaaatatggctagtctaattgtgtatgtagatgatattgggataattggggatgctatttatgaagaagagagattaaaaagaagacttggtgatgaattcaaaattaaggacttgggtcctttgaaatcttccttagaatggaatttttaaggtccaaagaaggtatttttgtaagtcagtgtaagaatgagcttgatttacttaatgagacaggtatgatgggttgtaaacctgggaaacacctagtgaatctaatgttaaactacaggctgttgaagattgaaaatgtgtgaaggacagagagatttatcaaagattaattggaggctggtttatttgctcgtacacgacctgatatagctttctctgtgagtatggtaagttagtccatgcattcacctggttcaaggcattttgatgcagtctataagattttaaagaatctaaagggaacagctggcaaggtctcttgttcagacctcaagggcagattgaagcttatactgatgcaaatagagttggaagcactttagacaataaaatctagatcaggctactgttctgttcatatgttggaggtaatttggtcacttgtcgaagcaagaaaaaaggtgtggtggctagaagtagagctgaagttaaattcagacttgttgttaatggaatttgtggaattatttgaatgaaaaggttgtttgaagagttgaagtcatctcaatcatctcctatgaaattatattgtgacaatagggcaactattacaattgctcataatcctacatttcatgattgcacaaagcaagttgaagtagataagtattttattaaagaaaaaattgagagcggtcaagtgtgtatgccttatgtttctacagaagagcgggtaaaaaatatctttacaaaaatattgtttaagaaacaatttgactttctaactagtaagttggttatggagaaagtttttagttcagtttgaggaggagtgttggaaaatcatctttattattattattattnnnnttattattattattattaagataaatagcggcataagtacttaaagttttaagtttgtaagtggcataaattcaatatttatttttagtggcataagtactcaatatttgtaaaactgtaattagacttcattttgaatttattaaaagaatatttaaaattctgtctagacctaatgatctaaaatctaagtcttatatgtatcatatttaagacaataacagtatatactaacaaaattaaaaaaaaaattacaattttacaaatattgagtacttatgctaataaaaataaatattaaatttatgttactaataaacttaaaactttaaatatttatatctctatttaacctcctcctactctgattttattgtaccggctttattgtgtctttattattacataacacaaataacagaaacaacagatttcattaccctgatgttacatacagctgtgtattagaaataacagaatatcattattcagtaccctaaatctgttcaggagttatttgtctttcttattttacttctaaggttttgctattaaaaaacctttctttaaagaacaacacttgtaatttgtagacgcgagagttttataaagcgcaaagtgcatgataaattctggtaagtcataatatattcatttatatatatacatagcacaaatagaaaaatggcagttaagtacagtaacaagcttacacaaactaaattgaaaacaatttagctcctattccagttttacctctatatataaaaacaaataaacaaattccagctctcataagctactaaactttcctaatatttgtttcaagaagaagaaccgccatgacgaaaatggagaacagagcgataaatggcagcaacatgaaagaagaaaataagtataatgatgagatcatccaacagaccaactatacccagtatgcctacaagatcagccaaaacaagtcaaacagaatattaatatataggtcaaccataccatgaaatattgcgcgcttaccttctggaatgatatcaaccggactgagtacgtaaacaccgctcattgccatctgtacacagtaagaaattaagaaatgatatgcagcccacaaactaccaaaaatatatgttgaagaaaagatacctatattcaaacattatagttaatatacatgtactgttagcttgatctttagtaaaagaaaaataacaatgttagcttcatactacagagagaaagaaacattccatcaatctagaatttgggattttagattctgttaaaagtatcatgacctggataaagtatctcattgtccttatggatggaatcatggtgataccatttaacttatatttgcttattgttgcttgactaatgcctgctttgttttacaatgtgcagggaagacatagtgtcaagagtctgatataatgggctggcaagaatcttagctcaaagttttgggtattcttagaacaatatgtttctatggaagctctccaaatgtaccaaagttcggactaggagtgacatactgtaagaaatactaattccctttccctttgctaataaacagtcttatatgtgtacttctatttctaccaagaaataaaagcaccaaataaaattttattggttcaataccgttttctacaattcatttgttcattgttaaaggtcctctacaaagccaagcaaatagtttaaccttatttcttacaagtgctttgagtctctttatagattctacagtagcaataccaggtattgctcaatcttttgggtgtcttcccactagaattaatgtaacataacaatgcgacagtaattaatactaagatgaaagtcataatcattgattataacgaacatccaaacacattttttgaattcaatgtagaccatgttaagtgatttccctagaaaagctaaatatataggatgatagaacccgaggaaaagttaatacaattgcatttgatgcggtgctatctgaaaaacatggactaagctaataaatagatcattaggcaatgaagaaaactttgaagtttgatgatagtatttttaatgatgatgactaattatgaaagaattaagacaccaacgatgtcaataacatgtgtatgcatgtaaagctaaatgcaaaatgaaagaactttagacagcagttagttgcgtcattatcttaactgcaatgtagatacgtgcccttatgacaagggggagagatcgctgaggatccattagttctcgtaacaacctccgtaaaaagaaaggaaggtcttgaagtctctgcagtagagaaaacccacaattctgatattaaaatgttgaaggtgcttgaagacaatcccaaaatagacatgaaacaaattagtctagactcaaagtgaaagaaaatggtctcctttggacagcagataaatgcaaagaactacttgctttcacatagtaatatcgctatttatggaacatagttagcacaatcacctgaaaaagaccaagagtacgcccagcaaaatatcgattgtatctttcaatctttcccagaacctcctcagcatcattttcgtggcgttgtcttaatgaagcctcacttggaaccaacaatgtaatttcacgtcgacaaagaggacatttacacggctgtaatgctgatccatgatgccaaacaagcataatacaacctcctgatgataaaaaggaaactataagtaactagtaaaagtatatttgtctcatgatacaaggaaggtataaaactctaaaattccatcccccaaaatctttagatactacatctaaccctttcgtttaaaacaacatattgcatgtattatatattagtaccctatcttttctttgaaaatacatttggtaacgttttcaataatacttatttggtaccttatattttgaaattgtaaatatttggtacctttaaagtaaaatttaatcaatataattttttaatttgattaaacggttctcaattatatgtaattaaataattaaatttaaattcaaaatttataaaattgaagacagtttgactgcattgataaaatttatcaaaaaattttgagtttaaggtatcaaatatatatgctttaaaaatacatggtaccaaataagtattattaaaaatacgggataccaaacctgtatttagataaaacataaggtaccaaatgtgtatacaccaatatatatatatatatattacaaatgtatatatttatagaaatgctcacaatgccatactccgaaaacatacacacacatttataaattatgttctccattgtccctcataatttgagcaatgaaagctggttgtaccatcactaattttcctatccttaattgtcagagtacatgttgtatgcatacctatacattactcttcatcctgagcactttcgaggaagctctttatttgaattttgacccaatgtgcacacaaacatgcacattaagtgttaacaattgtaaaggaaaatgcgttacttcaaatgattcaaattaatatcatttttttttttttttgaattggaacaaaatatcattccatggttaaaaggaacaaagtcctataaagttaggggtcaggcttgacaaagcttaaggagctacacaaatttaacaaagtaacctaaagaagaaaaccatgcctattacaatgatggaacaaatacaaatctcaccccaactaggagacacagatagaattgatcacaaccccacaccaacacacaaaatagtggttcaacttttaaaatattgcaattaggcaacccaacccgaattagtgacaacaccaaagtgtaaatagatgaaaaggacacagatcaaacaaaactggcacaagccaatgtaacaaaggaaaaattggtaaacaccattattatatcactaaaaacgaaacccacagactaacaaacacttaaaaccagaaaaattgaaaagaaacacacaaacacacacaaagccagtgagatccgccagaacttcaccaaattcttcaaaattgcaagctctatcaattcttacacaacaagatcacatcatattaattgtccgaaatacatgaagccatttagtaatatattacgaaaccttaatatttctaatttcatttacccagaattaaattgcgtaaaaattcagcatcaagccaaacagagcgttgcacactaaattttaatttcggatttagaatcactgaatgaaataacgataaatagactaggtgatgatgatatagagctccccttatgacctaatctcagcgttttcttcgatttaaatatatatatatatatatgtgtgtgtgtgtgtgttttcttgtgaaacttgaatcggagaaaaatgagagaaagaaaatgcaccgcaaaaccagtgggagcaattggcttgacaaggaatgttgaagctgccatggcatactgcacagcaatcattctccggaggaccgtccattttaactctgggcacttccgcacctgattattctttcattaatatcttttttcctctttcatgcgaggtacaacaatatttattttcaaatattgcaatttactcctcaaactctctctcaactatcaccctaggtcccaaagaaacaaaatctttagtcaactaccgaaccacatctttattgttatttacaaaagtctaattaacatttttacccccaaattttaatatgtaccaaattatgtcttctcaatttttttggtcgttaaaaattcactttgaactattgagattgttagatttaagaacttttgtttaatttcatttaattttactatttcagcgattgtttatgtattaaatcatgctctccagattttgatatctaccaaatcatactcctcgaactttaatatatactatatcatacccctgaactatccatgttagactttttttactaaaattagacaaaaatctttaaatccaaccattttaataatttaaaagtatttttaacgaccttaaaaattcaggaacatgatttgaaatcagtcaaagtttagagtaaaattcttaattagcctaaaaggactaacacattatttgaaatactaaaatagaaaaatggttgtgcctcttttaagtgatgatgttagaattttccaataacttttaacagaacgtaaaaatgtaatatgcccttgtaataccaagccgggcctatatagtgttaataaccaatagtgtcctcatcaacacagataaaacttaagctttgctataaccgcccacattaccatagtttgcatatttgagtggcatctcacccaagttccaatctcttcctctcttgtcttgatcttatcactatagtcatggccaacgttgacgattctgatcagtctgacggcagcgaaatctccaccaacagaaatgaccccatattacacttcctcttaattgtgattgtaatagtagccttcaccgtctccatctaccgtctcatcattgctatccgccgcctccgccaccgcccccaaatcaggggaagtacccttcccaattctcgagtgcctgcacaatcagagtcgacacagggccctgtcgatcatgatcatcagccgccgacagtaatcgagctggtcccgccgcttgagaatgaaaaaaacggcagcagaggccatgaactattatcggttggacaaaacgacatcgttttcgaaaaagctggcgagggaagaatggtgggaaacgacgccaatgtttgtgccgtttgtcttagcgaattcgcagaggaagaggagctgcggatactccctgagtgcttgcactcgttccacaagtcttgcgtcgacacgtggcttttctctcgttccacttgtcccatctgccgcaccaaaaccgccctactgtctccgctgccgccagagatcggacgatatcggacggaggagaatgatcaacgtatatgattcgttgagatctctggcaattccttgttacctcggcatcatcactcttgtcttttttctttcttagcagtttactgaaatataatagttagaaaaagaaaatgaagatagcatttttctttttgaaaaaaactagggaaagagcaaaagtgtttagtatactttaatttacagttgatctaatattactttagtttagtttgcttaaagcttttgagatcctatattatttggcggtgtttaatactacgtacatcaatgtaaagtctcacatttagttggttgtttctaatcgaaacaggtgagaccataatccaccaattacagtttaccacctcttgtcttgtcaccgtactatgagcatttttctaaaataaaagaaattgacatatttatgacatgcaatattattctcttctaatttcacatcaaaattgattttttacttcaaatatatacatatcaatattcatttcacacgatttgtttgaaatttaagggtaaaaaaaacaaataaactacgaaaaagtatagacttaacaatgtgtggtacctttaggaaaaaaaaaagtatggtacttacgtacacactcactctcgtttatctgcaagtgcaaggcagtcttgtttcacaagaattcggctgatcatataaacttttagcaattggggttaggttagttatacatgcggcatcataagttggttagttttcgatatttgttaattgaccattgctacgcgacatggctaaaattataattagttactattttttataatctttaataaaataattaaaataagtgtaatctaaaattaaattgtattaataataattattgcatttaataaaggtattaaacactattaatatcctttggtatttttcttattaatttggttctattatcaagtattgttatttggcactttaagttcccagtgtcacttaataattaattagtaatttatcatattatttattaaatcaagtgaaattccatatcaaaatagatttatagcagtatgccacttgatatatatagtgctcaacatttctcctaagcatttttcttatctttctcctgaattatattggaaatttccatactctagtagtacgtcatggtacaatatgtatgctatttatctttgattcttgagagaaagtgaagttattacgtactataactaatgatcaaacatcttgctttacattttttgaagtatgatatcaagaatctcattttatttagtattaataaatccccaatatgaaatcgaatactaaagatgaactgcaagtgggggataagtggcaactgtacaagtacctagaaaatttctatatgctcgaatatggattaatggtaactattaatattccacacatctttcgcatgttcaattgatcaccatcgctttagcctttattttaacaaagtgaaataatatttaccatgttcactaattaataataatcattatatacttctcagtctcataccataagtcctaattaacaacaccaattatacatgacaatataaacttatcacaatagtaataagcaataataaacacatttcattcaatacaaatacatttttattacaacataacgtattaatttaatatataatagctacgtaacgtgccatatctaaaatctttaccaataatacgatcaataatatgccctagctaggtagaattcaacctcgtctcaccatgccaaccgatcctgggcgagggggaaggcgtggcatcaccgcgacacaccggacaagtagaatgagaaaagagccacatatctatacagggtgcgtgaaacgagtgcaaacactccggcaaggtccggagctcctccccttcttcgaattcggcaaggcataccgcgcaaaccacaccctcatccttgtcgtttcccccgaaaccttcgcctttcttatacttgtgcgctgggataagctcggccacagaggcctcggtgctattcccagctggctgcaggtgccactgctgctgctgcggctggc

SEQ ID NO: 112468 - DNA, 8666 bp, Cannabis sativa
aaaattatttcggatactaaaatagagagaaatgtatcggtgtatccttttgagggagtgcattatagaatttcccaataatttttactatcatttttttattaaaataagaatttttttttaccatatatgatatccacttagttttattattattcaaaaataaataaaaataaacatgattaatatcatgttattatcattcggactaattacttaattagttcataattagattattgatttttagtaaaggagaatacttcattgaataatacattcccaaaactgaaacaaatatagcactcagtaaaactacgaacagcaagaaaatgagactcgctagaaagtgtgtattagcattatgtttaataaaatcaaatggcatgtttagttttatgtaatttaaacttttaaagcctcctagttactatattgtaatagttattacatcttgtattgtaatttctattacattataaaactaatgtaacgataattatattattagaaaatatttcttttgtctttttttttatttttatttaaatttaaatattaaaaataataaaattaaaaatatttttattaatatactactttaatatatttgattataatgtattaattaaattaaatattgtaatataatattattctcattacaatttttattctattaagttacaatactattaatattttcattacattatattacgttacatcaaattaaaaatcacataaaaacacatccctcaactaaaaccaaaatatgattccaaaatacttgacacaattgtggttaaaacattcctatattattatctaaaagcacatttgtcaaaaaaaaaaaaaaaagtcaaaaatgatgttattcaaaaaaaaaatggtaatattattgaattttaaggtttattaggggcggataataagtatattaaattggtgctcttttagtaataatgagaatttgggggagttgattgcaacgttttctttctcccgtttccatttatttgtatatattttctgattatcagaggctccctctgcctctagcttttggtgcttctgtgttttattacagaaaaagaagaagaggacgaaggaactgagccctgaaaatactgacacttctaagattggaaatggcggtcaccaaaccctagaaggggtctcgccttagcagcaacaaacaatcgtgaaattccattgcaatgggtattgagtcggactcgggcggaggatggggtgtggcgagaggattggttgtgaagactctcgtactcataggaggtgccctattgcttaaaagactcaccaagaccaccacccgttgggaccatgcccgtcttgtttctcgctctctctcgggggagaagttctccaaagaccaagcctccagagatcccgatcattacttcaatttcaggtatttttatttctcttttctcttttatggggttctttatttgcgttctgattttgatgttagcttatctattgcctgagtctgattatcgttttgaaaaagctttgttccttttctgattacgtatagattataatagtttaatatattatccaatgtttgtgaagacaagccttagctcgtatgatttatgtattaaattaatgtaataatcaacaacgttatggtataacttcatcgtttaacatctgcagaatgcttacttgtcctgcagctgagatggtggatggctctaaggttttgtattttgaacaagtgagtgaaattggcttctattttcaataaaaactttcttgttcaagactatgttgccccaaaatttaaactttatagggtttatctttctgtttgtaggcattctggaggactcctcaaaagccctttcggcaggtataagatttattcttatcttttcaaattgcaatctttctttattttgtttaagtgtatttcatttaataattttagctgttttctggttgcagagattttacatggtgaagccatgtccaaaagagttgaaatgtgatgttgaggtgaatattaagtgcattttagttatgttaactttatttaatgtgaagttagtgttgcacttgttagcagctggtagttttagagctgaatgtggggtataagatgtttgtttactgtgatcttttaacagtatctggctgtgaagaatctattcagtcaaaactgagtacctatattgtttctaggctcaaattcaaacaataatatcattcattttctatgtacagctaagctcgtatgccattagagatgcagaggagtacaagaacttctgtgatcgaccaaacgaccaacgtccattgcctgaagaagtcgttggggtaagcatcgattctttcttttcaagatcacattctcagcttataaaatgcatatcctagcctctctaagctctgtactggattctgttatgtgatgctatggttcaattctttataagaagagagtgaagtctaataggaagagaaatatgattaaatacacaacaatttaacctagttgcgataacttcactcttagtgattagagagggctgatcccatagctatcacctttggatgtatcctttatttttattttttttccatgctttatttcttggttagttctttcactgaataaagcaaccccaactttttttgtattattgaaacaaaactatttttattactgatcaaatgcatagtaatacatgaaaaagtagaattcagccaattcttttgaattcaaatccataagacactcagttgcttgttttatgaagatgctgagttcgggagcaccaataatataggatgttggtattacatgattattatgtcagcattctggtagtttacttgtaaaagaaaggaaaataaatatatatacttcctaatcggatgcaggacattgcagaacacttgacaacaattcatcttaagcgttgtgatcgtgggaaacgctgcttatatgaaggatcaactccacctgaagggtttcctaattcatgggtaactgctactgaaccgactggctagtttcttaattattttcctttcctcttaaaatgttaatgtaggcttatgcaggtgccagcaatttcttaaatcttaatatggatttgcatttagtcagtttcttacattcatataatttaactgcagaatggggcagcctactgttcatcagaactttcaattttgaaaaataatgagatacatgtctgggataggggatatgacaatgatgggaaccaagtaagtttatcttctattattctggtcctttgatctacaatcagcagagtggctttctgtgcatactagatattgagaaattgtagattattttttccctttcctcattccttttagttatgtgggacattctatcatctagttttgttcttgtacttgttaccttgattgactttcttaatgaaaatgtagtttcattctaattgattgtagcataatacttagcttagtagtggtacttctgcatggtaggtaattatcttttgtcatgtttacaggtttggggaccaaaggaaggcccttatgaattcaagccagcgcctgcctctagtactggggacatgttctctcctttaaatttccctcttcaacagtccatagagaaaagaatcgagggttcctttgttttgcgagaatgatcatcagttaatgtaatcataggatatgtaaatttttcttgtcaaccatatcaatttttgtttgttgataatatttaattttaacatgatatctaataagcagtattttactaatgggtgggaaaggaatgacatacatacaactacaaggttctctgtactaggaaattgcagcatgtattaagtaattatgtatcataagggtttgtttgtggtgaaatgtaaatgtatgtctccaactatagaagaaaaatgaaattaacaaatatggtgaaggattcaatgaaatcaatttcctcttacattgtgttcaaaagatttttgtaatttctccatacatgaatataatgtaactgccttttagttcagctccccttgtagttttttagcagctttaaccaaatgagatgaattgcaattgtagttgcagggattagataaaggtattgagaacacagttggaagaactattgaattactcaaaatggttttggagcttcaattcaaaccatggaccgtggtacaacatcatatgcttacaattatcctttgcctaaaaggagttgttgaggtaaaagtacaatgcagcaagtgcaacaactccaactgcaacagcaataggcagtgctttcctgtgtcattcacaattggatgcagtcaggttaatttgtttcagcactaaataacattcttattgctaaacattaacgacacttatgatgatcaacaaaagttggaaagtgaaattatccaagtaattttcttataatgaaaaaagattgctatgtaagtattacccgattgcttcatctttcttaagctgttctttccgggctttcctaacatctttgtcattggcatttttggtgacaggaggctggtatgctctaaatcttcgcttgggcgcaccacaaacttcataccatagaaaaacaaaaccaaatttatcatatcctcttaggaattcacaaactctatgcatcaatctaaggctaactcattccaccaccaatttcttagatgattccaacataacatgttatttgaaagtttaagattatagttggtgccaccattaacattataaaaaaccactcaaaagaccaaaagcctaactaaagcaagcaaccaacaatagctttaaaattcccatagttttgaaagtatttagtttcactataagatgaaatataactaataacaggtgagtgaacaattcaataacgtgaaaagctaaaacaccatggaagaaggaaatgaggtcagagttcagttttagtagtttaccagggcagaagtaactgtcagacaatttctcaaagggagttctgtcattgtaaatgtacctgtaattatacatacaaatgccaaaaataagtaaatatttttccatctaaaaaaaaggttcatccattttcaacatcgaatttagacaaaaccaaatcaattaaagaaaaggggttacttataccaacccgcaatctcggcagatgtaggcctgtttggaggcaacacgcatggagaaccttggggccgtagaaagcagaggctgacattgattctgaggagaaactaagagaagcagcctaagcgatgaggaggagaaaaaggaagatttgagagcaaaacggtctgagggtagacggagaccggtggcatttccagtgggagatatgagggaagatttagctgtagcaggtaaagctgctgcttgaacttggaaggccatgatcttttctcttgattagtatagtaaaatgtagaagataggagaagataaggagagatcagatgaaagaaaactcgttagtctttcttaagtacaagtgtttgtagttcaactcatcaaaagcatacatgatacgtggaagcgtggctttcacactccacaccccacaattgaaccagtattactactactactagtcccacataaaaggcagaaagctcctcctctccttggtcttttcttatcttctcttacaacttttttattttttattttttatattttatattttaaattatatttttgtttctgttatatcaactaaaattaaaatatgtaaaaaaaaaagtagtgataagaaaaataaacacttaatgtgaattttttttttaaaaaaaaaatcctatgatatatatatttttgcaaaatttattatatgcttaatttgttttttttatatataaataactactttatatttttttattgcaatatagtttaaataaatttgtaatattttatctttttatacacctcatgacactttattcaatattaaattgtattatattattttattacattatattaacggtaataaataaataaaaataaaaagtcaaagtttaaaacaaaaaaataatttagatatataattagattgctttacatgtactcacaattgttatttggttttcacacacctctcttcgcaaagaggagatcctagtataaaaaacataattcatttgtaagatacgcattttttttggacctatgcatcaatgggtttttttttttttgagtcaagcttcaaattatttatgtcgtgcattgttgagagcccgtatattactaccaatgccaaggtggcatggtttggacagatcagatgctatgaatcaaagtctgaagtaaagattctttctttgtttccaaccaatctctccaatacaaaaaaggatgtatatatatacatatcaatggcgtaacctctttaataaacaaaaaaaagaacaaaaagctgaacaatgtgcattatactgtataaccttttggaaatcaaaaccttcattgatatatgattcgactaaaaaacaatgggacaatcgtacaaaatgctttcaggtaagactatcaacaaccagagtctacaaagaaaaaaaatatatcatataagaacataaaagacacatctcagggcccaggctgcaaagggaatatataatctgttaatctgataaaataaaaaatttacacttcaatgatcatgacaaattattatacaaactcttctaagcttttggggactgggaaacgggagacagaatgagttcctataatcccaaagaataatactaagaaaaaagggtaaattgactgtgctaccatggtttcaagtcaccaacaggtccagctgtccaattcaggactttctcacctggcttaaggaaaatgcttcggtcgtgcggcaactttcttgccagtccattcagaacttgatggaaggcatctcctgattgaacaggctgtgggaataacatagcttgtttcattgaagggttggcaagtaacctctgctttcttaagatcagatccagtgggattgaagtgagtatggtgtccaagttgggcacatctttctcatctacaaacacaccaatttcttcccagggaattgcatcagcaaagggcagaacaatatcgtcagctatgataacaggaatgcaaccgaaaatcacagcttccaccaatcttggactccaaggagcccagccaagtgggcacaaacaaaagactgcccgttgcatatcttcatagtatgtggttggatgttctgtagagatgtcaaaaagaggattatccttgaagttctcccatactgctgcccgcgcacctctaaaatgttacaaaatataggacttagtatatcattaaaaaattaatttcatctcaagaataattattcagcaaaccgtggaagacataaaatcatttgcattgtaagttgcataagctttacatgggaacttctcaaccaaattatactctgatcctctctaacttatagcataaacataagttttatgtaaaattctcaacccgaattgccctccactcctctctatctgatggttttaaaaatttgttgcaagaattacctggcatagtacccgccttctggatcatttccaacatcatagaacaagcctcggaagtaaacaaaaatggacctaggagttttctcaggaatcaggtgggcttgcatcttctgaggtggtgcataaggaggaatagtaattgacccctctttcaagcaaacatgatttcgttgcccaaaagtttgaaccaaggtagcccgttgaagcaagggaagaattcctctttcgattgccttttcctcctgcaatagtatcaatgaataaacaacatcaatacaaaaactcctcatacatacaccaaactagaccaacctgaacattgcattgcacactttaacattccatcatacattgatccaacaatgcctgcagcgatcagaaagacacaaaaataatgaaagaatgatgctacttacttgataatggaagcatggtccaaaatcatgaggcactacaaaaaagtgatcagctccttcggtcctattccagtaaggccagtttgatgaaataagctgtatggcacttctcatcattcgtggtgacttaaaaggcaatgggaggccatttggtgttaggtcacaagtcgtgtacacaggggtataaaaccaatccgcttcttcaggatttagcgtacgaacaggactggataagagaaaccgatgcataaaaatttcagcagcaaacatgtgggtaaggcatcttggatctttctgcaaaatcttcttgttgtacttgctaggaagctcgtacacaaaaactttcaacctcccaactggattgtcttccaagacatcaccggcactacctacattaaagtaaccacaaacttaaaagtacttctagttgcaaattacctcgcagagttaacttgtttctaaaataaatataatccaacaactcaatagtgagaaaagggaaacaccagccgacagaagatgtagaaagaacaacaacatttaatatcttcctttggagacatattaccaaaccataattgaacataataggaaagactacataaaactatttccattttaatgagcttaggagataaattcatatgtgctgtaaggaaaattgaaaaag

SEQ ID NO: 112469 - DNA, 2073 bp, Cannabis sativa
caaaattatgaaattccgtatatgacataaaatacattctcaattcaaataaatcatcgtaaataaataattcaagtctaataaacatgtttcataattcaacctaattatctactaatttccaaattaaagctaagcgatctttacaatacgagccctttgattccaatagacagttttcctttccaccgccctattgagtgcctttcgagtttcattctctatcctccagtctcttgttcttgtgggaagattatccagtctatcaagtttagcttccaggtctttaatgataatatcaatcttcccaaattggagtttattctacagtaggagggtgacccgagtagcccttacctttttgaacaatctggtcgtggcccaagggtaagccacagagtctcaagcatggggagccactagtttacttctatcatcctgagtccacccttctccaaatttgaaaccccttttgaatttagcttctaactccccaagtataaacaaagcaacctatgatccaaattacttgtctaaaaagagcaaacaaccgcttttggaaaaagcaagttctaatcctcattaacaagcacccctagcgcagacttaacatgcgtgctgttcaatctatgattgtcccaagttaacttgtccccttgaattggcaaattaaggagaccctgagaataaaccaagttcgagatgatagggatgaagaagcccttacctttagaacattccctctgtaactcattaagcacgaagtcagtgtctcccaaaattaaccaaggcccaccaaaatttatcttcaattttcataatctcagtccagaacttcattttagcatgaaaatatggaggagcataaacacaagagtggagccaagagtgggataggggttccaataaaccacaattgagatttaattgcgagaacgagtgatacattcaaactcaaaactaactttcctagttaaaataataccccctgcacaaccaacaacatgtacaaagagtaaaataaaaatgaatactattaagaatatgtaccagtggagtagaattaatctttagttcagtcagaaaaataaagtcaggagagcacgaccgaaccagggacttcagttcacaattgtaggagtctgtcccaatcctctacagtttttagctactcctctcatggctcctttggaggagggagacaccatcctccataggggtaacatcatgacacgagatacaagagccaacgtcatcaactagggccgcactagtcacctgattattcaaatcgtccaactgtattctaaggacgtccttcaggatgtattttagccgactatcaaaacaaccataattttccgaacaaacgccatcatcatctacttgctttggcccatccttatcccaaggaaaatcatgaacaactcccgggtattgatgaagcaatttctttggtcgatcgcacgaagagctagctccttcagtaagttttctttttctgagatgagtagttctttcattatgtttagaagtagcttgggctccaatatctccaccaagggccttaatctcatgaaagtccaatttatcaaaatatttcagctcatttaaaatagttttttgggtttgaaaacaaattggacaaaggaccatttgaaagttaatttcccacatatagagctattatttgggcactcattagggctcaaacaagaggatcaatcgtttttctcataacaaatatgtgctgttttttagaattataagaatgtaatgcaatatattttattaatgaaatattttcatattcaacaaaaataatattctactttaatgagttttaatatataatctaaagtattgctgtcatataattataacatttttattaatataaatattttaatttgatgaataagaaatttattgctccaaaccaactattacaacactaatctttacactttgctatctacacattacattccagatctatacaagtcattacaacctgttatagtgagatttctctcacttagaaactcgagaccagactcctatttaaaggac

SEQ ID NO: 112470 - DNA, 3415 bp, Cannabis sativa
  modified_base (3383)..(3388): a, c, t, g, unknown or other
aaaaaaaaaaaaaaagaagagtggtgaaaaatggtataaacttcataattaattagtttttttttttttttttgttcaagtaatggtgtgggggttttacattttagtgaataacatatttctttctttgttattttatttggtgctatatatgtgacttattattatcttaattagttacctctctctaatttctcccaactatagttcaaagattatttctttttattatttttattaaagttttaatttaatatgaatagtgtatgttgttacaaattatctcttttaggcaaagaatatggtatttataaagaatgtgacagttgagttgtcgatagataaaaagatgtttaggaaaaacaaaaaagagtgaactttgatatattccattctgttgttgaaaacaaagtggctaaaattgaaacattattctgggattgcgttattagacagtgctaaatggaataaagttaaagatatatatagcaaagaaggcgatcgtcaaggcctttgttcaggagattaattaatcaatttttcataatatatatatatattttttttgataattaaagcataggcagtttttctaacattctttcatctcatgatccagtgcaatttgttgcaaagagagatatattagcttgacagctttacctttctcttatcatgatcaccacgtgtggggtcctcctttgcttcaatataacaccataatcttactggttgtaacaactgtaaattaaaatttacaacacaagctcatgaattaatcataaaaagttgctcttcctatgaatcactttggtgactcatttttcttcttatatatttttcttttttctttaagtaacattatttggaccctatatttgtaaagttactaatctcaacagtttattttttaaaattatatatatattacacgttgtattttttaaaatgatacaactcgattttattatttattatttttatttttttatatatattaatacactaatattaaccgatcggtagttgacagctggctggccggcgaaactttttttgcggcggccggcctgtaatatttttccattgaggtaaacaattataaacgtataatatttaaggagaggttataattatatatacgtactttgatgaggttaatggaaaatatatatagagagtgatatatagattcatggtctcaaaagcttggacaaaaggatctaatctttgatccttttgcccttacgtcaaatttggttggcttctaagctaagagaaaatggctcaaaaagtagttatgtatatataaatatatatttgaaagattttttcgaaaattatattgcgtataaaaatatttccataaacttcattttcaaagcaaataataagtgatgagtctaaagccaataacatgtagtgtgtgtggtattaatattctttctattgaaactttttctttttactactttatatcttgcacaaataaatgccacgaggacattgggtatgggtattgggagttacaaatttaaataaaatttgttttcttctatattgtcatcatttttaggaatattatttctcccaaggctagctatatacctagctagtccctcttctgatccaaaactattattttgaagttatttttaaattaattaaatgagatcaaatttgattgttcatatctaataataataataaatttattttgatggttgatataataaggtctccatgattgacgtttacatatttggagtcatgtgatcaaaacacaaatgtcaaaaagataataactttttctaacagagtacttgggttttgaaacaaatttataatatattttttaaaaaataatataagtaaataaaacattagtatacgttcctcacttggagataaaattagttgtcgttttgaggaaaaaagttgaaagaattaaatgcaactttatagggagtcacaacttcctttgaatttaatttaatttgcaaaacacattgataatgctttgttgagctctaatcatttggttcttgagaatatggtggccagagaaggagagaacaactcgaggtttatcttttgaaaatctctagcatatacattacacaatttaaaatcttaaaaaaaaatcgtttttatatgactttttagtgtgttctctatgtctctagtgtgtactgttcaataattaaatgttttatagctaattatatttttacatgaaagaaattatttattttcttaaatatatatctttttactatctctgtagaaaacaaattaaattttttccaagagctgattattacgacgtactttttatgaactcatgcatggatagtatactaattaaatgtacgtagtgtccaatttaacgtttaaatatatatatgtgccaaacctccagctaaatatagtgatatataaaaaataaataaaaattaacttgttggctctttgatgatctgaagaagtatatattttcaatacatgcgtatatgtacatataataatatatactttttgtgtttgaaactattcctgatgatcaagcaggtcatatcctaggagagagttagaataatgaccactaaatcataacagtgtgatatgctaattatattaatcataaaaccatattcttaactaaattgtttaaagcaaaaaattaaagtaaacttcaacagtaggaaaagaaaaggctaacctatggtcaaaagtatagtaggctcaaatggctagctatacaataaaattgtgagttgggaccagtatatattatcaactatatatatatatatatatatttaaaagaaaccttcataattaatcaaggcgaaatttcataacacccaccaacttattggatgaaggaaagtgttactatcatttttaaaatttcaatattcggtaataggacttgagatctgccctattagttactttaaaagtgaataatctttttttgatcagagaaactaagagacgaaacatatcaatatagtataataagcatcgtgcatatatgataatttggtagagttattagaatattttttaacacatggtttgaaagaagtttggagaaaatgacaccaataataataaaatatggtatatatagggatagtggtgtgagaccaccaaccaactaattacgcgttgactattaacaatttgacaatattaactctcaaattaattcgaatcatcaccatataatcttctccttaaatacaaatgttatgcctgttttatttatttataaactgttaaattccgtaaataaagaaaacgaattaagtagggtgccgtttggtaacacttttgttttttaattttctaatcacaaaatgaaagtaaaattnnnnnntttaaaaaatttatttttgaaaaacaa

SEQ ID NO: 112471 - DNA, 2534 bp, Cannabis sativa
tccaggaagcagccagagtggcgttctcgtgtataagagtcattcattccgtgggtgtgaggacccaatagaggtttgaacggggacgttacaaaatagttgttttgtgttaatataatctggaaaaaaaaaacataaattttgactgtcgtggtaagcaaaccaaattcagtcttatatttctttaattatgtttcttacgtaattaagctattaaattttggtttgaaaagaaaactattaaatttaatttgaatttgaataatttttgattgatggaggaaacaatattatattgtcatgggaaaatacaaagacatatatacaatgaataagattttattttatttttcttaaaaaagatgtatttgggagtgggtagctagacaatagaacacgcaatcatttgtcaagtattctaaaattagagtatgagtagaattatagataatattttaatgagaaatgatttgtcaggtagtgtaaaaagagttctacaatatatatacatatatatatacctgtggtattgtataggtacaaattattggatcacatacattaacttaattatattagtgaatgaatagaaaggttcttaactattgattattatggttttatttggacgttttataaaagttagtctacattaattacagggttgtattgttatactatacctacgatgcacatttcttctatggggatggctttacggggattcgctcctaatagaacagaaattctttgtctaaatagagaacgagacagggacgaggattattttttgcatctgaatgttaaacgaggcagggacggggatcacactccctgtcccgacaataacccgtttagtattttattttatatttatagtaatattttataatttataatttatgtttgtattttttagtatattactatcttttttatgaattttacaatgtgttttggataataattaatttattaaaaaataattaaagtgtaatattttaatttttatgtaatttaatatttttatatattaaaattttattataaactatatttttctaatagggaaattccctgtgccgtcttcgttccatgtgtatccctaaccataccgctctctatatatatatacacataggtcacagattgtaagctttgcttaatttattctctaacaataatattcatataaatatatatatgacgagtattatttctcaatttatttctcaatgtaagcaagtcggttctgagttgaaatagcctataagtaaatttgttttaagtctttactataaaaataaattgtatttttaaaaattattaaaaaaaaatatgtatattttttaattttttttttatttgaacctctaaaataagtgggccctaggtgcaagcctagcccgcctatgcctagggccaaccttaaatgtaagtattacccatgatttttttaaaaaaaataattataattaaatattaattttaaaaatattaatatatataacattaatatcaatataagaattgatgttaagaatttttttcccataagttgttttttttttcttatgaattattttttctttatgcataattttttgtctaatatatttttggggttttttttttatttttacatttgaaaacaattttatttttttttacagaattctacatagaacatttattacaattagcggaacaacttaaattgcaaccaaaaatcgtataataacccatatagaaactattagataaatcactttagaaactcaaataccgtaaatttaaaaaaaaaaaaagttaaaaaaaatagtaaatagagtaatttccctatatttttttgggtgaattatttcttgggaaattactctacatattataatttttttacttttttcttcaaatttacagtttgggtattgctccggtggtttctctgttagtttttatatatagattgctatgtggattttagttacgatttaggttgctctgttagttgctatgagggtttctatgtgaaattttgtaaaaatacaaaaaaaaaaaattattttgaagtgtaaaaattaaaaaatccttaaattaaatatttaaaattttcaaaacaaaaaattctcaatttcttcactagctatatatatatagtcagtatcacattttggaagaggcagtggttgaaattattgctaaaatttgttgaaattatttcatcaattaatgtatgaattgacataattttgaacattgctaataagaatgttacagttgaaaaaatctgagaaatgagatcaacaagatcataattatcctactaattaaattataattaaggtgggctttttttttgtgtgactctaaattaagtagttttttttttcttctaaattctaatcaagttgatattaatttgttaacgatgctagcttatatatatagggaaatttacatggtatactaacttttgtcattttcttacaaaaatattgttaggcggaatttttaacttttttactgtgtttttt

SEQ ID NO: 112472 - DNA, 1656 bp, Cannabis sativa
  modified_base (72)..(77): a, c, t, g, unknown or other
  modified_base (1626)..(1626): a, c, t, g, unknown or other
taatccaatggcttaaaaaaatgtaaccatgatggttacaataaaactgtaaccattgaaacctcttccatnnnnnnatatatatttatatatatactatgcattacttactgccggccatgactaaatatgttgaactaaaaacaggctataaataaatgtagcaatatttcatacttgctaaaacacacaatcaacaatttatctctttattttctcgagtctatctctatctctcaaaaagaagatataccaaatcttcatataattagtactatataagagattttttattcataataagcaataatattatggccaactccaagcaactattcattagtcttgcaattattatagcaatttttgtcccttcaatatcagcagttgaatatgtggtgggagatgagaaaggttggactatcaactttgactaccaagcttgggctcaaggaaaggaattccatgttggtgacaaactaggtatgtatatataacttatggccttatttatttgtcttatttgcatgtgttttatatttatttaacgtatattaataaatataagctagtcttgtccgttgattttttagaattataaaaatcataccaaatatttgaatgaaaaatgaaaagttatatttgaaattaaaataatttatataattccaattttactcataaaatatttttatagtgttcaagtatcgagagggagatcacaatgtgttcaaagttgacggtgttggcttcaaagaatgtgtgccaccagctgatgatacatcggccttaactagtggaaacgatgtgattacattgacaactcccggaaggaaatggtatatttgtggtgttcctcaacactgccaagtgggaaatcaaaagcttcttattactgtcattcctgatattgatgacgtggcatctcctaccccttcttcaccctctccttcgcaagatattcaaccatctagtgcaaatattcttaactctttctcaacacttgccttcatcactactttgctcctcatacttggcgttctaggagttttctttggttaattaatcaagcaatatgtaacaacaaagatagattgggtttcattatttattcatttctattgggatttactggaattcaaatttattttcgagttgtaattactactactggtttgcaattcaaaattttcatattctttttgatatgttagatgaatttgagcaattagtgaatgttattgttttaatatatatataccaagctaaatgaaatttagttaattatttttttattattttttttaacaaaagaaatattttattcaaaatcgaacacagtacaaacaagctactgcaaaaatgtaatcaacaacaacaacacagaaataattaataccaaccctcaattacatttaacacatattgatcacctttagtacaacttgttcttttgaaaacttaacactctccactataccatactcttaatataggtacaaattactttgatcgaattacaaacaaaatcaaaaacacacttaaggcgtttggttgggaggaatgaaaatataagaatagaaataggaatgagaataggaataggaatagaatggaataaaattnaaaatgcataaaaaaaattgataagaaaat

SEQ ID NO: 112473 - DNA, 6810 bp, Cannabis sativa
  modified_base (6777)..(6777): a, c, t, g, unknown or other
atgtgggacttgggttgataccccaacaatcctcccctcaaactaaggaccacatacttgtggtctcccctccagcaaaaccaccttatgccgttgctatcaccaagggaactcgccgcctgaccaataccttttccaggaagactttcgacacaggtcctaacactgatctccatcttgtaccgctgtaatcatcaacgggatacgccacctaactacctcaatatcatatagactttcgatacaaggcaccatatagatcttcaatcgcgaggtcatcacattgagggtttcttcaacacatcgcaaatgcagcccactatcccagtgctcttaaacctttggctctgataccacttgttgggcctcgctcttccacctttttaggccgctacctcaccttgactctcacattagtatgatattgtctgcttcgagcttaagccctcacagttttatttttgggcaccttcccaaaaggcctcatactaatggagaaggtggaacacttatatccaagacaactcttgtctattctttcaatgtgggacttaggttgttaccccaacagcaccaacaaaagagatgttcacatgcatgggcgccgttaacaaagatccactctgtgttgccatgtttgcccttgttgcctgccatcgctcgttaaattatttcaacggcactatttttggcatagtctttaagcattggtacaaactaaatttcttggtgatattggtaagacactaacaaaaaacattattatctatgagtctttgtcggcacaatttgaagcctacaaagcttttttaagccttacgagtgctatttcatgattctcacctctactgcaggacaggtagctctaaagcaagtactaataatcttttgaattgttattattaaccagccctaagtctttgatccttacagatctttgccaaatgtctttctatagatcgaccactctcgcatttgttgatttctatttctctgtcaactctttaatcgtagtgtgtgcctcaaccaacaacttctgcatttgtgtcatcctctctaccgtataggcttagtaggtttcagcgccatgatacttttgcattcgaattttgtgattctttccaactacttcgtacaattatatggagcaaattaagacttatctccaattgatcttgaagaaattctcatagacaacgtcaattgttgatgttgaaaatttgctcaggtaagtcattaaaagtagtaacgcaatgactctctcactatttctcacggtcaacctctcccatttcgattgtcttttttgattggattcttcaaagacttcaaaggatatcctgcaaataactctttgtcgatcaagtcaatgaattgtgacatagattttagaagagaacgtagagagaattaaacaaaaatcatcaaagtgagggaattaaccctttttcttagacttctttctccatttatagtgagaatttggagggaaacaactgtaatcaattaaactaactgatttagtggttggcacattcccacttggtgcccctagctgaatttcccactcaaatccatttaagagatactcacatagactgatgacgtcagcaaatctcaactttgttagttttctatctccaagctaactcttgagccctggacgaatgttgtcgattattcttttaaatggaattgggtgtttcgatcttggactttggtgggctttttcttaattagggaatattcaaagaaaattacattagaccccttatgttaacttttatctttatttttatatttttttagatatactcacttttatggattccattagaccccttatgttaatgtaaattatatgctagacttaagtagagtgagggtatattaggaaatccactcaaaaaattagtatattttaataaaaaaataatatgaaagtatttttgattaatggatacaagaaaaaagtatttttcaatttatcccaaatattcataggttgaaatatttgggctgaacaaataatttgaaggattatcatacaataatgtcctaaagtgaattcataaaatatagattcttacatagatatatagggcatgattggtacatgagataattatttaagattggactaagttatctaatcccatgtttggacaaaatttgagcttaagaggaattggattatattagggaaatttaatataccatgcttaaatagtgtgaatggtctcttaatacactacttatataacacattgaaaggatacgctagtaataattttttaatccaattatacccttctataattaaaaactaatccctctcttgtctttcttctttttctgtaggaaggccacaaccacaccacacccacacacaatcaccttgtcggaccaccctcgtcggagctcccttcgtcacttatacacacaccgaacttgcaccaagggaactattgaaactgccatttaggaaccaaatccttgcaaaaaaaataagtatgtaatttctttactaattgttgttagatttaattgcatttggtttgatactagtgctagtcagagattaatgatgatgtttcacaacatttgttgacgtgtggcgatatagccttgtaatatgttgtgttagataattaatgatgttttgcaatgttgtttacaatattttgtgatgatagtgtcactcaaaggtcactcatgatgtttaaccacatttcactaaattttaatcttgcatcgcaaaatatttataaaaaatgttgaataaaattgcaaaatatcgcaaataataatgttagcgacacaatttgtgatatcaacaacaaaaaaatgcactttggggctcactgcaatgtctaacatgtttgcagcatgatttcttgaggtttatgactgtttggtttatttgtttggagtattttcggttttttttgcattttatcaatgtcttgtgacattgttggcgacgtgtaacaataactattttatcattagtgatattgtaaaatatcgcacaatatcgcaacaaatcgaaaaaatgcaaaaagctaacaaaattatccaaacttataaaccaaaatagacagaaacttcaaaaaatcataacatcacaaacatgtcgttagacatcgtagagagcccactcaatattcacacaattgagtattgttatcaaatcggtgggtggatgagaatcagcagtgggtggcttgggtattgttatccacgtcgacggataacaatctatcctctttataatatgattatttgaacaatagaaaaaaggaaaaactaacgaccctatttttgacataagtaaacaaccaatagccaaacactacagattgaaggaattgtttctaaaatagcttaaaataagaattggaattgattctgcaaataaaattgtgtaacaactacactacaccagctggcgcttcatcacttttcacatacctggccaggggattctacaagcagaatgtaacccaggtgccaagttaccattattaaaaaaggtgacagctctttgaaacttcaaagaatgcatcttggtatccttgaaatgatccggaaaagaatttttttgaaggagccaaaaagtactaatcatttcattggttaccctgtaattggttgagaaccatttcagactcattatctttgtcatcattgtcatcggtattgaaactaccttcctcaaatgctacttcattgtcattgttagcgtccagtgataagccggcaatcgatgcataccattcacctcctaaatagcctgaatccctcatcaatctaaccaaaacttctttgctttcgagatcactttcttgctcacatagatcgagaaaagcagatacgtagacaggtttgggcctccagttgttcgaaccatcggctgcaaaagcttttttccagtaagtcaaagcctcgggaattttcttcactccagcatgcccctcagcaagagtctcccatgtgcctgaattgggttttcctcctacttcaacaacgcggtcaacaaaacttaaagctttttccaaatttctgtttttagtataataaaccataaacagatttgctattctggggtcataatatgacttgaccagtaaccattcctcatagatcttttctgccccttcaatatcacctattctgagaagagaagagataattgattggtaggccaaatttgggactttgggaaatattgatttataaacattccacaccctataaatctcgtccttgttaccaacactaccataaagacttaaaagatagtgataagggatccgattctgccctgtaattttattctcaagctccttcaaatactcctcagccttcccaaattgccccatcttgatatacattgtagccattgtactaaatgtagtccagttgggaagaagggccttatcttttgtcagctgttcaaatacttcctccatcttctcggcagatccttgtgatccacaacaggataaccaaatgttataggagtaaatatctaaccgaatgtttttcttcaccatttcagtaaccaaaaactcaaccttctcatattccttgaggttcatataaagtgtcatcatcacattaaagggaatggaatgtgaggcatgacctaaagttctcatttgatcaaacaaagattctgccttttctttcattttagcccgagcatagacattgagcaaagcgccatacatcctcttgtcctttgaggtttccgagagacttaaaaataaactttctgctgcgtcaattccacgaacttttgctattaaatctaatcgaattgctacatcactagaggataatctaaacctatctgctcgactgttcatccagtcatagacctgcacagcacaagaagtttagagctgaaaatatggcaagtgatagatagagataaacaagtacacaagaatcaaagtatcaggaagagcaactataactgaaaattttctatgtcatacatactttattttgattcttcaataatacatttaataattcatgtagtacagtttctttctctcttttacaacatgaataacaacagacattggtaattacactttcaagcttccatcctctatcaatttcaatttactcgttaaccactttcgcccacatccaatttagcagccaccttttttcaaagtgattaaaacatctcaatcccaactaatcaagctaacccaaacaatcaaaccatatcaaccaagcttagcctttcttcattaagcaaaattaaactcatctcaagacacaaaataaaactcaacatgaagactctcaagattatgaacataaaaatagcataacatcatacttataagctcacttgagtacttgaacaaacattttatgtcaaaaagaaaaaaaaaaaataccccattaaatctagacacatcccaagtaaaaatagcagatacccattaaaaataaacgcaagaataaagaatctcattctcgttattacctcaagagctcgctcaaaactcttgtatttcctcaactctttgatgaccctacaaagatcccctttagagattaatttttgctccttctcccactggttcaaaacactcccagaaccaagttcaggattctccatataagaaatcctcttgtatatgccgatccatttcactggtgggcgacgctcaaagttggcagtggagctttggacttgggatatggaggagcaggtgagtgaaaagctgtgatagtttagggattggcgaagggcacaagtgggatttcgagatgggagagaacgagagtaggagagggaagaggagagggagactgatgagacattggggttttgcagacaagtttggagaagcatttttcgggagctttggagcaagaagagaagggtttagagagcatggcagtgtgttctccgctcttgtagataaacctctcaatttatttcctctctatttattaaaaagaaaaataacaataaaatataatttttaaaaaataaataaataacttggattaatgttaaacttgaaaaccatactttggatttattttttaataaaaattctaaattactccaaatcaagggcaacccatataaaaatgagagtggcggccttttttgctagagaaaaaataaataatttattaattaaattatatgttcttaattaattagagaataatttacaataaatactttagctttaatggttaagttgattcataccattaaaataaaaatatattatacttatgaattagcttaataacctactcgagagcaacttacttggaaataagtaataattttccattttttttcattttattgtttatgttgtgctaaatttttcttgcacataaaaaataaatcccattatatatttttgagaaattttatggtgcacccttccaatgcacatctttcgtgtttttgatatctaaattgttttaattttaatattttttatgtgataatgtaaaatataattatttaagatatattgaggaattcaagaaaaattgatactctaaaaataatgtacaaacaaattattgcacacttatctcttttattgtatatgtgtgaaataaattatttgaactacattttttatattgtaaattatttaaaacttctcaaaagcttgtagaatgccttgaataactacaatatattatatatatcatcttataaaaatattaagggctcgtttggatagccgtattaggtcgtattgtatngtattgtattgtattatattaaaggctaattag

SEQ ID NO: 112474 - DNA, 1669 bp, Cannabis sativa
tatttcatcttgtgtcggattttgaaaaaaatgggcaccaccaaaattgctgacatcaccattgatcttatgacggagtggttttacaacatagaaatagtaaaagatgtcggcttcgaagttgattttgtagttttctatatactcagtagaattgtaccggctttctttggtactcaagcaaaaagacttgaacatgaaattcccgcaatgataaataaacggatggaaaagctacaacaagagatgataaagcttaagtctcaattagagatatgtaaggattttcctccgaaatcggagttcatgaaagagtgtttggcctttgcttgtcaaaagaagtggagtagttcatgtgaaggattgctttagggcataaccttgttgttcttggttatatttgtgtaatttgtattgttgtgtgaatttaaggtttggaaattcttcttggaatatttgctatttgtaaacaagaatattgtgtatattttaattattgcatggtatgcatgggtataattatattttttcttttgtaaatcattcttatgtgtacgttagtttaaaagaaaaagaaaagtatacgttaaaaatagtagttattaagtttttactacaaaaaaattggtagcaaacaattattattattattattatttatttagtatggatgctaaaaatattaaaaaaatatttttctactaaattgtaatttttgtgactaatatttttagtcacggaatttttagtcacaacatgagaatgacgatttataattagtcacattttttattttacttttagtcacaaatttattgtgactaaaagtaagattttttaaagtataattatatgatttatttgtttttattgtgtattgtaaagtacatattattgtattatatgttagaaggaattctacttttttagtttaataacgaccaatctttctacacaaattgtgagaagaaaattatctacattatatagcatatttatttctttttgaaacatgtaaatgatattcatttggaaaaagatgaaagaagaaaacttcactattaaaaaagtgtgctactaaccatgaaagcttttaagatgcttactctaagaaccaaataattattggattataacttttctttagaaaaaaaaagtaaagaaaagaaaagaaatgtaatatgttgttacataaaataatgtatacaaaataaagtattaaaaatctcaaaaagtttgttgaggcaaaatttgtttgcgaaaaaccaaaatcttgaagataaaataaattggagtttttttttacacttaaaagcagttttttttttatatatatatatttttacgaaaatttacataaaaactcacatagcaattaatagagcaacttagatcgcaattgaaatttatataataattatccacatagaaactactagagtaattactaaaactgtcaatttgaaaaaaaaaattaaaaaatattataaaagtaacacttttaaaaaaatcacacaatataatttatttattttccattattgttatttgcaatttgagactacaaatgaatattgcaactgaggatagtttctatttggggctcccaagcaccatgtcccgcaaaaaaaccgttgtccttggctacctcaaagataaagtcaggaaa

SEQ ID NO: 112475 - DNA, 2652 bp, Cannabis sativa
  modified_base (69)..(76): a, c, t, g, unknown or other
aaaaaaaattaaaattcgtaaaaaatatttaaaattccgtgaaatcgtatttttataatttttttgttnnnnnnnngtatttatgaaataatcccaaaaatatttttgatagaatatacataaaatattaaataattagataatataacaaaatagtgtgcaatgaagtgatagagaatgtcatataacaaaatatttttggtcgaaatcatcttaccaactaacgtttaggtcacgctatcattagccacctctgaaaaagctttctcgatatctgcttcaataatctcctttgaatcatcatcacaatcgaacacaagcgcaaagcaaaaacaagaaagaaaaagggccgaaaataatatcctaacctcttatttgtatgttattatttgacaaaaatattattttgttacacttagttattatttttattatatagaaggtacctcaactgagtaaccagaacaacacaaacgagacacaggcaagaaaacaaacacgactaacagaagggactaactctaaacaagagaaaagccaaatgaactacaaaagataaaaaaatagaaaagaaaagctaaaaatttgcgtcagccatctgcctccatcgagcagggagctgttaaaattggacaaatcaatgttcccgaactggttggaacgaattgcccatttagccacgctatgggccacacaattaaattttgtaggaatccaactagcctcccaaaggttaagtttgttagttaaattgaggaacttggccacttgggcctagatattgtgttgcaaggcagggatgtgatggcctttctgacgcactgccaacactgcaccaaataagtcgcattggaaaatgacgtttttgaggccttgaatggtagcaacctcagcaccccagcagagggctacaatttcaccacctaaggggtcattgtggcaaatatgagtagtgtgtatgctcgtgacaaccccttctttattcctgaaaattgctgccccaacagattgtcgttttccaatagcgacatcagtgttacacatgagccagccagccaaggggaagccaattggtcattgcaatacctgtgggagaatgaatctcaacaagttcaattagcctgctattgatctgatgaattaatactttaattagggtaggcttgccatcatggatgatgctatttcttttctttcaaaaattttcaaatattattacagcaccctctaagaataagtgaaactgcatgtctccatgcctattttcctcacatttgaaccatctaagccaactatcttaatctgaaatgctaggaaactagttttaacatgccacttgtgattaggatgttacacttaattatttaatctaaatattatcctgtcaaggccagcccaaatatacaactaaaatacttaaaaaacttatttaaactattctagtattaaacttattaatgtggtgatagacaaactaaataatcactaattcaagaattatataattatattgattttcaatgagactatgagttggagttctccttgaatcttgtttagttaatttattaattaaaatctcaactaacacattatatacttttttgcagggtcaactaaaacatacacacactatagtataattatattattatgtccaaaaattgccatgttgtacgattaagaccctaaatctgcaaactaccattgacagcaatttgttatttatttatttatttattttctctaacattatggggagtctaaaattatgatcatatataggcctagtacaaataaaatctcataatgcaatttttggtatcacaagaaagttgcaacaatggcagtttttcagttacatatatataaatagagaaatgtaggaatatttttaggttaaaacgttaataaaagaaaaaaagaaatgaaaaacaatggaagctgagagtgaggattattgtcggcagaagatagaagatgatatttgaaacacttatctaattgctttgttacaactaaagccactttcattctcattccttttttactactttataaaggtttttacttttttttttttttttttaatttattttcaattaatgcattgctttctgtgtataattctcacataattattacataattacacatgctatttatgcttcttttctttcttattactacttcgtcaacatatataaccaacaactccctattgtactactactaagctactatgctattctagaccaagtctttcactttgatttcaacacctattgcatttaagattagtagtatttatttcattttgtacccaaaaaaaataaagttaaaaaactcccactttttactattgtgaaatgtacgagtatagcaatttaaagagttttttattctaataatggggtatatatataaatatatatatcaacatatcaaaatttccacaaaaaagttggaaataataattcctaattgattgtcatcattaccataataaattaccagcatgcaagcaaatataagttggacaagaggaatacacatcattgtttcacagttcactattgccataattactttcattttatatttggtaaatactattttgaaccctgtattttgcaaaagttaccgattgga

SEQ ID NO: 112476 - DNA, 1335 bp, Cannabis sativa
atatgatgctaattagtattaattcaaataattaagagtgataagcgctaattacgacatatttctcaaattctacttctgaaaatacatgctgaaatattttttttatttattttttatttttttggtccatggcggttcattataattgcaatatcattactataaattgtttaaattttcttttgaatagtttgctgtgttaatttttttttttgatatctcagtttacgtattgtgttcaaaatactccaaatctattttctaaagtgtaaattattagaaatttttaaaaaatttataaaaataatattgtaactataacgaatattctttttttttaaaaaaatatatttcgatatgtgttttcgaatgtaattttatttttttgaaattataataaaaagttgtaaccaatacttctcgttaagaattgttatggaacgaaaaacgttcactagtgtcagtggtacataattgatatataaacccaactatatttatttattatttcttcttttttttaaaaaaaataaaaataaagagatcatttcattaacaagaacaatcaactaacaaaagaacaaagaagtaacaatttagagggaccactgtccactcttatactaccatcaaaaagataacaagaagcacaagcaagacaacgatcaacccttgttagctaatcgatttatgtatataaaaaaaaatagaaaagaaaaattcacatacatgtatgtaatattcacaattatattatattttaattacgatatataaagttatcatatataatgtttaaataaataaatagcgtcatagataattaaaaaatgttttattttacactttgccataattgtatttcaattaaaaataaataatttactaaaatttttcaaacccttcatcatatctgtaatatccactattacaaaaattattattctcatcgttagttctcgaaacacttttttttttcaaagatcgtcgctaataaaattaaatgtgtaaaaccgttgactataattaaaattattgagagttttaaagacttctatgatattcgcaactgttaaaactcgttgtgtacaaaaaaaaattaatattgtaatttaaagagtatagtcgatacttatggaccattggctatagcgtaggggtgagcaacggtcggttttgtcggttttttacacaaaaaaaaaatccaaaattcggtttttgatttttatagttctaattcgaaaaccgaccgttttaatccacggtttggtcggtttaaacccaccaaaccgtacttcatttttttttttaaaaaaataagtttttaaattt

SEQ ID NO: 112477 - DNA, 2265 bp, Cannabis sativa
  modified_base (71)..(76): a, c, t, g, unknown or other
cggatcggattgaatccaaaatatgaaatccgcacttagtgcggattagatgttgtttgaccaaaaaagtnnnnnntggatcggatgaacacccctactggttttgatgtcaatatttaatgatttcatcttgctgtttttaattattattctatctttgaaagttgtggtggtttatttattttggtatcacattcggagaaaaagaaaggaaaaactattttggttaaaaaaaaatgaaaagtaaaataaaataaaataaaactattttggtatcacattaaaaaaaaaaaaaaaaaaaaactattttggtaacgttatctataattttcatttggtacttagatattaccaaacattaaaaaaaactgtggaaatttggtaaattaaataaaacaagtagagctaaattacattatcttcaattgttttgtttaattattttgaaattattttagatacttttaataataaactagattattattgttaccagtaatttatgcaattaaatttttagttattacaataaacaatgtatcaaataatttaattaaaaagcaaaactaagcatataatgtaatatccattcaaaaaagcatataatgtaatatgttttgttttgtttcaacttaagttattccatgcttctgcagttcaatagccgaacaaaaatattctggtggaaaatttagctggatggaagatattaattgctacacatatgagacttttaatattttaaaaaacaaatatttaagactcaatcaaacaaatattagagatatctagcactaaaagtctctttcaagcatgatcacatattagagatatctagcaaagggattcatctcgacttggattgagaagagatcttaaatgtttccacaattaagaaatgagtcatagtccatgagtcaatataattaaactttttggctatggagcattttacacaagaatgttcttgccaaatttctccagagtttctagccaaagttcgtaaccctttgcgtgaaggggtaaagcttatttataggctaaaaactaggtttcgcatgaagtcaaaccagatagggttttgcacatggaaaataagcccactgaaagggtaacatacaatataatattgactttaagcctggtaggtgatgtctaattgagggataaccgttgtccgtacaatatagtacatatgatgttgatggatatctatatgttgtcgatcatgcacagtaaatgtcagagtagtgagcattgaaagaaaggtatattacttttttgtgctatgcgcctttcccaagtctgacatagggaacaaacccctacttttgtgggattatgtgtcagaagtgtgccacgtcagatcgacctccacaaactctcttggacttcttttctgggacgtccatggagcatccgtttatgccttctcaaacttttggtagttttgatcgagtcagtcctttggattagctagtctaacttttcctgcaatcaagtcttaacccaatctagaacacctgtctggcttctttcgtgggtcaggcgactgtcgagttgggccttgagaatggggccgtaaattgatcatttggggaaactagatgcatatgtgccacccgtgtggttaacatttacctcccaatccttcaaggctcgagagttggaattctaaagtgaaatgtcacggaggcccatagacctttcattttccatgagtttgagtgcacgtgtcatcaatttcttagtttatgtgtgtcacacttcatagggatgcatgtgtgacctcgtttgcatactgatggttggacatgttagtgaggtttttgaggtagatttcattattaatggcaacttttggtatactcggatcattggatcctataaaatgtgtttctttaaagttgatatgagttgttagatcgataacacagggataacaatattaatatagtttaaaaataaaaatacaattaatttccacatatggtcttgaagatagttaaaatgaagcttttgattatttctttttaatttattttggagttatttaaaatttgtgttggtatccttacaaaaataaataactaaataaataatattttatgaaaataaatatttttttttctttttgctaaaaaataaataacatttgagtagtgataccgtcaatgtcctgttataatctcttagtcaacctctacgcccgaaaacacatgtcaaaatatattttttttcatttttttttacgggggtgttcgt

SEQ ID NO: 112478 - DNA, 4376 bp, Cannabis sativa
ttaaaatacataaaaaaaaaattaatgaaaaattattattactattattttttttttttagaataaattattactattattttatctttgcattggaatattttatttttttattttttttattattttattattttaaaataaaataaaatttaaatatttatttaaaactaagaattaattttaattatttatgccgcaaattaatttttataatataataaaaactcattaaataatagctaaaattgattcatatgaaccaagaacgtaatatataatatagtctagggaccatatggcaaatctatccgaataaaactatttgagtctctgagatcgtcttcctggtcgtcctccattttctagggttaggtttcttgcttcatcgaattcataatcttctctgtgaatccaattgcgatttaggaaaaagaaaaatggcgtggagaaacttcttcaacgagattaggggcctgaagttgaaggaattgcccgatcacgtgaagccaatgatctcgatcgcgagtgcgaagaatgctgtagtgagaggcttggataactacaacgctaagtacattcagaccggttccatcgatcctctctaccatgtctgcttcggtggaatgatcttctcctacctcgtcgctctgcccgaagagcgccgccatctcgagcaccagcagcacgccaaggaacacggccattgattcattcctcaggtttgggctttctcttttcttgttatcaattcattatatggatgtttgaattgggaagattccatttgtttagttttgttcgtttttagggtttaagttttactttatgtgatttggaattttttatgaactgatgagatattcaactgagaagataaatttcttgactttattcattgggtttgatttggccttgtttcttttcctccgttttcgtggtgtgcgagggaattttgattgctgttctttttgagattttgtattgttgcttaagtttgtgtggccttacttagtttacattaaaaatatatagcttgattgcaactcatatctggtaatttgaatttgaattattaatgtctttttcggacggaagcctgatatatcgataatgagtctctcaaatctgatttgatactaagttttgcctgattgtgacatgaattcatttttttctcaaactgtgtcctcgtttatggactattttatccgtagtagtagtagctttggtagccgttggcactcgtacaattagaaatcaagaaaggaatgaaccaatgagtcatcactgtagtatcgaaagagtggcggaatcaagtcaataacatatctcatagattttgaaatgatttttctgttaaactattagttgtcatgtactttcacgtgtcagtgtaattaggagttttttccttagtggtgaatttgcacaacttatttttgcgttttttaaatttcaagattcatgatatgctctttacaaacttagtataagttagaagcacacttttctattttattcattactatatttattaatgtaacaacatgattcaaaaacttgatgccaattttaattaaaggttttcactcgttactcacaggacctttttttttaattatcattattatttttggcgttgatctcaatcctatctctgtttttctcttgttcccgtcagttggatggaatatgtttgatattttctgcagacttgattttattataatcttttttctaaatgtcataagtgacatattgttgaaattgttctttgaaacggctgttctggtaccaatgcatttgttgaatttcacctgttggtgacattgaagcatatttgcaaaaaaaaaaaaaaatgatatcccaccatttttcaattacacaaatttgaaaaaaaaaatgataaaagttcgaagtagatgaagagtctaatgttgaaagttaagtaagttttgtttagtttaattttgattgttattattcttatttgtcatttactttctttattgaaattattttatctgtttatttgaaattttactgattctatgtttttttttctaagcttaaaaataattttatcacgaaacaatgttattaaagtgaggcttaagcatccatactgaatacgcattaggtgatatgtattatatatatatatatatataaattctggatacataatcctccttagatcttgaaaatctgaaatatctcagtattaaagaatggatggcatggtattgttctttgacggtgtcatcatattttttctccctgatttagcatttcttatttgaagggtttgctcatcttatttcaatgcacaaataacattttcagttgctcttctttgtaaggtctttttctacactgtaatttgatgggaaaaaaattatcttgcattctcccatttctagcgagattcacataggatattcctttattcaatactatttcaaaagaaagagacaagttgtgttagtgtttttatagttacatgactttaattatgtcatctttaaagttgtcttagtttcattcgactctactcttccctttctaaattctttcataatggctgcatttttgcattttccctttgagcttcattttctcgtgtttaattattgttcctctggaattatttttggaaaaaccatatctttagtagcaaccacttgtaatgtcatcttgttcacttaccttgtgtaaactctaaggaggtctagccgcttaaacaactttcatcagaagcctctctggccaatacatcaaaagcaggagataaaacaatttgtattatcttttctcttgaataaaaaagagaattcatttttttcatctttcctggaaagtctggtcttgtctacctatcatgtctttgcctgtgctcatgtcatgatgtgttagacacatttatgtcttgtggtgttggcgtaggcatgtttactactcttgttgtgcgtgcctgattgacccaaatacaattgctattatgtgtaatatgactcttattgaacctttttacagttaattttgttttgtgttagtcatcaaaaaaaaaaaaaaattatgttttgtgttgcaatttttgtttttttaagagaggagtagcatttcaaagatctgaaaccttaattgttgtactagcgaacaacctgcattcgatcctagatttttggtactagtgattctatcatgtatggatcttataattatacttgatagtttttctttttctattctcattattattattatttgtattgatatgttttctatttcattgcagcaaggggcgatggacctttattttggggctatttgtttgtttgatgcttttctttcttttgatatcttcaaattttagacagaaagatactgtcttcatggttcatgtcagcattaagtgatgaaaataaaaatcttaatcatatttaattactgtaatttgactgttaaaaggaaatggttgaggggaaacagctttgtttttacttttggtctttcgatggtgagtaatattaatgcgatgacacattatctgaaaataacatgtagcacttaaaaccctttttatctattcatgagtaatttgcagttaaatctccttaaaatgttaatacatttgcaactaactctcaaaatctatattttagtggtaaaacctcttaaatttgtgttttgttagcaattagatatttttattcttgcttttaagtgtcatggtggtttgtttacatgtaccattacgtagtatacataattttattggtcaatgtaatatatttttaaacaaaaacacaaaataattatttccaacataatttaaaaattaacaaaaatatttttatcattattctccctcaatgttcttccaccttcaaactcttatggaaaaccaccactacaacttgcaaccacaacacaaccactacaaatccttcctcacgtcttgaacctcctttgtagctacatcaacctccttctgcattttgttggtggtggcaaggttcttgacaacagtagacttggctcgggaataggcgtaggccatcttcaagtagacctgaacggaaaaatgttaaaatttgagctacaaaaatagaataaaacaaagaaggaaatatttacctgtgtagcctccttcaggactcctcctaagaccagttccttagatagctcattgtctgtcccggacagttgatcactcacttcaggaagtgatcggttcagatagtactggagcatgtccttgccctctttgcctccgtcctcaacgccacggccgtggaaggggtcctagtttgattagatccgttcgagctcccccctctggaactctttgattttgagaccttctggac

SEQ ID NO: 112479 - DNA, 5201 bp, Cannabis sativa
  modified_base (1470)..(1473): a, c, t, g, unknown or other
  modified_base (1501)..(1504): a, c, t, g, unknown or other
  modified_base (5146)..(5167): a, c, t, g, unknown or other
aaatcacgtaatacgcctatgtcagttagggtgttacacaagcaaagatagaagtattcaagtactgacaaatcctgactggacctacagctagccggccagggtggacaggttccatgcaccgggcaaccttcaataaggctagccggccaagcatacaggcatgacccaacacgtgtttttcccacatgccttccaattcctcctcagtattcctatgactttggagcagttcaaactgcccacgattctagaaattcttcatcaataaggaataaccctattatttaggaattattaattatttattctgtatttcaaatatgcagtgtaacttctttatttgtaagaataattctatgtacatcttataaaccctaataatatataaagggtcatcaacctatgtatataaatacgcttagaattactaaagtaataagtcctctctcttttctcatacttttcacttgcaaaatatactctcattgtaatactgaagagagcttagctaaaaattacaagattatagtctgtaatctgcgttggtattatttcaagagtgaatacaactaaaaattagagtaagtcattacctgaacaaaggggccgaatctcaataaatctttttgtctccacatttattattattccacacgtgacaatcataagcaaatttcgatcctagtcagactccgcatcggttggttgaatccacaatcaacaatgacttttcttaacaattgtaaatcatcatttaaagtaattttttcctatagttataaacagtcttttaaagttctatatttttatgatacctgtatagctaacagtattaagcatcgataaaaaatagtataaaagacaattataaaccatggaaaaaattaattttgtagtagtaatattgtggaaggacccaataaaattttgatataattgaataaaatttttaattttccgtaattaaatctataaaaatattaagcggggtcaatactaaatcttcagtactggagtggggtttgaaaaatcgtccctccttttttcgcaccaattaaggaatctaacccaacttatagaataattttactttgcagaagcatgcatatatgtttttgactttaacacatatataaatattaataaatttaaacagttcaagagaccggcccctaaatccatctattgtgtatatatatattagtgaataagcttattgtatattgattactgattaattaaaagatgaaaactcgattagtatatttgtcagtctccccgaatcgccacgtgtcaacctttcaactgccctttacgtgatatatataacttatacatatagcacatgcatgataatcttaattgtgttagaaatcatattaacgaagaaaactctgccgatcgacatatagtagtgtacatgtactgatctcatgcatgactgtgcatatataaatataaatatannnntgtgcatatataaatataaatatatatnnnnatatatatatatatatacttctagagaaaatatagatgtgggcggtgcatgcaggatgctgtgttgcagtagtagctagttctggatgagttagaataagaaattaatggcgtagattttgggacaagaatgtctcttacccatgtgcccacgtgggatatggtatgcgtgtgggtctctttccttcaacttattatctgtttttttctttcttttctctctctctcttatttttttttttaataatattaacatattatatgttgtttaattttaatatatatatatatatatatataaatgaatttgtatgtgcatgctgcagcagcggttgtagaaaacgtggatacagcaaactcacaagctcatgaaataccttccaagtaaggaaagtatgtagccgtaattgcatatcacaatagctccatgtaaatatatatatatataaaaattaatatggagtgtgtgtcatatacgtacatgcaattgcagcatcaaatatattgtataaatatatctgtataattaagactttttcttttatctttttccaagtaagtacattttatttttattgctattttcttttgtttttgtcaactttggagcctttgatcatggggtactagaaatgagctgtgcgtggctggcgttgcaaattaaagacccatttgcaacaccctctaccctatatcacgtgcctatacatatatatactgtatgcttttttcttttcttttcttttttgaaacttttgattgttataataagaccatatgccactttttacaaagactacttattattgtacacaaattaaacataaatatatatatgtgtgtgtcatggcttacagcaaacacagggctgtatcaagcatgtctcattcccttttttggcaaaatcagttgttttccaaggtttcttaatttagtcaaacttactgtgtagtataaactaaaagttggcctagctacaaactgaatctttcataccaaattggtggttagatattatatttatatacattcatataatttaatgcttaatatatatatatatatacatttattaattaattagtttgtatgaagtgaactgcatgcgagggtgtgtaatagtactgctaattaaagttaatatatataaaatatatatcttcattagtgcaaagctaactctttaattatttaaattttcacttttaacttgaatttattttcttatggaatcaattgaaattatatatatatatatcaatatataccgaacagcacgtatatatcgatcgtgtcttaatcggatgacttaatgtctaaaattaatatttatatatttacaaaataggccggtttggcaattctgcattgacaagaaatatataaatgtacaaataatatattattaatgttttgaaaataaagataagaattagaaaaacacgctcgccaaaattcgttctttttttctttctttcttcttatattttatttatctttttcttattttgacctttagtcttttatcagttacgatcaataccgaatataatgtcaccgaaaccctaccctaggccaccttttatcttcaaattttagcgtaaatctatctgccgacttttatgatcagttgctttctccttatcaacatttattttatttaatatatgaatattatatgtatatttttatatatacattaattacacatcaactctcagtaattttaagcaatatagggcaatttttatttttattttttgtgatattttaggacaactttggtttagagcctgtgagtgtgagctaattaattaattcggccactcgatcaatagtataattaaatatctatatgacaaattagatttataacttcctatattcgtgtgaagttaatgattaagggtttgaaattatgtttgctagagctctagctagctaaaaagataataatacaataaagtgacacatagttggagctatcaactaataagaaaaagaaaagaaaatgtataactggtgtaaaacaaaacaatggtcagagaagtttggcgtgtggttggagaaatgttttctttgttgcttagaactttttcacaaaaagattataagtataatcaatgtgagttgagcaaatactttcttgacaaaaggaggggacgattttctcactcctctatgatatatataatatatgcaaaaaggaatgtttatgaaaagattttgattcctcttaataagtactggggtgctgccacgtgtgccatgcatttatagataagttttaagttgatatataaatgtaaatttttatttatttttcattaataatttcaaacaaaaaaataaaaggagaaataataatatgcttttatttcttcaagcaagatattattgttgaattattgtaaaagtatagtgttgttgggaggtatttgaaatcaatattctagtagagtagtagtacaacaaggcccagcagagagcacatcaatttatattgataagcactttcaaactccgtcctttaaattaataaaagtcaatttttaatatatataaaaaatatatctcaacaatttttaatgttatctgctacattatgtgacaataattcatatatggacccccaaatacacaaacagttgggagagaaaaattgggtaatagtactgcccagtgcccaataataaaccacttgacctcttattttaacaatattccaaaatatatattatatagtagtttccatgacaccatgggaaaactgatttcaaaacactgcatagtgcctacatttattttgtctctaaaaagaaattaaccccccaaaacgtacgttgacgctcgagtataaaagtttttgattataatcaacaatcataattttttaaaatgaaatcaaatataattacttattatgtttttatataatatgtggacgtacgataattaagttttagctatttaatttagtggtgaaatgagtttgaagaatttggaacgaacaaatatcattatataaattttagaacttgaagtgtcatattaaatatatgccgacaaatattatgcgctcaggtatacataaaatatatagatgatgaagtgagaatatatctcattttgattagtatcttttctttagctaaaatagtaattactattttaatttactacctaattaaattaaataattaatcttgttcattttttaattgaaagagcgaaaaatatatccttacgcaaattttgatcaactttattgctttcttataactaaaatacataatataatcaatcaaattgaaacaactaaagcaaagatgatttaattaataatgtttatatatatattaaaaaaattaattgtcttttttttttttaaaaaataagatgctatttataattaatattttaatatattataatcaaactactctgccatgatggggagttcttgccaattaactagtaattatataatttttctcaaaaaaaaaaaatagtaattctaaaattagcattcatacacattgtggtaatttacaattaaaaatattagaaaatatttaagatctatgatcagtgtgtgaatgctcaatagtatattagaaaattagtgcatgtttggcatcannnnnnnnnnnnnnnnnnnnnnttttaaaaacagaaaattgtttttaaaaacaatt

SEQ ID NO: 112480 - DNA, 3999 bp, Cannabis sativa
tatttttattttaatataagttttctttttctaaaaggaaataaataaaatagtctagtctattcttaaaccaaatacaagattacttttaacataatccaatcttgtccagtctagtccaatatcctttttagtccaatccagtctaatcttatgtaccaaacagtcccttaaagtattttctctaatggggaaggagagaatacaagaaccctagtattttttgaagaccactacttatttataggctctttatagaatgagttttgagtatttataatttgatcccttaacaaattataaattaatttatggtatctatatactatttcatgataatttaatattttttgatacccacaacataattggtcacttaaattttgtatcactttataatagtatatacattatatatatatatgcctacaataaaattttaatccaacataaagtgattcaagtgaaggataaaatggctaattacatctccaaaacacagtaaatgaacgtttattttatgaggaacaaaagtggtatgttacttccatttggaaaagatattttgaattaaaacggttacaacaatcacaaattatcgagacttctttatgagaaaatttataattatcctaagttattttcatgactattttttttttaaaaaaaaagcaaaattttaattcttatttttttttttaactatgtataataatttttctttgaatggaaaataataattttattactgtttttgggtatattgtacttctttaatatttatatttaaaccattaataagaggaaaattgttaaatgttcttgattagtatttttttatggaaaaaaaactatcaatattgattagtagttagtttagtagtgagtgtacatcttgctatatatgcttacatttattgcttggttgacttcatttgaatctaaattatttatttactaattccaatataggcaaaatcaacaaaaaaaacaagaagatatcacttgaataaaataagagtagtgttggtcaaaacatttcatgtgaggttggtatctttccatcttagttagcagtgcattgatcaacaattttgaccataataaccactacttacaatagactaataacacctattagttatttatctaagtaattaattaagaacaagagcagattaattaaattattcaactcattaaaaagagttacaactaatacccataatcatcgcctcaaatatcaggcaagagagagggtaggaccaatttccactcaaaattccctaataaatctaaatctgtataatgtattttaataaataggggcctttagtagaataccaaaagtcaataacctccatatttgattccttttaacattatttccaatggagtaatattttataattgttaaaagagtattgctattaagtattagtggtgcttagatcttctcgatatgtcgcattgcgattagttaataatacttcctaaaagctattatattaaactatatgagatctgatacttaattgaaccaataacgatagtaatacatacgagagtgctaggcaccatttatactctttatcatttctcattgttaaaatacacacattattttaaaatataattttttttattttctctttcatcacattgtctttttttttttttaaaaaaaaaaaataaacaaaatactttaatgattgataactctaaaaattatccatcataatctcacatcacattgaattaataattttttaagtaaaaaaaacaatttatttctaataaaaaattaaaaatgaaaaaaaaaaattattatgtatctgttatatatattgagtaacatttcacacaaatttacttttaaaaattaaaccacagcatatatatcaagaccaatcggttagagatgctctactatacttttgaagatgttgcctattcatttcaataattttattttttggattttagataatgtcataatacaaaggattttttacgtagatgtgaagagtgcatgataacataaatataaataatacatagatctaaataaatttagagtttttttattgttctcctaaaaataaagaattatttcaattatgtatatatatatatatatatatgggattatgatatatttaccttgatgtcgaccactaaggaaacccttttgggtcatattttatgtccatctgtaaagcacttggatgccactgagaagaatccttgatggtgctttttaggggtttaagtaattatacatcttaatatatatatatgatatatatgatatatataaaatatatggatgagtatttaatagtcgttagactataattttaattattagattattattgaatagttgaaattaatgattgcattttgactaaaagttgaattacaacaatgactgctagagtggcttctgctgtaataacaccacatcaaagattgatagggttctttggagagcacctataatctaaatggactgaaactgaatgtggatgttgcgctgaacatgaacaccttagtcttaggaattggagcagtaataagagatcataatggacatgatgttgctgtcttatccaaaccagttcaaatttgttttagatcgatcggacgagatggagagaaaagctcttttttatagcatatccaactacaaattcctatcacacacattatgctttaagagtctcaaatatgttatcaacaacatctttagatttatattctttttttagatttaatctgagatgttcgttatcttttatcctttcatcctagaattattgtttcacatgttaaaagatatactaatcaagttgtacatgttttaataaaatatatatactctagcgttagatgaaaatatttattggataggtgaaattctttatcttattttctttattgttgtaaatgatttctaatttatattaataataaaaaatttctccaaaaaaactaaaaatatttaacatattacttgtaacttgatgtcaactttatcacatttcatatactaattatatattttgttttcttataaaatactaattaagataattttatttaaaaaaataaatttaataattattaactaacttttgcaattagttattaaataaaaatatttagcaattaatttctttttcaaaacttcttaataatttaaaattattagacatatgccatagctaaaaaattgtagactataatcctttacattaatatttttttaaatatacctatttggctaagtaattgcatatgttgatatattattgggccgccaattagtttattttttatttgaaaagtattttaaaataaatttaataaattaagaaaataaaaatataaatttgaatttttttttttacagtagtcttagttaatctatcttaacgtagttataaaccatattaattttttttaaaagaaaattatataaagaagagactaaaatggcatctcccaaataaacgtttacgattagtttgtttttaacttcatatgactttattcaaattttaatgagatgtctataaattactttagagtatgcaatgtttaaatcaaatttactctcttttttcttttctttttctatatgactatatgctaaaatatcttgaaccgtccagtttcgagaaatattaaaaaagttatatatggccaaaatattatcagtcgtcatattaggaagctcgctgccaaaaattgtgcttcaagcgtttcgacattacttggtagtgtcgtggcccgcctatattaaatgacaaaaattagggttttaaccctactagaaggttatataatagacccttttgacacattaaaatcctaatttgtaaagggtgtgaaagttgaaattttgtattttaatattaccagtttattatttaattaaatacgaaataatgaaactgatactgaaaaagtttttctgtagctacagaagac

SEQ ID NO: 112481 - DNA, 2934 bp, Cannabis sativa
  modified_base (39)..(43): a, c, t, g, unknown or other
ttagggtcctatttatactattttagaaaatacagggtnnnnnttgtcatttaacaaaacacagggtccaattaatagcttttgtaaaacagagggtccaaaatggtatttacccttttttttcgtagagcacggaccacgtccaccactgctggacatcacgcccaattaaaacccccaggccccaccaaattaacagtagcccattttaattctctccttctcacttcgacttcgaatgagcaacaaacctagtgcaaaaatggagaaaaaattagcaaccatgtgggagagataacatggagctttgttctaattattttgaggagcttgttctccacttccacttctcttctcctcttcatttcaaaccagcagccccgcaggtgtgatttcagccattggggttagttttctcatttcttagggttttgtttagatttctaatcaaattctattcttgatttcttatagatagttctccaacctcttataaatttctatcccgacccgattgaaaaaaagtaaaagaaaagggtttccgcttttcgttgatttcttataaaaatcaaggtaagtaaattgattaatgcctatttctatacttttctctccatttctcttttgatcaatcactgttactctctctctctctaccattattttactgttgtgcatttgattttttggtttttttagattttattattaattcctttaaatttatttactatttgaaaacgaatttgtataatagttgttttgtgtgtgtattctgtgttaggtacctgttagctcgaaaaagaaataggttcccaagactcttgttttaaatttttattttataagaatttagtttcactcatatataaatttcacctacatttatatattttctttgtgattaatcgattctctttggccttttgattctcctttttggtaggaattgatctaaatattcaatttttgattttcatgtagggtaatttgagtgaagtatactaattgttagaaaaagtatttttggagcgtcattgtataatatatggtatatatagatacaaggcgtagaaatatgatgcactcttcaaaaatagccaaggtatgtcatcattttaataaagtagattttgaattttcaaattttggtattatttcctttagtttaattcctaattaaatagatatttgttttcccctcaggtcatctatgcggaggagatagtttaatttcttattgtgtataaatcaaggcttatttggtttctaatcacaatccattgtagatcttcatgaattacaggttggtaaatgtggttgatcgaaaattcaaccaaaaagttctctttaagttgattctatagtcttcacaggcctagacaaagagggcattttcatctgtgaatttttttctctgtaaattgaggttatgctactcatttttatgggctacttttgatttgtagcttttactttgtgcaactgtataataataaagctaagactttgtgagctattaggctgtggattagtttctatttttgctctgtttgttgttcatgttaatgtgttatttttcaaccttctactcgtctagacatatttttataagtcattttaatatgaaatgtttctgacatgatgtttccacactaattgcatatgagaataaaagtacatttttcattcaataataagagttcgatttgcttgttcattttatgagacaatattttacttgaactaacacatgaactcaaagtggaaaatactttcagtagtttcaacattgactagaaaaagatcacaaatttccacccctcgtaccttttcttccttgcataagaatctcttgtatatagatcacactttgacattcacactactgtttaggacactttgtttatcctctcaccatttttagacacactttagaacacacttgttggtacatatatacacattgaggttctccaggtctccctatttatgctacttagttttttcaaataagtagtggaaaaactctaataattttgattgatttcataatgaaatagtggacaggtagttagtccaaggattattgcagtgtcctcatgatcaagcaagtaatctagttcagtcgttcaattgacgtgactaaattcaaaggtacataaatatttgtcaaacaattatcaaatataaatatatattttatttatatatttatattttattatttaatgaatttatttcttttgatgttttgtatctaatagacaaaaagttatatccagaagttgtgattgacgagatgagagaagagtaagagtgggcaaaagatatgcttcaacacttgtagaatacactttcagaattatcacattgtgggtcattagttaatttcttcttttgaaaaaaaaagtattagttatgataaatatttagctagactaatattagttgattttttttcttatataatatttgttaattttgttatgtatatatgtttaaaaaatattgtaaattttgagatatgagtgttttgaatttgtattcttttttatgtttattaattgaattaaaaaaattataaataatttgttggaaaaaattatattatataatatatttataatttaatatataaataaataaatgaatttaattttttcgtattttattttattttttaaaaaaataaaaaaatcaagtttcaagtccaatattgttggactagaaatgcttttctagtcctaacaaacaattttcaagtccaactttgctagacttcaattggatttttattttgggattgctttttaagtccatcacaattggacttaggaatggcaaattggggttttttcgcggatcggatcggggccccgacccgatggggcagtcccgccccggtacaatcgaatcgatattcgggtcttt

SEQ ID NO: 112482 - DNA, 2212 bp, Cannabis sativa
tcaaccaaacactttaatttaattaacaggaatatgattacatattaccctacacaaccaaacacagtttacacatttccttataatcatattctccttcataatatatacgcattatagagttgcaaggaaaaatctctcaaccaccactatgactatccaaacaatttaatgctcttcattctattttttttttataaggacatgctcttaaaaacattacatcaacaaataagatattctttttgttcatctcatccaactgaagacacattccttgcttattgtccccattgatttcattaaagccttcaccattttgggagtaccaagtagtacacagtaattatagcagcaacacatgattttacaaatcaatagactagactatacattattttaaggagtatcatttcataataagttgtgttgaaaattagtcgaaaaaaacaaatttaaaatttcaacataattatggcaagtgctcaattatattctttcaaatcaatataagttttagtgctttcaattataggttctcttaaaatatctcaaaacttcacgaaattaataacataaattatttctaaactttataaaaatttgtacttttagtggtattttcaccaaaccttgctgttgctacccacattgttattgttattgaaaactaagcgaaatttcaccaatggacttgtagtaataacgctaatatttgacaattgcattgcctatatcatattctattgaattggagaaagaaaaatatcatatttcattctattttacctaacctaaaattatcaggataagttgagaattaattttttttttactgcacattaattaaaataattttaattgataaatactattttttataattaaagtatcaaatataacctcacataatttataaaaattagagtctctaacactataacactatggtattgtaatacaatctaatgttcagaactagtgacagacacacctacaaaattgtaggggctatagccccagtaaaaaaaattgcataaaaaaattaaatatttttctttacatttgaaaattatagtacaaaacattgaaaaaatcctacaaaaataaataaattaaataaagtagacctaaatttttttttaataacaattaagtccccacttaataataattttgtgtccttcgaaacaaagataagaagaagacgttaggacatttttgatatatttaatacaaaatgatctttcaaggaaatattaatagaaatgcattattatttaatttgttcacactaagaatatataccatttcttatagtcaaagtaaaatgtatcagggattataaaaaaagaaaaaaaaagggtaaaatgtaccaataacatgcagacgtctcgaaattctgtgtactaatctaaaaatgcttagaaaaaaggatggaagtttagttacgatataagataagataaaataaggccatctctcaaggcacgtagataatcacttcagcagttgtatttgttacctaaaacatgcaaattacaaaggccaagtcccaagtggccgaagaaccgtttagtaggtggagggtagtgtttccaacaatgtcattttatctacttgaaataccaaacttcaccaaattttgtaaagaaataaaaggcaaagtattagttggtgctatgtgcttatcagagtaaagttttatattatcttgttcaaaaaaaaaaaaaaagtatagtttttgtatcctttaattttagggaataccaatcataagatacatgtaatttgaaaatctgtagtataaaatctgtggctgaggctatggacattctcaaaatccttcaattcagtacctataaattagcttaatgctattacggagtccgattaccttcatatattcacaataaatgcttggatcactcctattttgctttcattgactcggctaagtaatgaaatagaaacaatgaataatcagcccaaagaccaaaatctcaattatcaaatgaatacttaccaaataagcaaaaccaatctgcatattattatgttgatactataactattgttattattcacacgcggagccaattaatggactaagcaatcgcttggccccaatagtttcaatttccatttctatgaattcaaattgaaaaaaaaaaaaaaaaaaaatcgccacttccttccaaaaaaaaaaaaa

SEQ ID NO: 112483 - DNA, 3645 bp, Cannabis sativa
  modified_base (3328)..(3330): a, c, t, g, unknown or other
tgttgacacagcagccactaaaaccattgttgcaacaagtgccactgcttctgatggcactgctactgatgctgctgttctaactccaactactgatgctagcatggtccaggctcctacaaatgacaggttttactaatgcccctaataaagccaacaaccatcagatgaaaaccagatccaagtctagaatccacaaacccaaagtgttcttgatttccaaactgccttccaatattcaggaagccctacttcatgaacaatggaacaaagccatgagagatgagattctttatatataaaaaaaaaaaaaagctatgttctggttaagcttcctgcaggaaagacagccattgactacaaatgggtttatatgctaaaaaaaaccttgataacacagtatactagcataaggcaagacttgttgctaaagggtttcaacagcaagcaagctttgattacactgaaactttcaatccagtagtcaaatttgtcaccattagggtggtcttagttcttgctttgtcaaaaggttggacaattaggcaactacaacaacgcattcttaaatggagatttacaagaagacgtttatatgacccaaccacaaggctttgaaattcctggtcaatttcatctggtttgcaagctcaataaggctttgtatggcctaaagcaggcacctcgtgcatggtttgagaagctacatcacagtcttgtttcacttggctttacaccttcaaaatctgatcactctctcttcatcaatcaatctgctgaattgaccatcctagtactgatatatgttgatgatattttagtcacagagagtgattttatggctgttactcaactcatctctacccttcacaatcagttttcattgaaagatttaggcactttgaattttttttgggcattgaagtgcatacaacagattgtggtttgctcctatgtcaagcaaagtatgcaatggaccttctacaaaaagcacaaatgactggagccaagtctgctccaacacctatgaccagtgggcttcgtttgtcaactcaacagggggatccagtagtagatgttgagatgtatcgatcaatagctggggccttgcaatacctcacaattaccagacctgagttatcctttagtgttaataaggtctgtcagataatgcaaaatcctctcaccactcattggatggctgtcaaacgaatcttaagatacataagtggcacacttgaactaggtttgcatctcacaaaacctctgtcccttgacctgactgcatactgtgatgctaactaggcatcaaatccagatgataggagaagtacaactggttttgctatattctttggttcgaatctgattgcttgaagaagtaagaaataaccaacaatttcgagatccagcacagaggctgagtacagaagtgtagccaatgttactactgaactaacttagttacattatctgttttatgaacttgggattcaaatgtcacaacctccaaccatttggtgtgacaacatgagtactgttttactcactcaaaatcctatactacatgctagaactaaacacatagaacttgatttgtattttgttagagagaaagtgatgaacaaaatggttcaaatcaagcatgtcacaacttatgatcaactagttgatggtctgaccaaagccatttccagccagagattcttagatttcaaaaacaaactcaaaattaaagacctttcaattatgagtttgagcgggagcgttggaataaacagttaattctgttgtattctgttattagttagttgtgactgtgttagttgttagtcattctgtttgttgtaactgatctgtatataaaccagtgtacacttctcatttaataacaatatctttctgttcatctttttcagtctttctttctctccttcttcttccttttctttcttgattactctgttttcttcatgaactattgttaatggctagaaggttcaacaggccagtatctgaatactcaagcctctaaagcctatcccaatttgagcactataacagcactcaaaaaaaatgttgacttgattcttccttttctccgcaaatcaaacaatcagcatcattgttttgctcgcaactcttgtttttggttaggttgtggttttgtagaaaggtcagctcctgcttctcttcaaactcttattaatgccaatttggcagtttaatggattgaagcttttcaaaaaaaaaaaatcaacatcattggtgattccagccattttgtttaaccgaactcttatagcaaagccttcctttaagagttagccaaagaattattttgtgctttggaatactaagcctctcacaaatcaaagaatatctctaattaacatgctgggaattattcaatttatcacacatatcagcaattgtatactgatagttctagaattgcacctgtttaattctatttttaatctagttcttcgtgctgaccgattttctcccatactagctagcattcaagggagctttatatactcctaccaatccttcccttttataaatatagaattaattcatttcacccataaattactttttttagatgaaatttttcaaacatgcttacctattgctcctatattccgaagagaaatatctttaaaacctagcccaccacttctccttacctattgcattatgcattctcctctttttatattagaattgaacattttagtgttctcctctgcattaatacacactactataaatttggattttagaggtagttttttaaggcatttcaacgttaattttggtgaatttactaccgatactgatccagacgatgttgtagggctaaaaacaactaacgctaaatgttaccttatggcgtcaattattatcaaagaatcgacgctatatatacactatggcatcggttatatacaaataatcgacgccatatgcacatataaccgatgttaaaagcttaaaaactgacgccaaatcattaataattaatttttttcagttaaaaacttattataaatcaagaaatttaatttatttaaattatatattttaatttataataaatattatttaatttaaatttaaagtaaatatttttttttaaaagctaaattagctaatatacttaaattaattttatgattagctaatatatttaaattaattttatgattagctaatacatttaaattaatttaatataagtaattaaaaaaaaattacaattatatattacacaatattgtaaaattagtccaagtgttaacaagttaataaatctaannncaagttaacctaaaaaaataagctaggaaagaaaaattcttaaaaatttcagcatcaatcgtccaagccttcgtgaatcactaccaacaatcgttctatccattatccctgtaatggtaacaattcaatttttagattgtatgtctgcttttctccaaactgtaaaaagaaataaaaatttatattagtttatatatagaaatatttgcactaataactattattattaaattatttaagaatttacccttacctattttaatactcacaatttaggcatttcttttttataggtataccaatgtatatttattg

SEQ ID NO: 112484 - DNA, 3272 bp, Cannabis sativa
  modified_base (1300)..(1309): a, c, t, g, unknown or other
  modified_base (1367)..(1378): a, c, t, g, unknown or other
atagtttttttagggtttaaattattggtttagaaatcaaattttttgattttctaagtatagaaaatcaaattttcctaaaagaacaacattccttgaacattaaagtccaagaaaagaaaagaaatgaaaatgatgatgagtgaaaaaggggggccacgtgagcacgtgcgagttgtcacggggcccaatgagtaaatcatgtgcagaacagaccacagtacactcccacgtgaggaccctccaatgttttaattaattgcagactcataacattaatatgggagggggaccacacacacaccacttctttaattaactcttcacaacaattactccaaaacaccatcaattttaaaaaactatcatacatatcaaaacaaacaaaaagttatttttataaatagagcattgttaatagtggttgcccaacaccttttatatataggtagttattttattattggttagcgatattatttgaaaattattttttttaagttatatatatagaacctgatatttaattgcaccaataacaatatgataccaacataaatattaggcaccaataatttttttttaacaattcttgtatatataggctaaggacaacaaacttgaaaacacaacatgtaagtacagataagattagctcgaaaatatgacacattaaaagtctattaatttaattataataacataaataaatatttatttatcaattaaaatagtggtatactcaaattataataataattgtaattattttttttatataattgtgtaattattattaaaaaaaatataaggtaattaaaatgataaatacatatacattttagtatttagctcattaattataataaaaatataaaaatatgaaacataaatttgagcccacatgagaaaataaattggtctatttaagaaaaatagaccgacccgaataaagcacgacatgaatctgagcacgatacgaaattactagagacctgtaagtcgtgtcgggcctaccctaaaaaattattacacagcacgacatgactcattattttttttatagcacaacacgagactttatctcatacattttataattaaagcctaaaatatatgagtcaaactaacacacgcaaatatttacagatatgggtgtaccaaatatttttcctatatttatccgtactccacaagaaaaaaatgagcaatccttttccttttattattattttcatgggtaaataccattttggaccctgtgttttgcaaaacttatcaattggaccctctgttttgnnnnnnnnnnaaatgaaccctgtattttctaaaatggtaaaagtaagaccctgaattgattttttgtnnnnnnnnnnnntaataataatccgatctaaaagtgttatgacaaaactgtttacatatatgtttgtatttttaagtttgttatattaaaaaaaagttgtcaaaaattaagttaagggtcatatttgtaccattttagaaaatacagggtccattttgttatttaacaaaacagatggtccaattagtaacttttgtaaaacacagggttcaaaatagtgtttaccctattttcatttacatctttttgttctgaagtaataaaaagaataattagtatttttatcttttaaacttttaatattattcaattttactctttataatatacgacttattaaaaattttatttaaaatataacagttacataattattcttcttctgctagaatctatttcttttccagttaaaatttagcatttttatcccttaaattttgaccaatacaaattttgcccttttttattaaaaaaaaaattagttttagaaattataatattctattaattctaaaaaaaattaataaaaattattaaaaaacataatattaaatttactttaaaaacctaaattattcccaaaaagaaaatatttttaaattttagtttatttataaacacgcatctcaaaaaatcaaactaaaattattgaaaacccaataaataatttaaacaaactaatattttttgaagaaaaaataaaacttatttatatttataaaatcatatcttaaaaaataaagaaaaataattaaaaaattaatgaaaatataaaattattttgaaaaaaaaaatagaaattaaactagagaattgttatgtttatttgaacaaatctaaattttggagaaaaaaaatagactcaagcttgttcccgtaaatttagattttacaaaaatttatttttaatatatatttttttttatatctaaatgtattttttaataataaataaataattcttaaatcgcttaattaattttaaaattttaattttcttaatcactcaaaataattttctttttttaagatttaaattaatttttttaaaatttactaaaaaaatattaaatccttctcattttttatttgagggggtacatttgatagttgccaaagtttagagagcaaagttgctaattaacaaagatatgtcaacatttaaacagaataataagacggaacctaacaaaataactagatttttgtaaatgtaaaagtttaagagtgattcttaacaaactgtgtattttagagatccgaatcagtattgtcaaaagtttagggagtaaaattgttaattattctaataaaaatgagcatatatttcgagataccttagtatttgggataagatattacatggagttttatctcaaaattaattgataaaaaatcaattgataataagaagagtaactcatttatcttatatatgacaatttatttatataaattaacaatatatattaattaaatatatatttataggagagatgaggtacttcaatccaactgtaaattaattggttgatgatcaatatttatctattaggtgagcattgctgtatgacataaattacatcacttaatctctctagctaatttttttttgagacataatctctctaattaaatatacatcatttttatagtttgagatgtatatatggaaataacatgagaaaattatgagaagaaaatgccaatgaaaaaaggatcattgagtcttatgaaagtgtaccatatataagaggtgatacttttttagtatgtggttaggagtatcttattatatttccagcattatatatatatatattggtaattatttaatggttacatgtttattgtaaccatatggttacatttttttttaacctgtaatagcaggttactaacaggt

SEQ ID NO: 112485 - DNA, 2425 bp, Cannabis sativa
gtacattttccccacgggaatggggccccgcagagatttgcccctaatggggcggggattctccgtctaaatggggaacgggacagggacgaggattactttttatccccgaacgggacccgtttagtattttatcttatatttctagtaatattttatattttataatttatgtttgtatttttttagtatattagtatcttatgaattttaagttatgttttagatcataattagtttattgaataataattaatgtataatattttaatttttatgtattttaatatttttatatattaaaaattttattataaactttatttttttattaggggattccccacttccccattagggattctccccgcgccccatctccgatggagaataagtgggggaatggggattaaaatccttaacggggatagggatgggggagcactccccgccaattctccgcttcgtgtgcatctctagcctctaccatactcattgctcctcccatttttttttaaaaaaaaaatgtagatttttcatatattaatgtgcgaatttgtatatgttcttgaaattaattggttttttggaaattttttggagataaattgagtttgtagagctgtttatgtgctgttagctttttcagtgttatcgatgaattttcgataaattattaatataatatcgattaaaaattgaatggatagttgatagttttaacttaactgtttttttttttcaattgttttaaatgtttattgataacacattttatctatggttttttgatggtttagctgttaattaattttttgaatgtcatgagtttatcgataattttacttaagttttgttttttttttaagttttgaattgataaactcaaacttaaaaaattattaattgagtgagtaaatattattttgatctgattaaagaaaaacttgttacaattctgttttaaatatcaatgtttcgtataataaattaaatatttttaatggaaattgctcttctttttgatcacttcttcttctttttaagttcttatctcttcttttccaatctctatttctctttgaatttaatgagaagaaaatatattgttaaaaaaaaaaaacacctgagcaagatgccaacacggcaccacctagctatattgagtttctttaatttcaaataaaatatataagatttcactactcaattgcactaatattgaaaaaaaaaaaaaaaagaattgcactaatattgcttaggatgtgatttttcattttttgctttaatagcccaaaaaaatatagaacagtacttattcaaaagaaagaagaaaaaaatagaacaattaaaatattgtactccaacaaagaggggtgtgagaatgaaaaatataaataaaataaatctttattgagacaatagttaaaagaaagcataatcataaaatacatatcaaattatatatatggattatataataatagcaattaggaaaagtccactctctaagtagatctattttaattttataaacaactttttctgtagccttttcatctaagcacagtaaaacagcagcatgtgataagagaatatatatataatatatctaatgtattatgaagaagaagatggtgaagtttagtgatattaacagaggtgccaccccaatcaaatcaaaatcagattttggcagatgccttagcagaaaaatagagagacaaagggattcctccatgcctgaaaccctactgcatttgccatttggaagacttgactttactttctttctctttttcttctcaagatttttaaatctttaattaacacaataaagctctgagatatatatatattttttttcagttggggtaagatggaaagaaagacactaaagatggaaaatgttgtgataaaaaaggtaaatcttttttctcttttagaaatgtccaaaggaaatcattgtattttgattaaatattaactcttttcactctaattagagatattaaaaagggataatgaccaacagcaacaaaaatccttattcagtcaaaaaatcaaaattattttatggggtgatctaagtatataaattttcaaaatctatttatataatagaataaaatccctatttaaaagaaatattaaaactcatcatgtgatatttcctattttatctcatacaattttttattttatgttgccactacataaccttaccttagccttacaaaaataaaaaaagaaaattacagggtatgaaacgaaatctataaaggtataataccacaaagtagggttgtacattagtctgcttagtcggtttatactacatattttttttaaaaaaaaaaatcttaacccgaccgacggtttgggcggtttggtcgggttaacctgcccaaaccgaaataagagg

SEQ ID NO: 112486 - DNA, 4862 bp, Cannabis sativa
tctctctctctctctcttcaaattgttcttgaaaaaaggaaaaggaagctcttcatcttccttaagagcctgacgcccccaagtctccaaatcccattattttcgcttcattttggcaatccaagctttccacaggcatcctcaagagactttattagtgggtaagctttcaaatctcgttctccacttattttcttaactctgtcattattctgtttaagctttttaaagctttttatattcttgattctcacgttagattgtaatcttttttgcattatgatcacatgatagctttaggatgcataatgtatgatttcttgatgaaaaagattcaattttgagcttcgttttgattcttgactctttgagtcacgaaaaatacgaagaacatgtccgagtctttgaaaaacatatttttcaatccatagagcaccctggtcggcctataggtcttgtttgtgacttggacagcacacggtgtcatatagagaggttggccagttctagggtttaacctagaatcttggctgattcttacatgggtcagggaccctaaccggcacataataatgccttgggaccctggtcgacacatggcttcaatcccaaagtaatggccaattttttgtcctcttttgactcaagaaagaaactttattaaggccttatgagcttgttcaacccttgtcgaatactttgatttccttaggaactctgtataacacttcttggggtgagtccattgtagttaagtaatcaacttaagattcaattttcatccaagtggttgtacttggaacccatactttgctgattcccagctttgttcgatagaactgtctggctagtacttctaggtttcgttgaccagtacttcatctaagtcttgtcactttgttctgttgctcaccttcccttgtcttttgtatgcagatgatcccgcgtgacttttgcgaaggtgacaatcgaatagacgaagattttctcagccttatctttggagaccatcgtcaagctggttcttcgagtagttccttgagtgatctcaaggtttgcagtggttccacaaagcataaggtctagcatcaccgacattcagagtgaataggcaatgaattttatagccaatatttttgggagcttaactaaggtagaggcaatttctccctaattcgtggacttgcattatctagtatggtgtgcctcactggtcgggcaacttcttcattgatagatcttcccactgcagagactgcaatttttgttgctagaaactcaaagtctatcatggcaaaatcattttataacaaaccaaatattattttaatttttagcataacataattaataaataaaataatacatcacattagttaataaatttaaaaaacgagattattacaacattgctatttttttaaagcctcattgctataatttggtaacaaacagatacaactgaaaaaaaaaacaaaactagaattttttacatattttactccggcaaagaaactagtagagatccaagaaaaccatacacagtcacatctgtttggagttgaaaagcagagaaatgtcttgacacaactggcaagctgaaaaatgcgattcggtggttctcatacaacttcaactgtttgtccattttttgcctattttttcccttttgaagaaagatacaaaaccaaaaaagataaaaaatgttactacatgcttggctttagtagaaaataaaaaatattacttgaaaatatagtacctgattgaatgacaagctttaagaccagatagggctctttttcaagtaaacactaggagctaagattgtaatattggtgcgctaaactggcacagagagaatgtatcagaggctacattactaccattcttttttttttgcatattatctcgatgatgttgaagatataactccgacttgtacaagtggccgcccaggaagttttgtgagttccaaacttccttgaagaagggctgccctttcagggtttaaaagtaaaagctgctgcatgtcctttggaagcacattgaacaatgctcgtaaatctccctttagtttttggtaagtggatgtggagttggagtctccacttgcctttccagattgctgcagctaaacatcacatgtaatgtgttagaaagtaaatatgagggaaccatatccacaaacattaaagctcattaatataaatttactcagtagtctacagtaccaaattagtgaaaggagattctaacatataagatatcccatagagattcataacataataacaacggtaatttcaaaatcctaagagacagcacacttgttgatctatactctttacttggagtaaaagtgaaagagaaccaggaggcacataacaagtgcaagccactattaagaagaatgatttacctttatgtctccaataatatgcctttcaattgcattaaaggaatcaactacttccagttctgacatctttgatataaattgttgtatgtcagccttcactcttgcatgcctccacaatctatgttgttcttgttcagcaacaacacgttttctttgaaaccatggcataaagtttggtcctttcaaaaatcgtctatacaaaaatgtaaaacattaaaatgtcaagcataaacatccatcatactaaaggcacaaacatattgatgataaatacatgtgtaagaaattacctatacaagtccagccaattatatctcatcctctttgacaaaaacttccccggtcctcttcccgataaggttgctagaaattcatcagcattaaagggggggagaggaggagggtccaaaaatggacaagaaccttctgatggtgtgagagtcctaaaatgagggccaaaaggtgccaagaaattggtagtgagctccaggaaatgacgccgcagaatctcattattaaccactgacattgactcttcaaccctgggtgatgtgcccgcatctaaaagcctattcaatatagcagtgtctggcttggttgttgcagcataagtggtccatatggcttctttatgttctgtcatgagacaaagaggaccctctctcctcaacttcacagcatttaacaaatttgagggagagaattttttcaaggagagctgttgaagaccaaatccttcagatttaccaggaactctgccagaagaggacctattatttgaagcgggaagacggtttgaattaggggcaggacttccaacggaaacaatatgagggatgttgcgcaacgactttaggaaaaagagattagtcacacccaaaatcataggaggaaacatatctccttctcgaagggaatttagttgagcaaattctgggttatggatggtgaaataaggcctaaaatcaacactataaagtaggggtgcaaccaaactaacaagactagccacagcttcacagcattgtggaggagttggagcaatgataagaataggctcgccaacaagtaacaactcccacaaaacccaaagctgcaaaagaagaccacgaaatgtaccaaaaatatctgaatcatggaataggccctgaggaactgactggttattaggaagaaatggagccaaagaagaaggagattcttccaaaatcattccactttcaaagggcatgctgtgagcaggcggcaagttaactttaagcatggcattcccaattggaagctccataagctttccaggtacaggtgcaggccacattgacacataagcagcaatatgttcaagagctttctttccaatgtcaaagtataaaggacccatgatctgtaacaagggtttaaacacagtagaatacggatagctagacaaaattaccactgacttctgctctccacctctcttcaacctctcatcatgtctctctctattgaatacatagccgtacatgtattttgaaccacgacaaatgttacttttcaatcttctaagagttcttttttctgtgtttttgggagatgactccttatctacagcagttgtttctgtggaagacacattacaagtttgagaattctccgatctttgaaaccgaaaaaagaacatacaatcatgaatgcttgagcggttctgatgctgggtaacagaatctgggaatgaactgaatgcaatttcaagctcctcatcctgggtaaggcaaccaggtgggtaacactcttcaatgagctgaccctgttcaagatcaaacctaatgatgcaaaaggccacaacccattgcctcaaggattctggatcaagttttggactaagttccgacttcactgaaaatgagggagaccgactcatttcaaatactttcaaatcacaatgtcactgactaaattccattttcatgcttttccattaccatctgtagtaccaaattactgaatccatcccttacaaaagctgaaccaaattttccctttgaaatttctccacttaaatacttgtgaataaggctattcaaatcctaacaaatacattcagaataataaaataatgttcagttgaaaagtgaaataagtaaaaaaaaatgcttcataatttatattaatcctactcgttagaatatagagaatgtgaaaaaagttagaaacttaaatcaagaagttctcttttttctaattatcaattgggtaaaacaaaaaaaaaggcacatctaaaaactgagttgattcaagataaaacattctacttttttttttcaacaacataaaatgaacataccccgatacaccaaacaacaataacagcacaaattgagaatgatctaataatgggttagtctaacccatttacctgaatttgaaatcccaattcctgaaaaaaaaaaaaaaaaaa

SEQ ID NO: 112487 - DNA, 2748 bp, Cannabis sativa
gaaggtcaacttagggatttgcatgtatttccttttctgtcctttgtgttcatgttgtacttggacttaatatcagtgtaagtggaggattaatttttaacaagatatgttgatgatgatttattgttgaataaacccttaatccttgatttttctccaaaagttaataataataaactctttgttgattcaaatgaagagaaaaattgtgaagaagaaaaccaagatcaatcctcaagcactgctcaagcattactcaatggtaataatttatttataaaaataaaattaaagattgttacttattcgaagattaaaaattttatagggatttttcatgttcgtgattttaaggtacaagtttacaaaatataaaaaaaatacatacatatttaaaaatatgtggcaaaaacagtataatgtaactaattaccttaaagaagtaaccaaatattctctggttaccttagggtaactagtcaccccttatttatttctcccttattattttaactattttttgagttttttttttcaataaaataactttttttgcgtggttcatataaaaacacataaaatttataattacttataattttttgagcatttatgcaggaattaatattctttgtggtatggggcttcttacaaccccatatgccttgaaagaaggagggtggctgagcctcacagtgcttgtaggatttgctattatatcttgttatacaggtatattattacaacgatgcttagagaccgattctggtctcaaatcttacccagatatcggtcaagctgcatatggccgtgctggtcgcctagccatagctgtaagtattttgactaaaggatacctatagtgtctactattatcaatctcatttattgttgttatttttattgatgcatatttaattaaaataattaaataaatgataaacttgatattaagttgtaccaataaatcaataagataagtactaatatatttttggggtaaattttgcagattgtgttgtatttcgagttatatgtgagtgccatgcatgattgttaattaatgttaatatttttattgtttctattattattattaattattctttgtttttatttgtagggtagttgtgttgagtatataaccatgattagtgacaatgtgacatttgtgttctcaaacaacatctctatcatgagtatcttcaatggaatatttgatctcagccctcatcaaattttcgctattttagcaactctagtcattcttccaactgtttggcttaaaaatcttaccctgctctcatacttctcttgtaagtatatatatatatatataagatatgattatagtagagacattacttctatatatatagggacatttgtatattggtattttaaaaaattgtcattcaatttttttatataacggtcacattacaattatataagatataatatgcatgtttgttttttaataaaaatttgaataatttacgatgtcaaaaagtttatagattcagttgcacgtgtgtttgtttctttttgtacccatatagctgaatgtttttgaacccttacattcgacactataattattataaattattttgtaattgtttctctaggtcctaaaaatagagaggtccctattgtggtaaaaattttcattattattaaaagtattattttgtaattgtaataatttgtttagtcttttattttatttttttaaaactttaatccaatgatatataattgtagttggaggagtagtctcaacaatattagtgatactatgcttgttatgggttggtgtggtgaacaatgttgggtttcatgggcatggaccactatacataaacatagcaagtttgtctaccacaattggcatatatggttatgctttctctggccattctgtttttccaaacatctatatttcaatgaagaaaccctccagatttccatttgttttaattggaaggtaattaattaatgtttatatttatgtttggttatatctaccataacacttaattaagtgttatcttatgttattggatgttgcagctttattttctgtagttttctctatgttggagttgcggtgtgtgcctttctaatgtttggagactcaactcaatctcagtttactttaaacatgcctaaacaatttgttgcttctaaaattgcaatttgaacaatggtatatatgcatggttttcataattatatgtataactatttatagtacaaatatgtttcctattatttttcttgatttaatttgaaaaatagtaatgaattatttatatatttacaggtggtgttaccaataaccaaatatgccttgacactcacacctgtgacattgggtttagaaggacttttgccaatggctttgagacaatattatattgtctccattatctttagaacagttttagtcatctcaactttgattgtggccttgactgttcccttctttggtcagtacacctagctagacctatctattaatttttgacaatttttcttactatatatatagtatttataaatagaaatttaaaaaatattaggtaagagtttcacacttgctcttatattacaatagtgtttcatatttttgttatatagaaatactgtttattttttttttaagaaacttataaaaatactggaatttgagttaagttttacaaaaatactgtcacacggaaaagttttcaaaaatactgt

SEQ ID NO: 112488 - DNA, 1965 bp, Cannabis sativa
  modified_base (28)..(43): a, c, t, g, unknown or other
  modified_base (1923)..(1930): a, c, t, g, unknown or other
ttagggtgttaatcaacatacttatgannnnnnnnnnnnnnnnggtaaaataatttccaacagcagaggaggaagatgagaaagaaaataaaccctaaaataaaatcaagaatacggtacattaaaccttaaaataaaattccaaaaaacaattaacatcatcaaaatcaattaatgagtttaaacaaataaatcagataaaataagaataaatcaaaataataggagaggagagattagaaaataatcagcaattaagctgtcacatcacctcttcaaaacactcatttatatatatatatattgattgattttactaaggaaggacatatttgagaagaaaagagaatttagggtttattattaattaggatacctttgagagtttagttaattaatatattaaatggtaatattgtttaatagttaattataattattaaacagatgaagttagcatttaaataaatagaatagaaaaatggcaattttgaagaaagaaatattgtttcacttttaaaaacaaaagtgtcaaaattcaaatccatgggccttgatgtataattcgaccaagggttgatattaaaagcaattttattttttattcagcccatttaattctaaaccctaaacctaatgtctctctctaaatataatgtgatagcctttgattgatgagaccaacactttagactctctcttgtctaacaaactaaataaaaaaaaaaaagactttcttattctcattatatttttaaatttctcttgagttttcttcatcaaattttatgctccttagaattgaaaaatcgcccacacatatcaaagcaatactcaatatagtgagaaagaatgtgtagttcaattatcattagaaggagaatccaggttcagatcttgatcatactttgcaataaaaaggatcagtggttagagatctgaacggaaagagtcataatattatgctacaaccaatgtaaggatttttacaactcttatgtgtttaattcattattttaggaaaatcatatttaggatgttagattatagaattataatccaacatacatgttagtaaatctaaatcctaataaaatatttccaacaagtatgtcttgttgtagttttctcagttgtccaatgggcccaaagtacttgtggcaattcatcgacccatcttccctttgctatgtcaagcttctttttgatagtatctgttaaggttttgttagcttctttgacttgaacgttagcctgtggttgtgaaattgacgagaagattttaatgattttattccactcgcaaaaattggtgaataaatcactgtcaaattgagttccattataatataatatttaaatgggtattccgaactgacatattatgtttttaatcacaaagtccaagattttctttgaagtgattgaaactaagggtttggcctctgtctatttcgtaaagaagtcaattgcaaatattgcatattttgcacctccttgttctgttggtaagaaaccaatcaaatctatcccccaaattacaaacaggtagggcgaggccataatgtgaagttttgttggaggtattcttggtatatgcaagaatctctagcacttattgcatttctttacaaactcatgtgtgtctttattgatggttggccaataatatccttgacgtattatctttttagacaaactttgcaaaccaacatggtctccacaaaagcctttgtgtatttactaggatctagatttactaagatgtatgttgtttaacaccctaaatatgaattctctaaaacaatgaaatttaaacacatataaagttaagaaaccttacattgttcttaacttgttgtttagcatgaaatttactaagatttactaagatgcagtagaataatatgtctccttccactnnnnnnnntaacccttgttcctttctgtcccagagtattatca

SEQ ID NO: 112489 - DNA, 2167 bp, Cannabis sativa
cctgtgggatcgacctcactcctcgtgagttttactacttgaaacgatacgtacacttgcgtgtgtaaaaatatcacaacaacgagccacaataccatagccatgcttaccttcacttacagaaatagctttgtcaacattaactttgatattagaaaaataaagtatattccaatgttcattaacctccccctcactcgttgtttagtttgaggaaggaacctaatattttttctgagcattactctattcttgaaagttcagttttgctaacgtaattatctcctcaatcgaagaaactttggcttcccaaataagatcattgcagtgcttcataatcgaccaaaaaagaatggatacttctcttgctttgacagcataccacacctcaaaacctgcaactaaccatgcaacaaaagtcatctcagtagctcttactgaattgactcacgagcatttccagcagtcctgagcaaacgaacactgaaccagtaagttcagcgaggtttcccaccattgttgcaaaaagagtaccgtgtatcaagggccacatgtttgagactaagttgaaattaagtaggcaagcattgagaacacactctccataaaaaattcaatacttttggagggattttcagctaccaaggttatcaccaaaactagaagtaacatctcaagaccaattacatttgacttcttgtaacaacttataagcacttttagtagaaaataaaccagatttttcttccatccaataccaatgatcctaatgaacagtagaactaagaggaaaatgacccaatgcttgatgagaagaagtgatataaggattctcctcatcaagcaactaagggagtgctaaaatactaacactactacctaaccccatactgcacataacacccatctgaaaaacaatcctagcctccaaaatacttcgccaaatataacttaaattttcgccaacctccactgtaaaaaaaccctcgagaataataacaagctctataaatttaccaactaatccttcaagatttatcaacaaacaccatccttatttatcaagtagcgctaagttaaaatcacgcatgtctctaaaccccattcccccattactttcttgtctacttagacgcttccaacttatccaatgaatacttttcttttgcgaagcattagaattctacaaaacatgctcataagtttttcaatatctcaacacatatccataggaagtaagaacacattcatagcataaggtggcaaagcttgcacaacagatttaaccaagacatccttgcctgcacgagacaataatttaccatctcaaatttgaattcttctatgcaccttatctttaagatagccaagaattgtatttctattttttccccaataagctaggcaacccaagatgtttgctattattggtagcttctacaattcctaacaaagtacaaatatgagcacgatctaagccaagtgtatttttactaaagaaagtagaggatttagtaaaattcaccttttaattcaaagccttctcaaagatagcaagaagtcgctgaacataataaacctccttatcagtagccttacaaaaaaacatgtagatatcatcaacagatagcatatgatagactactagtgccccatttgccactttacaactgtttaaccattcatttgctcgtacttccaataggagctaaaaattcctccgtacacaccaaaaaatataaaaagaaataggatccccttgacgaataccacgagtaggaacaattggacccaatgcatgatgcccactcaacactgtatactggtgagaagccaaactttagaaaattagatgaacccatttatcatcaaacttagaaagcatagcatagagatacaaccattcaaccttatcatatgctttactcaaatcaagcttcaaagccatgaatccatctttgccgacttgtttacgatttaaatagtgaagaacttcaaaagaaatcatgatgtttgttgacctcgcttttagctaacgatagtgagtcaattaaagcgattaaaaatgattaataataataaataagcaaatagaacacatagattgttatagaggttcaaccttgtgatagtggtaatagcctactcctttttttttttttttttt

SEQ ID NO: 112490 - DNA, 10240 bp, Cannabis sativa
ctccctttatatatatatatatattgatattgatgattgatattgatgattattttctaactgttgattgatgtaatggacatcctcttcaaaatattgaaagttataactcagttattgagtttcaataaatcacttgggattttaaaatactataaatgtatttcatgggcgagttaccatataagtgactctaggtgttcttgctgccctttcaaatttatttaattcccactctcccattttgattggatcttctttgtttactgtcatttggttgcagcacatagagctagtttctcctactccacctgctgccgaggtctcaacttttgacgtggtgggtcctgtgtgtgagtctgctgatttcctgggaaaggaaagagaacttccaaccccagcccaggtaacaattgttaaacttgaagtaaatgatcaaaactcacccatattcggaagaaaatgctatttaaatattctattcatagtagttttccctttacttggcttttctgatataaagtttcactatgcagggagctggtctagtagttcatgatgcaggtgcttactgcatgagcatggcatcaacttacaatctgaagatgcgccctccagaatactgggtatgcaactctaacttaagaaaccatgtttaatctcacatacccaagaaaatgttcagaaaatattctactggtttacagtttggtttcgcattactgagtttatgtttatgtgatgcttattgctcataggttgaagatgatggttcactggccaaaatccgtcacggagaaacctttgaagaccacgttcgattcttcgatggtctctgatttctgacttttgaactttcattgtgctgtttggttaagatttggtttgcattggatattttatcaccataccatcaaacatgttgctctggatctgattggatgattaatttgagaattggaaagtgaaaaaagctcccaaatcatagggagctccaaaagggtagagaacaaaatgttgagaaaatctagaaaaataaaataaaaaatcttctgcttgatattatcctaatttattttattgttttagaaaagtcgttgccaaacattgcaatcaaagtacacaattgggatcctattcacataaaatatgcataatatgatatagttatatttataatcacataaattaaaatggaaaagtctcacataaatatattaattgggattatagtgttcatgtgtgtaaattactagtaaccttagctagcatcaaataaaatataaagattccgatgaggatttttaagtggtttgagtattgacaattatagtcagcattttaattatttgattcataattaattaagtgatatttattcagaaaagatataatggtatatttatgatatcttttttactatgaatatcactctaatcccatatttagataatatatttgatataagtttacttaatatcctaaaataaacattttactttgatacattttatttatccaagtgtcagtaaacaacgttaattatcacgtcagtgtaaatttaatgcactgataaattacgagattaaataatttgaagcatataattacaattatcttttactatgataaccactattgtgagtaactatatgttcagttcgagatttaatagaacttatatattaaacatataatcatgaaataaatatgtgaacaaagtataccaccaaaattttagaattgtgggttagttgcaaaaacatggtaacttaaggagattatgccgcaaattattcatttttaattggctaattaagatttttgtctcctgaactttaccatgtaccgaatcttgctccttgaatttttttggccgtcaaaaatttcccctgaattattgaaattgttggatttaaagattttttttttcaaaatttattcaattttaatgattcggtgattgtttgtgtattaaattatactttctagactttgatatctagcaaatcatgtccctcaaatcttaacattaccaaatcatgctccctgaatttttatccatgttagattttttttactaaaattagaaaaaaaattcttaaatccaaccatttcaataattcatagaaaatttttaactaccttaaaagttcaaaaaatataattttgtatatgtcaaaatttgacggtaaaaatttgaattaatcttttattttatttttattgaaataaaaaatattgaatttataaaatattggtgcccctaaaaagaacaaacataatatacacacgcacacacaacaacacaaacaccaccatctctctctgtggcggcattccgcgtcaaccgtgcttttggattttgttgagtttgtcagacaaattccttttcatttttcttttcgccttctctccattttctttttcttttttctattttattttttttttcagagaaaaatcacaatccaaaaacacaacaaaggaaaacaaatcgaagaaatcgatacccacatttctcaggtgtgtttgtagtatataaaactatttacacccatgtatcatcttctaaattacttttaaatttacgattctgctccctattaatattatatttcactctattttcttcaacagtcaaacccctaatttgctcttgccttttcgtacttcctgaaaatttgggcttcttaacttttgggggagagatcggtttgtggcctctaactcgaactttgctgcattttcctattattgttttatgattaactcttagttctggttcttagtttgaattgttagtgtagatcttttgtttattatgtttgaatacttgaattttcggtagctttcagtttccatgttcttttagtcattcaaaatgtttttttttaattcactggaggttttaatattatgggttatgattgtgttataattccattttttcctttttccttttttttttatttagtttagcttaatgaactaatacaattattacagtttttgcttaattagctaaatttcattttgggttttctttttcttaactattagaatttatgtttctcttgaggtccaataattatcgagttaagattatatgcccagatgacatttcttagtttttagtgttctcattattctcaatttcttcttaggtgtgaattcaatcaattgctttatgagacatttttaatttgcctttgccatttcctttgctttgtataaaatgtgttttctgtctgaactttcttgatgttaggacacaatgtaggattgctttttgttaattctcgagttcttgctctttgttgaactattttgttttttttttcctttaattgatgattcattgtactgtacatctacgaaaattggcagtgcagttcttgttttaaggtgttatctttaagttttctggggcaaaaggtttcagttatggctggtgaagctttgatcagtgttaatggcaatggcaacgacagtgtcaacggcaacgtgcagcttaatccacagaggacttaccaagttgttgtggcttcaactagagatatgggtatcggtaaggatgggaagctgccatggagattgccttctgatctcaagttctttaaggacatcacaacagccacctcagatcctgggaagaaaaatgctgttttaatgggtaggaaaacatgggagagtattcctattgagcatcgtccactacccggtcgcctcaatgttgttctgactcgctctggtagttttgatatcgccactgctgagaatgtagttagctgtggaagcatgacatctgctttggagctgttagctgcttccccttactgtctgtccattgagaaggttttcgtcatagggggtggccaagtactaaggttcaagatttatacattgcttgctgtttttctcttccgctttaccattccttctgttttcaattgatcgaaattcctgttttcagggaagctcttaactcgtctagctgtgacgctatccacattacggatattgagacaaacattgagtgtgacacatttatccctgctattgattcttctgcatttcagccttggtactcatcatttcctgcggtggagaataacattcgttattcctttaccacttatgtccgtgtgagaagtcctgcagttgaatccttaaatgaaaatggtgacctgaccattgatggtaagccagatattaataagtttgaggttaagaagttctctttccttcccaagatgatttttgatagacatgaggagtatctctatctaagaatggtacaagatatcatctctgatggaaattctaaagatgatagaacaggtactggaactttttcgaaattcggttgccaggtaatgatcaatctcattagttatctggttatgtttatgtattgttttggaaacaacataccctatatttttcttgttctgtgtccctttagatgcggttcaacctccggaaaactttccctcttctaacaactaaggcatgtattatttcccttttgacagttcttttcagcagtagattgcaatcattttgtgcataatgtttttctcttcatgtgtctctttctgtaaggttgtaattctgaaaaaacagtaacgagatcaattatcatttacttaagagtaataggttgacatctatgttaatcctttgctcctcagaaagtattctggcgaggggttgtggaagaacttctgtggtttataagtggctctacaagtgccaaggtaatgatgttttattgaaaccctgatggtatgttggcatggatacttatcaataaatattacagtatatctttgattatattcacaataatgcttgcaaaatgaattgcatgatactatcaaaagatgatttataatgtgcacattggatgattaactatgagtttgttagaaatgaaatgatgaaagatgaataatgtataataaaatttgaaataattgacaggtccttcaggagaaaggcattcatatatgggatggcaatgcatctagagactatttagatgggttagtattagacatgccataaatgtatgtatgatatgctatgcgcttctatgtttcaactgtttatattttctatttcagcattggtttgacagacagggaagagggtgacttagggccagtttatgggtttcagtggaggcattttggtgctaggttggtggaattttattttaattcctgttcaaattctgattttataattttacagaagtcaatctctcaagtctatgcatctccttacacattttttaggtatactgatatgcatgctgactactctggccaaggatttgatcagttgcttgatgttattgacaaaataaaaaataatcctgatgaccgacgaataattctctcagcttggaatccttctgatctcaaattgatggcccttccaccatgccacatgtttgctcaggtggactcttgtagtagtataatttttaaatttaacttcactttctattcgtctttaactctcaaagcacatcctccatctcttctttgcagttctatgtagccaatggggagttatcatgtcaaatgtatcagcgatctgctgacatgggcctgggagtgccatttaacattgcatcttatgcacttctaacatgcatgcttgctcatgtttgtggtatgttattcttaaagaacatcaattttaatttcttagcatgaattacaaagattgtattatgtttacaggaatgtcagcaaagatcttgctgtttgttcttattttttaggttattgtattatttctccagttgagataggttgtattgctcaaaccgaaaatatgacaaaacaaccttttccaatattttgattcattatatgcaagtacttgttacaccattttactaatcttgcatgtttacaatctggggcctactactcctatagaactgtataatgtgactgaaaagacaccgaatttttttctttcattgatggacttttagacttatgagttgttggatataatattaaataaccttttatcttatacaggtctggttccaggtgattttgtccatgttcttggggatgctcatgtttaccgaaatcatgtcaggcctctacaggatcagcttcagaaactgcctaagccttttcccgtaagcacaatgatgtttaacaatagatttcattatttatttattttactgtgttgcagagcttttttttaatttttgaaatcctttaaacttgttgtgttgttctttaccattttgtgttcgttatgcttttgcagattttaaaaatcaatcctgagaaaaagaatatagattcttttgtggctgatgatttcacactcattggttacgatccccaccagaagatagaaatgaaaatggctgtatagtgcactcaattgtttagaaacacagaggctctagtttatttgcagacaacccttgctcttagttttaaggcaagtactcgattctctcctctactttattaccataataattgtctactcttaagactttggaatttttttatttggtcgaattggtgagaaatgggtaaggaattaatattagcaaagatggttgtaagcatttttgttatgactcagttaacatatactgcctttgtgttatttttattcgatttgtctaagatcaagactttttgtaatgtgtgatttttcaggaaaaagcaagtggaagtttatcttactatagagttcacacacattaataatgaacagccagttgatatggtactacaagcttgtttttatttttcgcaaaatgtagtgagaatcctttagttccgcacactgggattggtggttccaaggtgatttagtgtaatgtgcttctatcagagtgtttttggttttcaaatggagtcctcatttactttattacttactatgttaccaaattctttagtgtactgctatgcttatttcatgttccagaacacgaaatctcaggattttacctatggtggtgggatattcaatcatgttttgggttgttttagcttcctgaaaatggaagctaaacaagctctacccaagttttcagctattggattgatagtcccaaattacaatggattgtgatacaaaaaagccttaaaaatgattctcaatggcaatctagtcaagttcttggccttatacttgtttaactattatatatattattggggaagggattagaacttgaagcctttggatgaattgatatagtatgagtatcattaggctttgcttataaatatatctttagacttgtttaactattgatctgcttgttatttttttctttttctctttttgctttaaatgctttcgaattttggttgaatgctgaagtaaataactctggctggctggttatcctataaggtaggttggtataaaaaatcaggcttggaaaattgtatacacaaccttggtagaatcaagtctcaagatattttcttacaaatttatttacagaaaataactcatttttttttttgaagaaaagtcatcaactttattaattgcaatcattcatgattacatgaagcaactcagtagaaatatcgttgcttgtaagagtacgatcaacaataaaataagaagctcgagcaaacgagtgagcaacactattagcagaccgtttaataaaggaatgctaagtattaaattagcatctcggttattgaacagatcaagtaccaagtctacatcccaagcatattctccagtaatcatcaacgaactaacacattggcttaacaaggccgggtgagtagagattacttttggattatcaacatccggcagccaagaatcaagaagaacactcactgaagacccattaccaattcgacgtctaaccccttcacgaaccacatcctgagcttcaagaatactacgccagacaaaacttgggttgccacctaattctgccgagaggaagtctccattcttgtagtatctggctttgaaaattcttcccaccaaagaatgtggctgacacaagagacgcatatatctttatatattataagtgagttatttaatgggaatttatggtttaatataatttttttattccgttaaataacaataaaccctaaaatataaattagaccctcaaagccctaattcaattccaatatgaatttctcttccgccatctcgatggaattttcgttgaagaaaatcagtattgtttctatcgttccagatacctcagtttgaggattttgtcacttccttcttgctatcatctcttattaaaagtattacaaaaaatgctaattaagattttttttttttccgaattttgacatgtaccaaatcatgcccctgaacttgaattattgagattgttagatttacaatttcattcatttttacaattttagtaattgtttatgtagtaaactatgctcccaaattttgatatctaccaaatcatacccctcaaactttgatatatactaaatcatgcctcttgcactttatttaacaatctcaatagttcagtggaaatttttaagaaaaaaaaaaaaaaatccaagggcataatttagtacaggtgggaaaaaaaaatcctaattagcctacaaaaaataatcatctcgatggaatttttttagaaaaaaatcagtattgtttcgatcgttctagatacttccgttttaggatttttgtcacttccttcttgctatcatctcttattaaaaagtattacaaaaaataataagattccatatatacactacacatatttttctaaatttttctgagtcttctcagccatggaggtgcgagaacgatagagataaatatgagaagtgtgagtacgaactcatcatggagagaatgcttcagatgttgatgacccgagaaaaggtagcccaattgaagcaacgacaaaagcatggcattcctctcattcccaacactgttaatgccactttttttttttatcttctttggtgatcaaatttaatccatgggcatttgattcctataaaaaatcatttgtattcgattaattttgcaatttgggtttcttttgtagacctctggttatcatagttatatttgtttaggatttttgtttggtaaaagtgatttttctgaacattttaagtttatgaactacattagctaatgtaattcaaaactttatgaggaaatgttctgtttagaaaaattggggattaaataaaatggctttgtaattgattcctgaccttggtttcaatcaactttatatttttgagttcttctttcaaaacttgcaagaggagaaactgaaacggctaaagcacgaatgaaggtttattttgatgcttcaaagccaaatcatcagctgtatattcatgcttttaaaactagaaatttcctatttatattataagaacaatatgatttgtttctctgttgtctgttctaaaatgttttatagaaagaagatgatttgtttttcttctcatgtatatgatttagtgtgaactattcttctgtacccgtacctatgaatatgatcagtagtaagaaaaatttatgagaacaagaagcattgagatctctttgggctgctacttaccctaatctggagcttcatggcttgatatttgatcaatggaaagcaatgggtgggcagggtaaagatccatctatcgatttcagattaaaattaagcttgagtgtcatcctttacttggagcagaggagttggatttgtttcattggagaacatgttattctttgcaaagacatttttaataagaaaacaaaatactttcttaaattttataaaagaaaaggaaatataaaaaccaatgtactttctttgggaatgtccatgtgttgtggttggagtaaaatatcacatttatgatcatacaaatgcttgaccttgacaccagtaagtttagaaaagcaatatgccttaagaatttgattgatttaactcatgtaaacgtctagagtttctcataagataccaaaactaacaccattaatctataactatataaaaaggagaatgtgactttgggcttcccaaaataaattacaaaattgtccttcttttttctatctatatctataactatataatctataactatataaaaaggagaatgtgactttggacttcccaaaataaattacaaaattgtccttcttttttctatctatagcctttata

SEQ ID NO: 112491 - DNA, 3267 bp, Cannabis sativa
  modified_base (3217)..(3217): a, c, t, g, unknown or other
tttttttttttttatgaaaagaacacctttcacgttcattgtaattttgttaacaaactcatatttaatgtcatatattcattcattcgtaccaacatgtccaagcaacgttaacaagagtgtttaatttagtcctacaaacaattgtgcagtacgaactctccaacaaatgggagtgacaatgaaggcacaacgaaatctaaccttgtcttgtgactctcgatcctttcccaatattacctgtggaaattgtagtgacaactactgtcacattaaccagttgtacgtataattttttattttttctttgtattggttgctaagaaagttgtaaagaaaatattagctctttatatttgattgatatatatatatatatatcaatgtataacattattgattcaattcttttatatagacgcttgaaagacctcaatttgggaggcaggcttcctcctgaacttgtgaatcttacatatcttgatacggtgtaagtgtttattttgtttttcactagctagatactatatatgttatgcaaatccactaattgttctaatagtaaatataaaaatatgacatttattatgatataaattttgtataatttaaatttagatatttttattatgtaacatatttgcattattatttggtatatttttattagagtacatctttaataaaatgaattatattttacatttacatcacttattttattcaatttatataaattgataaattactccattaatgctatggaataaattactccaattattagacgtttttcatttaaatatttcctattctaacttatttcaataagctctcgcacatattttaagttaattaaagtaattttagaaattgatatgtagttgttaatgatgaacctctcgtaacttattgggttctatttttttttttttattattgttttggaatttttagtgatttcacgcgtaacttttttcacggttctcttccaccgatatggagtaatatgaagagcttgaagtccatgtcagtatcaatatatatttgattttattataaatttgattttttatgcttttgctttccttttcgaagctcactgacaaattcttgcacagttctcttactgccaattgcttatccgggaaaattccaaaagagtggggagattttccaaatcttaactacttgtaggtttgattaatttcacatcttacttttataaacaaatataattttatgttttttaattatgatttaatatctttaacttattttaataggagaattttaaagtacggttgttatttatcttcaaatgtaacgatatgtacatattataattatagcaagtatcatacaaatttttaaaaattcgaaataacaattatggtgtacatgaccaataaaaaaaagtagttacttgtttaatcaattatatactctattttcggcatcatacattataaaaaaaatgaaaaccggtagattgctttctagaactataatatacaccattaattatatatgtgtgttatgggtagaattagaaaaatttaattttttatgtttaatttttttatttaattaaaaaaaattatatttttacattatatgtgttctattctattggataaaaaaagatttcacttaaatattttgtatataaatgtatttttgataaaggcgtaaaaaaaaatatttttaattaaataactaaattaagtataaaattcaaatttctctttaaatttttttatagtaactacaataggagaagtgtttcataaacagaaaatgagtcacaattttcttatttgccaaaaatagaaaaacatagaaataaaagtgagatccgtagctactatttaatactttagttgccttattatgatttaaacttaatgtaaatgcagaagttttgaagcgaacaatctttctggtagtattcctgaggagcttgggaagctaaccaacctaactcacttgtatgtaattatatatatatatatatataattcgtttcggttttcatttatcattaaatacaatttgttgagttaaaaaatgtgtatatatttatttgatcaggttcttttcttcaaataagtttgtgggaaagctgccaaatacacttggaaatctgacaaatttattggatctgtatggttcacaagtttctgcttcttaatagtaatctttttgtacatatttttggatggtgttgtttgaaggttataaaactaattacttgttatttcttttgtcatatatatatgtatgcagtaggctaagcgataatagttttgaaggccctataccagaattcattcaaaacttcactcaacttaagaggctgtaattttcccttcaatctttctaaccttttattacattaattttacctattttgatatatatctttacacaattacatattatcattaatgaagggaactatatgcaactggactagaaggacctatccctgctgccatttttcaaaatttaaacaatttgactgatctgtacgtaataaacatattaattaaacagatacttatttttcaccatgcatgtgactttatctaattaatggtgttttaaatacatcttttaggaggatcactgatatggctggtgaaaagtctgacttatctactctaaaaattaacatcaagaatagtcctgatcatagtgtattgtaagaaacatgtctcttgagatatctcttttacttttcaattgttgatataacctgatttttattttcagggtgctcagaaatgtgaatttaactggaattatcccaaatacaatcgtgaatatgattacaggattaaagatgttgtaagttttaatcaaaactcttttcctttgattaattaattgctttgaaataataaaattatttagtattaattaaacgagatattcaacgacaagcaaagacattttatttatttatttaacacaattcccttgagaaaattttcaatatcctttccttttaaaaaatgaccagattgaaatagtgaaagattagtaacttcgcaactagggttgcacaccggacggggaattagcggggagtgctctcctcgtccccatccccgttaaggattttaatccccattcccgcttattccctatcggggactaggcggggaatcccctattgtaaaataaaatttattttaaaaatttaaatgtntaaaattattaaattacataaaagataaaatattacatattatttactat

SEQ ID NO: 112492 - DNA, 4932 bp, Cannabis sativa
taatcatcttcttctccttgttttgcatgaatcgatcgccctggtttggtgttgaacatccgagccctaaccctacggctccaaaactcacacaatgtacatctccttcaaccttcaaatttttggatctgatctgtgtgatttctggtctagagatatattcggatttatgttgtatgtgttctgttatgctctgtgattgagattatctggctttttatatctattgtagtggaatacagagaaaagagttagttacaaagtttaacagactttataactaacttgctgatctgtcttaggtatttagaggccaaaggccacctagtatttttaactgtgtactttttgataaatgttctggttaatatgtggttttatttcaacaagatccaatgaatcacgagagtttttaaatcaatgtttacttaaataaataagaatataatatttacttaatttgcaagattcacatatataatttacaatattatatgacaatcaatcaaataaaaaaaaatacaaaaatgaataaatataatttctataaatataaatataaaaaatttatttattttataaacatgtaaaatattttgattaaaaaaattttaaaccaaaacaagattatataaatatttcaaaaatatcacgataaattaatttggttaattttatcaaataggccaataaaaatgtttacatgatctaaagtaaaaccttgcctattaattagttgatcaaacatgcctattaatttagttgatcaaattgattattaaagtgtcaattaaaattttgattcgcatatgcaagtaaaaccttcccacctacacagctaaaacattttgtgatgaaaaataaaaaactttcatcctaaatatatatattttgaaaatcattctaaatatattgatgtacagtattaccaaatctacacaaccatataccaaactgaaaaatagctactcctattatataccatgtatcacatatgacatatataccaaataccaaactaatatatatatagagagagaggaccacatatgacataccaaactcaaaaaggctactaataaaaagtgacactagctactccctcacatttcaaacaacttagtaagccaagatcactaactaatacaattataatagaaaaaactaatataatagttcttttttgtatacatttcatcgaattatatcaaatcattatagatatcccttcaccacggttaatataagtcaaaagagtgttatgttggaaaaataattaaaatagaatactatcaatttataatataaaaaaagaagaagaaaattaatgttctctaataattcaaatgctgtacctatcagataggaatggagaaaaaagaaaaaaccaaaaatctaggtagtactttttctttctagccacgttcaagccaagcataaaatcatctcaaacgaaagaaaagcagaaggtgcatggaccaccaaatatagtaaggtccctgtgcataattaaatgtagggattgagtttgtttttagcatttttcaactatttaaatgtctgttaattggtggggtttgggagaaatcatgatttgatagatttaaattttactattttcatttagtttaaacattttattattgtttaaaatttcactacaagaagtattacttttgtcagcacaattcgttattgcattcgcaaaaataacttttgccaatacatttcatgaactgtgctggtaaaaagattaaagttttaccagcacataattatgctggcaaaacttatttttaccagcataactcatatttgcgttggcataacgtagggattaaatttgtttttagcattttacaactattaatgtcccttttttttttttttgatttaagcgtttatatattacatcagcataacttggaactcgaacccaggacctccaatacacacgcaccccctatggccacttgagctagcctcaagtggttctattaatgtccgtttagggtttgggagaaatcatgattttcatttactttaaacactttctttattgtttaaaggtttatgtgctttaatattttctaactcctaaataactggttaacatcttaaattaatagtgaaattataaatcccttttcaatctttaattatatacttcctctatttttcattataaatctcatttaactattaatttgagcgctaacaagaggaaaatagttaactaatcaaacatatagctaaataattctctttcatatcacacaaaaggatctaattttacaatgtaaaattagtaaaatactcgtaataagttaattctgtgatcattgtttgattcggaacattctattggggaaagaaaaagataaattagttaattaatgagtttaagaagcaaaactaactaactcacaataatatgtagtagtagcatgtaaatgctatacatagacatatggaaaaatatacgcagtatagattttaaaaattaggcagacttaaagtaatttgatgatactaaactaattattgacttttccatacacaacacagactacttgctttgagtgtgagtttcaattattgagtgtgagtttcaattatgtttggttatttttaataatctaataatgttgcttcataaattaagacagtttgttcaagttaatattttaaattgagctaaataatacgtgatctaattaaatgagtttaataaacattttattggacatgatcttctgtaacacccgatagtaaacttaattaagatttatatgagactctaattagtttgttatataaagaagtttggctaatctcaatcatttttctcctccattctcatcaattgagtaagaactcatagagagaagattagtatatggaagaccatatacccacaatctcatctcgtaactaatattatggaattaaatgtcttccattttattgattcataaagtaatcttaataatttgatatgattttaaattttatatatattttattcaaatctaatttttaacaaatggtatcaaaaattatgttaaaatattagagttaatcatattgattatgattattaaaattagatcaatatttaaattcatgttaatttaaaattttgattcatatgtgtcttataaatcatgattacatgattgttattgaattgataaagattaatatgttccaaaagcattcaggggtggtatgtctaatgaggtatctgtaaaaggtttcctattgaagagattgaaaaatattttgcaaagaacaaaaagaccgagacaagcaagcttttatttgattttatctagatgaggtgtaaaggaaaaacaaatattagggagtacattatggagatgtctaacatcacttccaaacttaatgcactaaagcttgatctctcatataaatttcttgtgcatttggtacccatatcccttcctgtatattattatgacaagtttatagtgagttataatactcaaaatgataaatggactcttaatgaactcatttcacattgtgcggaagaagatgatagattgcagagatgaaagactgaaagtgctcatcttgcagctacctcaaaaaggtaacaagcaaaagatgactcaagataagaaaactacagtggaaactttaacaacccaagaaacaaaagaatcatgatgaaggacttacatgcttctttttcaagaaacctggtcatgtgaagaaggaatgtcccaagtacgtctcgtggcgtatgaagaaaggtagacttttcacctttatttgttctaaagttaattaaatttatgtaccttgtaatacttggtggatagattctggtgttactactcacacaagtgtttctgtgcaaggttgtatttggagctcaatgccaaatgatcgatgctgaaagattcatttttgtgggcgacagcaagtagttctagttgaaggcattgtcacatttagattatcttttgagactagtcattttattcaatttaatgaggctaatgtactaccgccattttgaagaaatctgatatttatttctattttggacaactatggttattcttgtgcattttggaataataattagtctcttttaaattctacttagttgcgacaagttctttaattgataaacaacatatgcttagtaaaactacctcatctaatgaacccttgcaaaaaaaaaaaaaaaaacaagaggtacaaaatggaaaattatcaaatgagaattttatcaccttatggtacaaacacttaggacaaatctccaaaaagagaatagggagatttgcgtcagatggaatactttcactccttgattacacagaccatgatgtgtgtgtcgaatgtatcaaagggaaacagaaaaacattaggaagttaagtcccaacaggagttctagcatcttacaaatgatacataatgatatatgtgatccactccctacaacttcttggaatgacaaatagtatactatcacgtttgtagacaactattctcattatgggtacttatacttgatacatgaaaaatcacaagccttggacgtttttaaggcattcaaagcctaagatgaatattaactaggtgaaaagattaaagttgtcgagtctagttgtggtgaatactgttgtagatatgacagatcaagtgaacaatgtccaggaccttttgcaaaattcttagaggaatgagaaatcatcctgccatatccaatgccatggcaaccttgcatgaatggtgttgttgagaaaagaaacaaaaaaaaaaaaaaacttaagaatatggtaaaaagcatgatttatcatgctttacctgaatcactttgggaaaaggcatgtgatagtcagtaatcccgtgatccataacggaaaataccgggtaagctgtgcaatccc

SEQ ID NO: 112493 - DNA, 3273 bp, Cannabis sativa
  modified_base (27)..(31): a, c, t, g, unknown or other
aaaatagattacattgaaatggagttnnnnntagggcataaaacctaacagaactggctaaatatgctctagagttaaatggagatgtccgttggatgggagaaatttctcatcctattttcactattgttataaatgacttctaatttttaataacaatgatcctttctccaaaaaaaattaataaatatctaaaaattctttattcatatagaaatggtataatctaataaggtcatacaagagaattaagattatactatatgaataaaacaagtcgtagtgtattaaagtaaggaatcgttaacaatgaattacaaagtacggtttactatgcactatactctagtccatgtaattttgatttggatcacatattcatcttctatcgtctatggaactggcatgttctaactccacatgagattaattttctatgtgatttgaaaaggagctccatccacaaagaaaaaggcttccaccatatccatcaatttagtgtgtacattgacaacatcactaagagcaatcttaccatatagagtatttctagactcctatcatcctttaaagacatgtcaccttccaaaagtctatcccatttaaatggcctactccactaattgacatgaacggagagcatatgccaggatgactaacattgatttgtgggagagaggtgaaatatgttgttcattaatgataaccttcgtcgcatagggctgatagcgacttgttagtgagtgtatatttttgaattgctaatgattcttggacaattccctttgaaaatgaaaaaagtgggcagagtggcaccatcattgggtcaaaattggtgtcaaaagatgatggtcctccttgtaatgacttagattattctaggagaatatctatgtctctcgaccaaaatgatgatgaagttggttcttgtttcacgagattttcaaaagctgattataattatattaaaggtaaataaatagattaaaataaagaagactagagatttttctgtggttcgagtattaacgatctctagtcgatgagtaaatattattattgctagaaaatcttttgagtattactgtaacgtcccactcagaggaatgcgacgtgccataattataatctactacgccacgtgtcgtgattataatctactaaatctgttaatcgggggtccataaatcaagtgatttaaaacaaatattgaactcagataaataaataacttgtaacaaacattgatgttttactataaacgataataatttaaaattatacatctaggatcccgtaaaaatttgttttcaaaatattataagttaatttgtacaggccgacctaagtagcaaaatagaatttccatacaattcctgttggacccaaccctcatggtctagcttggccataacatgtacaagtcatcctcaaagtcctcaatctcatggttgaccaaacactattttacccttgcctgcacaatagagcacttatgaggcaaggtcaaggaagatagaaaataaaacattatgataattataataataattacactttaaacagtatgccacaacgtatatataaattgtgcctctgcactttattacattattctatataacaatgtcactataataattttctatgtagcatagacctatatgttacgctcacacgtcttttacatttaaggccttactagggtttctctcggttataattactgagtctaacctggttatgccttacccgcataacactacacagatattcatttaacaaattattgcaatattataacaatacatacttagggtaataaccctagatcacgatttattagcaatcaaatatcatataactgtaccaccgcactatactctatgtgcttagtttgctaccttacttgatttctaaagtatgtggagaaatctcgatcccctggtgatttgaccaagcaccggtaatcctagtcacaatccccgagttttacaactagggttaaccccctaaaaattgcattcataatattcacaattaagacgccaacactagaccaaataatagagctcgaaacgagctttctaacaatataaagaacgtccaaaacggaatttggattcaaatgttaagcacaaaacaaaatagcaaaaaaatattaaactatcaatcccatggttgtgacaacagttgtggtggtcgcgactagaacctacacaggggctcatcctctctagttttatgctaggtcgcgaccaccataaattggtcatgactaatgggtttaaaaacccaaaaaaagcccagaaaatcataattttcccaaaaccaacttaggctaatatactccaaacttaccaaatcattagcaaacaaaattcatgccaaactaaggtgttttccaagcatctcatagaacacaagctagaaaatacaccctaaaagagtacaaatcacaccccttatgccatcattttcaaaaaggaaaaaccaaaagaaaatcatgcttaactcaacaaagaccactaagcaattctttacccaatataccaataaccctatctgaagttagcaagaatctagaaataagacccaaaattcaagttcatgttcatctaaataaatcacataaatattcccaattctaacatgactttactaaagaacatcaaacaagaattataatcacttcttcaaattaaacacatgcatatcagcttcaaattcaacccttttagtcaaattaaactagaaattaaaggagaaaagctaccttaagtgttcctcaagcaacactaatcaatttcccttaaaaagacttcaattttcttcaaagctcatcaaaatcataattttggaatatgaaagagagagggggtcggttgagagagttcagaccaagaaattggtgttctattttctaactcaaccaacaaatggcttagttcaatcctttgtaaaattggtcaaaagactattttgcccctaagacctataaaccacataaataactaccaagggtacttttgacacttcatatcacacatataattcataattacacatatatatcatgttattgccctaagcacatagctcataaaatttggacctagtacccaatttgagtcaaaatatctgattgtgactataccgcactaacttgtcaaaaaccacctccagtaagacaatatgaacatactatataattatatagtccattagtacaatatatatatatatatatattgcattttgaaaaattgaagt

SEQ ID NO: 112494 - DNA, 4320 bp, Cannabis sativa
  modified_base (4256)..(4256): a, c, t, g, unknown or other
ttcttcttcttcttcttctagcatcaccaccatactaacaactaccttatgtatcagtagcggataaggtgcttccctgagagatatggtggagcttttttgggtcgaagtagtccaaaacaacgtgaaggctaagggctttcttgataacggagagggggtgtttggctgtaagggaggagagagctcagttactcaggacaaggacgattagtgtttggcggctattgatttcatcgctgagctttgtttgggataaaaatttattgtaatcactatactctgggaatccagagaggattttttgtgatgttgtgggctgaaacgacggcgtttagggcgaatagactaagacagaagatgagataatggtttagtgccccattgtggggcgtaattttgaattgtaattttgttcccccgccagtggccacccgatgatcgagaccccctggctcaagctctccatcaccgaattccacccacaatggttcagaaacgcacctgtagacttatgccctaaaatgtccaactggggcgcccatttccgaactaacaacccacaattcttctccttggctcgctcttcgaacccttgtggcaaccactctagattaaactctcctttcaaatcaaaacccttcggaggccttatgacccaaatgaaagtttctcacttttttcctgtccgattgccaattccatcatctgggttgctccgatcgtattctgggaaccaaacgtaatgtacagaacggacttaggttcttgtgaatcgagccactcgaacaacttgttggctgacatactctctttggaaaaactgaaagaagaaggttgatggtggtgatgctagaagaagaagaaggaggaggaggaggaggagtgcgtcaggatagaagaagaagaagaaagaaaaaaaaagaattaggattttttttttaatttttattttttttaaattgtttttttaattttttttaaaaaaaataattgtttttattttttatttttaaaataataatttttttttatttttttaatatttatttatgtggaccaataaaattattccacgtgtacactgtgtacatgtggacattccaccatggcagttaacagctaaaaatggatagaagtgttaaactcctaacagaacaagagtttaggggactactgaaattttagaattggtagttagttgtaaaaacctaaccacttaaagtaattatgccgcaaattactcaacttcaatattatactttgtgaattctcagagttaacaataactatctccgctcctactccgcaagctgataaaaaaaacgattttgggatattgtgtaaactttaatcataaattagttgattttttttcaagttaacaataggactaacgtctccgttaaaactaatgaaaaaaataacaaattttgttaaattaaaaattgaataattaaattgagaaaattatattgtatacctatatttttttatttgttttaatttttacctctattttcatatttttttagatatacctacttttatggatgaagttcccataagaccccttaggttatgtaaattatattaggtaatccactcaaaaaagtgggtatattttaataaaaaaataatatgagagtatttttgattaatagatacaaaaaaaacaggcatttttcaactttatccccttaccaaatgcacctagtgtgattagtcggctacgatagagaaagtgggccgaatccggttgatccggcccacttgagatgaacaaccaaacttcagaaatctaacaaacaattatattatcattcacaatttcacatcgcctacgccactgcctgctggtgacttcgttttggtttttgtgtttgagatctgtaactgcaaaagctaaggaacaaaaaaaaggttggaaacagcaatggcggcagcagcagcagcgacgcccgactacttgttcaatttgagaaaccatttctacttgggagcttaccaagctgccattaacaacagcgacctccccaatctctcccctgaagatgccatcgaacgcgattgcctcgtctaccgatcttacatcgctctcggcagttaccaggtatctctttctctcattctctttagagcactctattcaacaactgagaaatctgtcccctgagtttgatgaatttcgattcttgccattttatcagcttgtgatcactgagatcgattcctctgcggctacgcctctccaagctgtgaagttgctcgcgctgtatctctctagtcccgaaagcaaggtttttgttttctttaatttctctctcaacttgatcttgaaatttaaattgttgattgaataacgaatgtttgattttggatctccgatccgaggtttctcgttcctttggcaacatttcatgcttcaattgtgtgattgatgctttgtaataatggtaaaaaaaaaatcaatttagaatgcgaggtttctgaatttttatttaagttaattagatctatcatttcttcaaatgctgtatgaatttagattgtagaagaagcggtgaattgcgatggttaattctaccatgtcctgcaggaatctacaattgcaagtctaaaggagtggttggcagatccagccattggaaacaacccgatcctcagactgattgcaggaactatattctttcatgaacaagactataatgaggcccttaaacatactaacgttggagggactatggaactgtgagtttaatcttaccttcatttgcttttccatttctaatgtttgaaggtatttgcattcttttctgcctttcctaaatggaagtctggccaagtttcgcgctaccttaatattgcctgccacttctgagagccatataatttgaacctttgaattgtataatctgttaatgttgctcaagtttaaagagggtggactgagctctggatgggatttaggttttggagagagggagaatataatgtgagatacaagatttttataccatactgtagtgcttaatgtgtcctattgaactgccaggatacatattactgcttttctatttgaaccataattcaagtgtttatagtatttagtatagttgtccctaatattaatgtaattggcaaaatcgacgttaagtagtatattgaattggattgatgaaccatttgcattaggtgtactatgacttcaagatttttttttttctttgttttttcctggccattttagttgatgataatttttgcaagtgtgaaacctcaattgaatgactgtagtttacacttttaagagtaattggcagaattagactttataaagtaggcatactcgataacactcaacagttaacattgttgagtaggtgttgagtgtttgctaagtatggtactttgtaaatcatttttcaaggtagggttcatttacgaaaacatacttagaagaaagatcattttgcaaagcatctcatctagaatatgcagccaaacatagtgataagtatctcttagattctgcaaggacactacataatctgacatggatttcttgtttttactacctgtcttgcttccttttctccataatgttatttgttgttctggttctggtcaacatgttgaggctttgctaattcgaattgaagggtgatataaaaccagtctatttctggcattatatccatagttatcgcattcatcatagttagaagaaggcgtgaaagttcttactagttgtcagtttctcccacctaattattgtttttttctgcttttgcagtaatgcattgaacgtccaaatattcatcaagatgcacagggcagattatgcagagagacagcttagagtcatgcaacaagtagatgaggatcacacactgacacaacttgcaactgcgtggctcaatctggcagtggtatgtataatcgtagctttatagttttaatctgcctctgaacggatgggatattgccaataatcatctttcattcacatctttgtaaacagggtggctctaagattcaagaagcatatcttatcttccaagatttctctgagaaatatcagatgaccagtttggttctgaatgggaaagctgtttgctgcatgcacatgaataacttcgatgaagctgaaactctgttgcttgaagcacttaacaaggcaagtatctaagagaatctgccagagtcatatttttctggagttgtttgtgattactctctctctctctctctcnctctctctctctctctattttggtgtttaatgagcaataatgttttattttgttcgagagctgc

SEQ ID NO: 112495 - DNA, 7970 bp, Cannabis sativa
  modified_base (7927)..(7943): a, c, t, g, unknown or other
ttgccctcttctccctctccaactccttcaccgccttcgaaagagcagcctttgcatccgccaattcgcagccaatcttcttgttcagcctctcagtttgtttcctcaacttcttctccgccttgagctcttcagccacacacgacatagcctcacgaatcctctctcgctccttacttctccaagctgctttttcttccgcgaattgcttaaccaagaactcaatttctcctccctttgacctctgctctctcataaaccgatcaacatgaataagagctcggtcaagctcaaaacgcagcgcggaaaagagtgaagtgctcaaagaacgttgctcttcaagaccacaaacatggttcaagagcttcacaagctccttggacgtagcaagtccactactaacttccttcaaacgagtcttgttggaccctccattattagtgacacatttcttgtgatgttggtggtggtgtgttttagctcgagcatgatcttcaacctgcatagtataatttcaaccccaaaagaagaaaaaagagatagttgccttattatacgaagtaaatgagtataataaatattgtccaagtaggtagtagacatagatgattgtgattgtgttgcaattatttgaatgcataatgaaaatgacaacgcacagaaccaaattctgatgtgtaaacacaatttcaagaccattaagtgacaattattatctgtatttaattttttataaacacaaaaggaaaataataattgttgccaacaattttactttcaaccattttttctttttcttttccttttatttgtctcaaaatagaaaggataagaaggaagaaagaaacagacgaagctgaaaatgacccaaaaaaatgaaaaaaaaactagaaaatgaatatagttagtttaatttacaatttacatacaatggtgaatctattacctccattaaactggctgtgctaagcgaatccaaaccccccaaatagtaatcagtcagctgaaatttctgggttacagctgacattgttctgtggtggcctactctttcagcatggtcatctcttcttctctgcaaatacccagaaaccaaaaatcaaaaaatataaatatatatatatatataaaaggaaatacattagttttttttttttttttttcaaataacagagcagcagacaaaaatgagcaaagcccaagaattacaactgagaaaaaaacgaagcacaatgtcctcgaaccaatcccaacccatccattcacacgttctcactcacaatttaaaaactcattttggcacaaaatttcattctgctgataagattagtctctcggattcttttctctctctctttttttttcagtgaattaaaattaattattatttatgagtgaaattaaaataataacccacatctgaaatgggagtataggatggatctggaggcaatgaggctgattgagagggtaatttcggtaatttatcaagcttggctgttccatctttcttctggttcaactcccagagagtcgccgcgagttttctcgccgagaccgattttcccggagcagcttctttacctttcccggtttccgccatggaaaccggtgccggcgatgaggttgtctcccacatagtaacagccggcgtagttgaacctccacgcttccccatcagaattgtccgcttgaatcgatactttctcacgagcgaagatgaagacgaagatgaacagttacgcttcctgatcttgcacttagtttcctgatgattcgtattcgaaccagacatagtagtagttgaagtaattgtagtgtgataagaccagacacaccctgtttggaaagcaagaaaaattaaaaaaaaaaatgccgagaaaatcttcttcagtacttaaatctcaaaacgaaatttcaggatctatttcaaataataaaaaaaaaagactcttcttttatttatatggaaggattatgaagaagaaaagttcataacaagtacaaatggttatgatgatcacaacctttttcttttggagtcataagtttcaaaatcatatacaactaatttttatatatatatatataaaaattaaaaaaaattaaaaattaaattttgagttgagtcctcgactttagcaaacacaagaaagaaaaaaaaaaagtgaaaaaaaataaaaaattgttgaatgaataaaagattctacttggtttaccagtcttaaagaagaagctttaaaagtagtccaaaactggaatgtgagagaaaaatcttttgttgtgtatcattacttactactcttgttaacgtctttggctttggttttggaaatgttaagagggaaattgaataagaaaataaataaaaaagagtaattattgggaggagagattttgatttgtttattcttttttaataaaaataataaaaagcgttggagttgatgaggtggcagccacgtcagcgaggtgtggtcaattgggaacgtgcatgtggcgatgagagagagttgaatcttgactaggttctgtgtatttttatttatttatttattattttaaatctttctaatctcaagctggaatgttcttattctgtgttttaagcttagaccaaatctgaaaaaattcgcatcatctcgaattaagagattgagtgaacttgatttataataataaagaaaaattaaaaaattaaatagaatttgtgcagaaggttgtatcattaagttgtatagtattgtattatattgaattagattatatatcatattttttataataacatacttgaaaatattgtataaaatataatttaatataatttacataatataatacggtgtaatacgatctaccaaacaaatcccagtaattacaaatttacaattttttattaatttttatgtttgaaattatatattagaatattttttttacagcggtattctttatatttagaatattatttgtgtaaatttttaattttttttaatattttacagtactgaaaacaaaatctaatattgtagtttattatgtgttttaaaaaacttctaatctattttcgataatataaattatttagaattttttaaaaatttataaagatggttgtaactataacacaaacaaggtcacacaaaaaaaaaaagattaaaaaaaatatttcgatatatattttttagtataaaaattgactaaaaatttacaataaaaaattgaacactaattattaaataataataaataacaaaatattggacagaaaggaaaaagaggaatcacatggcatagcctttatttttaagcaaataagttcaagtcagattcgtattattattattgcataatcattgaaatgttaacaatcggttctcattcattttaattaaatgtgtgtatataaaattgaattgaaaaaatagtatatcttttgtcataatattataatatatatattttttggtctatgttaataatgtagtaagaattgacaaaattgctcttagcttatgagctggttttttccattttttttaattgttttggaaatttttatttgaagaactttttaatcaatactattgttagagacatgatataatatgatgatattaaatatgtagtaacaccacaattaggttgagaaaattaataccaactgctactcacaggaagggccaacttttatgcaggtgagtagaatacctaatttttggagactagacttctatagacttctaaaaaggattttacttttccattttgtttaaagaaaatctatacttttttttaacaagtcattttcaacagagtgaaacagtttgattgtgattattggtatagataagtttcaataatagaatagctcctatagggctatatttattgtaatttctgctgcatgcaatttggtaaagatggtttgctttgctttataattattatttatttattttattttattgaaataaacatatcattgatataatcaaagagtacaaaagccatgcatgaactatccaattaagtttctcttgttggaaaaatttagacaacaccaaataacgcgaatattcaagcaaaacaagaacacttactaacagttatgagagtacttacttaaaatagagagtattcaaagtataagctacgaaatagacaaaaataaaaacaaaaaaatagagaagataagaggattatagtagctcagttagagctcgcttggtctgcttagcaagtgtcttttaggattacataatcggtcagatcagactatttttacaataaatgacaaaattaaattaaaataaacgtttaagaaaaaatgaagaacaattttatccattcttgacttaattgcagcaacgtctgtgacttgataagtcacagcttgtccattcatattccacacacgagctcgcgggctctatggtgttgtaatcgcaagaggggcctttgggcctatttcattgaatgtctacgttcaccctcgatcgcataattagacattctatgcgtagataacttgaaacatgtgattccctaacgagtattcaaaatatattagtcatttggaccaaacctacgtaaagaaacggtctttactcattgcataagagatatacttggccatcacatataatcggtatatgtgcgaccagtaataacttctctcgatcctgcttatctgttaactatgcggggcatagtatgcgactataccctgtcttggtcacatcttctcgcaagttcaatcatgcaagatgaaccgatcattctttctctgatcgcattggtggctatgtccacacatttctttctgtagctaacaacactttggtctgttaacaatgctttctacggtcaacagcactttctgcagttagcagcataggagtggagacaagcgtacacttgcggcaaatcatcttttctgtgaagactggctccacgtggcaattttttacgagattgtactcgtatatattttggtgagaaattcgcactataacagtttttaatcctctaccatgatatatgcacaattaatccatgagaaaatcatggattaaggataattcatataagtttggaaaacaaatttgaaatattcaataataaagatcttaaacagtatacccactgttaggaatatagaaaacgattaggatagttggttgattggttaagtttgttactgtgtaatcatttctttgcctaactgtattctgttttgtcagctagtgtaatcagctactatgtattgtatctatatatactcaatacaattcaaggctcattagttcagctgagccatttctccatcttcttctctcttttcatttctctgtttttacattcaatctgttgattgaatcctttcatggtatcagagctgtatggagtcaacaccaaccaatcgtcccactccaccaatggctgaacaacgtgctcctggttctaacacaaatcaacctgctccaccaccaactgaacaacaagtccctgttctgaatcttgcacctgcaaatcttcccaacaataatctgttgcctctgaatcttcgattggatcgcacaaacttcctgttctggcgatctttagtcttggccgctgttcgtgcctatgatctggatggctacatccttggcacaattcaagcacccgatcgtcttcttgcaggtaatgttcccaatcccacctatcaaaactggattagatttgatcaatttctcatgcattggctaatgaattctatatctgaactaatgttggcccatatcatcaactgtcaatcctcggctgagatctggaatgtcttcaaccagctgtttgctactcgatccagagccagtcttcttcaagttcgtggtcttcttcagtccaccaagaaaggttctatgagtattgatgagtattttcttaagatgaaaaagtatgctgattctcttgctgcagcagatcatcctatttctgatgaagatttgattctttacattcttggaggtcttggacctgagtacgaatctgtggtggttaatctcacttcaagaactaatcagttaactctccaggaagttcagttcatgcttcatagtcaggaattgcaaataaaacagcaaactagtgctgccttagagaatgtttaagcaaactttactggtatgaaagttcgaggagaatatggccatggaagtcaaggctatggtcgaggaaatcgtggatccaacagaggtggaggtagatctaactccaccaatagaggtggtagaggtaacaggccaagttgtcaattgtgtgggcgtgtaggtcaaactactcagaaatgttatcatcgttttgatataacattcactggtcctcaagctcctggagcctcaacctctaatagtgacaatcctcaagcaaacctgtctacaacaaatcagaacgatgatccaggtgctgcttggtatctggacactggagccacgcaccatatgaccccaaattctcagcagctggagaacaaggaggactataaaggaaaagctaaagtaacagttggtaatggccattatatccctattatgcatataggttctaactctattgacacaaacctatccaatcattctttaattctgaaagacattctacatgtccccagtatttctaaaaatctcttgagtatttccaagttcactaaagacaataatgttcttcttgtgtttgattcctcctcttggtttgtcaaggacaagaggaccaaccaagttcttctgcatggtaccctcagtgaggacttgtacaagctccaactcccttcttcaagacaagtcactcacagtctcttcccttcccagtctgtccctcccaacaacactactcctcgtgtgttcaattgcactactgccagtaatcctgtttttgacaaagccaaaactgctacagtttggcactgtcggcttggtcacccatccaagcaagttttacaaaaaaatctgtctactgtttgtcccaattttaaatataataatgttgaattttgtgattcttgtcaatatggcaaattacatcaatttgccttcaaaccagttgctaataaaaccacaacaccctttcaaatagtgcactctgatgtatgggggcctcatgtatctcttgatggatataaatactatattagctttcttgatgattttacaagatatgtatggatttttcctatgcaaactaaatctgaagcaaccaccatttttactcagttcaatgcttatgttgaacgtatgtttgagacaaaaataaagagtgttcagttagatttggggaaagaatatcaacccttgtacaaactgtttcaaaccttaggcactaaaagaaattcgtgtcctcacacacatcctcaacaaggccgtgttgaaagaaaacactggcatgttgtggacattggcctcacacttctggctcaagccaatatgcctttaaaattttggtgggaagccttcacttcagcagcttatcttatcaacgggcttccaacctcagttttaaagtttgtgtctccctatgagaaactctttcaacaaaaaccagattacaacctttttaaagtttttggttgttcatgttttcctcttctcagaccatacaacaaccacaaagtttcttttaggtctgccaaatgtgttttcataggatatagtatctcctaaaaagggtacagatgtctacatcctactggccgaatctatgttgctcgaagtgtaacttttaatgaaacagagtttcctttctctcacctctttccccagtctgtctcgaattctcaatcatctacccctatgcttattgacacagccaattactgtgtgcctacacactctgttattcctcatgctacacccacaaactcacctattgttggaaattattttannnnnnnnnnnnnnnnntaacaagtatgtttgattaacatccta

SEQ ID NO: 112496 - DNA, 750 bp, Cannabis sativa
aaaaaataaatagctcaattaaaattaggattaacgaggactattaccattattttttgaaattagggatttatctgtactgaactttttttagaatttttactacaaattttccaaattttttccattaaagattattttgacaaatatctgaccagtaccaaaccccttggacattatgcctagtgagcaagtgcgtaaagtatttcaaactcaataacgatcagtgtctttatatttcacttcttgctctcccatatagcaataagactaaaaatctttcaccaacacatattatgtactttttttttaaaaaaaaaacattggcctccaaaaaaaaaaaagaaaaacaatcaattttgaaaaagaaatatacaatgaatttgatatgtaatgtgcttgagtagtctattgaatgtagcatataaataataataatacatttgcaacataagtgggtggggacaagtggtgcatcataagaaatctgtaccaaaaatggaaatatttttaggatcctagctagtggttttgttcccccacggaccatggttgtctctagggtggccattggaagatccatttcattagggctaaaataatgagcattcttatcaaacactataggacactataggcccgtttagtacctgaaaggcctgtttggtacacaggactggattggattagacaggctaatttgtccaatccaatatttgggcttgttagaagtctggataactaatttag

SEQ ID NO: 112497 - DNA, 5263 bp, Cannabis sativa
gtttctcataccttttatgtgtttcttttcatcattttagaaattcatattaggatgttaaaaacatacttgttagtaaatatagatcctggtaaaatataatacaacacaaacaaggtgaccctatgtttccgtaccttttcttgttgtgtgttgaaggtctaattgtattggttaaaaaggattattctgatagttttctccatggattttcttatgaaacttcaagaccgattatctctcatttattgtttgctgatgattctctcttcttctttaaggcttcggtgatggcgtgtgagaggttcaagttgcttctggcttggtatgattcaacttcgtatgaaatggtaaattttgataagtctattgtgtgttttagcccgaacatcacgatcactgatataaaagatatgataaatgtccttggtgttgtgggagtgtcatgaaaaatatctgggtcttccttgtctttctagtcattataaatctggtttgtttaattctattcgggatcgtatttggaaaaagcataacagttggaaagccaagtccttttctatggcgggtcgtgagattcttattaaggtagttgttcaatccatcccaacttacacaatgtccctcttcaagctgtccttaacctttgataaaagtatacatagcatgtgtgctagattttggtgggatggtgatgatgtcaaacagaaaatgcattagtgtatgtgggaaaggctctgctagcataggcaagatgatggtatgggctttcgggattcacaccttttcaaccaaactatgttggctaagcaagcttggcgcctttatgatgactcgaattccctggttgctagagtcctaaaaggtttgtacccacaaacataagccttttgggtcgatgaccaagtctaaaaaaggatcttttattaggaagaatatctgatggggaaaggaattgtttgaagttggctctttttagagggttggtgatgggactgacattaaggtgtatgaggatggttgggttccctcaccttctaaattatttgtgctgtctcctaatttttttggagtaggaagcacttatgcaaacttagatctgactcgggggactgggacattgatttgattagtgggttattttcacctgaagaagctactgccattctctctatcctttggccttccattttgacttgggataaattaatttggggtatgatagctctgatttttattcagtagagttgttattggttggccattcaaaagttggggttgggttgtgcatcttcttcaatttgattctcagggtggtggaaaaaagtttggtctcttaatttaccgcaaaatgtgaagacgtttacctagcgaatttcatgtaactggattcctactaaatgtaatctgaccaagcatggtcgtctgacaaacgaggtatgtcctgtttgcaattttcacttagaaataacccaccatgctttatggggttgtccttctttagctgattgtcgtaaactttgtggtgttcctttgagtaatctcttgttacttgtattgatttctatgatttcatcctcaagtttcgtgatccattgctcgtggcctcattagaattgattttagttgttctgtggagaatatggttcaggagaaataaaaaggtacataacgacaagttgctccctccaaacaatgttgtttcttagggtcgtgaatatcttgctgattttttgaatttggatatggctccaaatggtcctctctcaactggaaacccaccctactctttgtttgcttccttgaactatatttgggatctgcctgctttggggtatgtgaaagttaacgttgatgtcgcccttaattacaataatggaagatgtggtttgggaatggtggcctgtgattccaagggtgaggttttggcttctgctgtttggcacttgttgggtagtttctttcctgaaatgacagaagctttagcactaaaaaaatgaagccattcaatgccacttgttggtttttcagattgtgcaatttgattctcattgtttgaatgtgattctgaagtttaataaccaggtttctttagtttttgctttggatttagttttatgaggcataatttgtttgtttttcactctgtcagtctttctttttgtcctaaatctataaatctattgtccatttcttagctaaatatgtcttgtaggaagttattagcaaggtttagtggccttattctatttacaatcttatttttagtgagataaattaattcagtgagcttctcctccccttttgcgattgaaaggtggtctttgggagttttttctcaaacaaaattaatattctaacttagtaataaataaaaagtttgagagcaagaaatagttaggagataaaagactaattttaattattaaattgaaggacatttaaagacaaaatcaaaagtgaggagagaaaagactaattttctaaagcaaattacagaaaagaacaaaagggagacattttcattcatatcacttgcttttttttttgcttaacattcatatcacttgctgtggcttgatacgggcataaacattggtagcacataatttttccacaattttgagcaacagttaaaaataacctaatagaaaagaaatggtcagaaagctggtctagctagtagctggcttcagtgctttgtattaattaataaagagagagaaaggatcgcagcatttgtttgacttgtcctttggtctccactgctacatcttttgatcaaccggaattctcacgccttagactttttaagaaagaaccactcttggtgatctctctaagtggtttgttggtgaacctgattaagttatagacccaagctccagctatggctccaagagttggtgaaacaagataaatccaaagtcctttataccgggttgccacaattgctggacccaagcttcttgctgggttcattgatgctccagatattggcctatttaaaagcccaacccattacattagaatataatcatgacccttaattagttttacacgtaacaattttcaagaaaatacgataattttggttcaaaataaaattaaaaaacatataagtcgtcttaccctgcaaacatcacattcagtaaaacagtagagcccacagccagcccagcaagttctcctatctacagatgaaaataaattaaattaattaatattaaatacgaaatgtgtgtttaatgatacatacacatgtccaatgtagacaaatattagcaaaaataattcacctgtctgtcaccgtatcattcaaataataatccaataataaatatattattcaaagttaactcttggaagatattggacaaaagattaaaaaatatacatagaattagaccaatgagttgtgttagaagagttaagctaactccctaacctaactatatcagacgtgtttttttaataataacaaagaaaaataataagactaaccgctctgttatcagtagaaacaccagacacaacaaacataaggtaaaatgttatgacgaattcaagcacaaacgactgcatatcagagcctgtgggaagtgttccaaagaaatgatcttgttttcctgtaaataatagccgaagcgtaccactagctagagttgatccaagaacttgagctagtacataagcaggtacctatacaaatcaaacaacacactattattaccaccatataaatttaatcttataggaactctggatgtaatcctattttaataaagtctctggccttcttgaattgttctctttttgattaaatttaaatattaaaggaagagagaaatccagtttttattacaataggttataggacatgacttgtagaataaaaatgggtaattgtacagaaagcattggggtatagtattagaattgcgttaattaaataagataagactcgttgaaaattttgttttagttgatgtcactttgggtcgacattttcttattctacacacaagcttcacataatcaagttttggttagaacatgcttacctgtttcagtggaaatctcctagtagtggcaaaagcaattgtgaccgcaggattgaaatgggcaccagagatatgaccaaccgagtaaaccattaccatcactactaatccccaaactatagatattccgggaaaagtcacaactttatcttcagccaaatttaccaccaccgaggcacaaccagcaaatacaagaaaataggtacccaaaacctcagctaacaactggatataagtaaaaaaaaacaagagatcatgattaattattaatcaacgttgtaacacacaagaataacacaccacatacatataatgagttaaacatctgatgaaagctctcatcttagaaaagtggaagaagaagagtaacccatatgattaaaaaggtgtgaccttttgtatgaatggtactgagacacatggtatccctgaatctgagttggtcttagaggaagagttttgattgggctcaccatctttaacattcaaaacatggtgtccattacttgaaatctccgccatgatatgagttggttttcacacaaaccaaagaaaagaagctcaaagatggttggggaaagataatttagagtagagaaaagggaagtctgtcctcttctgattttccaaaacctttgagtgagcaaagcccagatgggcaaactccaatatatatatatgcccacacaacgtcctaaaagaatggaaaaagttaagtacagtggtgattttgaccaaatatgaatacgtttattttattttatttttttctttggctatcttttatggttgtgtcaaaaagaaagagaagaaaagtatttataagaagaaggcgttgaaaaatgtgacaattaataactttatagagcagaaggcattgaaggctggctgagtgcctcaactacccaccggaaataccgaaacatgaataagaatgcctttcagataagtcttcataccgattattaattataacaactgtttattaattacggtgttatacaaaaatattaattaataaaaacaacaaaatgaaaattataaagaaaacaaggtaaaagaacataaaaataataccaaaaaaaaccaaaaacaaaaactaataaaagtacaatataaaaataatattataacatcaaaacatgttttctgtaaataaaattttaaaattataaaaaaaaattagggaaaaaaacaaa

SEQ ID NO: 112498 - DNA, 4492 bp, Cannabis sativa
  modified_base (4446)..(4446): a, c, t, g, unknown or other
aaagaaagataaacagataagatcgtggtgagaaacaagtggaaaatccctcagccaataaagtatcccatacatagcaatcaccatttgtgtatccaacaaagagaagccttcctgacgtggagaatgcaattgaagtcacatgtgggttatcattatcaccgtgccgctggtggtatacttgaagttgatgtcctgttctaatatcaaataacctgcaggttccatcatctgagccagttccaaatctattgccatctggaaagaattttacagaattaacatctccctcgtggccatgaaatgtccgcactgctcgactagcaacacgagtgtcccataatcgtgctgttgtatcacatgaaccagatacaaacattcttgggttggatccattaatggagacactgaaagaacgcaaagcaatcttatagtaaagatcttttaattttcgtcatctcttagtcataataagttgaaagtgcaatgctcctattaataactgaccactttgatagtcagtcaaccataaagataaacatagaaatagatggcattatggctatacatatatacaaatttatattccaagatacatgaatacagatagttataggcacaatactcaagtaatagatggagatttgccactgtgatgttagaaattttatgctcgaattatgtgtttatcattacaaatgtccatgcattttttaatacagcttgttaaaaagtttacacacatggaaccacttttgttcatgtttataattaaaaggtaactcatttcaacatcatttaaggcagatgtctgaacattcaaagcataataaatattttttttgtgtgaataatttgcataaaatgcacattttatgcacatcagcatgcatgactcccatcccacttatatataatacttttgtgtgttcacgtgggaaggcaagttagctaaatacctcagcacatctgcagtatgtccagattgaaattcacctccaaaaactgaagttctaaggcctgtagtaatgtcccacaagacacatgtctgatctccagaactcgtaattaagtgtgcatcctcctctggaacgtattggcaggaagaaacgtaacccttgtgcccactaagcatttttgccacaggaagattcccatctttatccgtttgtgaactaagattaaagatagagcaaacactgtcaagaccaccacatgcaacggactgaccagttggtgaaaaagcacaagtcatgacccacgcacaaggtaactttatagcatgggttttttggcttgttagtgcattccagacaattaatcttccatcctgagatgcactcacaattcggttcttttcaggagtccaatctaatgaatacacctgaaaatttctcagtaagaattgatgttatatagcacccattatttaggagaatatatagattaagaacacgtgaaatttctcactattggacaaaataatttagatagtaaaaaaaatgtctaaaatctaataccaaatcaacagtaaagaaaagctagaattgacaacaaataattagcattacagattgttcaggacagttcaaaaaagaagaagaagaaataaaacgtaaaaacaagttcacaaactgcaaactattcaatcatcaattttatgattccaatttacaaaatcatcaaatacactgatgcaatcacaaccaatattccaatacacacatatatgtatagaaaataatacaattacatatacacacgcacacataatgatattaatatataccttccctgcgtgaccctgcaacgttctacagcataccagatccgtaggtccaaagcggaccggagttcttccctgagacctcgcataccctgcaactgcaaatccgagaaaagaagaaagcaattagatccgaaaatacgcaaatcccaataacgaaaattcttaagccctacaaccgaacaaaaatgaaagaatcaaaaagtccctcaccatcagtatcgagcaaagcaagtcgcctctgcttcaatcgctctctgagagagttgaccgtctcgttcgccgctacgtggcgctctttcagctcggccacagacattttttccttccttacaaaaacctttctcgtcgaaaattgaaattagaagactgccatagacgaaggtaaaagaaaaaaaaaagtcaaaccagatgctatagtaacatgaatgattcttcaggaaaaaagctcagaccaccccgccatccataacttcagagcgtcagattagggttttccgttcgcctcctttccggcgaattttatataattgtttttcccagttggtgtctagaaagaagactgagaaggaaatagtgtgtatgcaagtgattgaaagagaggtcagaaactgaagagattgcactttgcaggtgtgagctgcgccggtgtctcctcctacagcggaagcactgctctccctcgctctcctcagatgggagagatacaaagaaaaagaaagagacagattgagccggtcacttctcaaactcaaaaaacttaggcgcgtggctatggagcgtgtgatgattagagtgaattggtgtattttttcactgacaaaattaggtcccttgtccacgtgctctttaacggctacttctgctccagtatattgctagacacgttgtccaaaattttggtttgtgacggtgtttataaaataattgatcaaatttaacgtacaaatctaatttaatttgtaaagtatgtatatttataattaacatttaaagtaatcgctctaattaaattcacagttatacatattttaaaatatatatatttaagtgatcaaaataagaggataaaaaatataattctggagtactaaaacggagaatgagctaataatgtaatgtggcagagttaagaaaaaagtgcatcgttttactaaaagagaagtagagtagaaagcttagaggcagaagagcagcttagtgaaagaaagaacaaggcgcttgaggagctctaaaagtagggagaggaaaagcactgggagaagcgaatgataattaatacaagtgaacaaaatagagtaaataaaagaagggaagctaaatattttccgcacctataaatagaaggctccctcattcgaaaagtgtgacaaattcttgattacaccaaactagtcgaaactttgttggaatacatcctcaagaaatacatttaagctcacgaattagcatacataccaaattgagatagagattgtactttgattagatcaaacatggtgtaaagaattcaaagtaatgatacaattttgttgttgagccaattttcagcatcaacagctagcgccatccgtgagaatctctaggatgaaaagctgaagttcaggataggaattaagatgggttctaagaaggtgtcagagaaggcaatagctccaagtgaaggagatacatcgaatctagttgttgattcgactactactgcattggcgttggagataagagaaatgaatcaaagaatgaatccgtgagacaaacataatgaggatatgtggcatctcgcagaagagaaattctagcaagagcagtgtgcgactgaagagaaacgttagcaggatcaagatgagaacatacaacatcaagagtatgttaaccataccatgcgagaatttatggctgaaatggctgatatgcgggccaaaatgaacaaaattcatattcattacgaacatggacaaacaagtgggtttaaacctcaacatatcgccaacaagttgcagtgcataaaaatatctcagaattctaagaaagaaatgagaaatcaaccgacgcaagtgctcaaagagaaaaaagtgctagaaggagaaagaaaggcacacaaaataagcaaaagttatgatctcataccagattcagttaatgccgcaatcacagagcaggtgctccagaagcacttcaatcaggaaaggaggaatgagtaagtaaggctagagtgcgatccaaatccaatagggaggaatgctcaagagtttggatcttcttcttagattcctccactttctcttccagatgagagactcaagagtggacctttgtgtacaactccttgtatttgtcaccatggtccttttctctcctggcttcctccttttagttggccacaacatcatttagagaagtctcaaacttgcacttaaccaggtcatcagcttgagccttggcatcatttaaagccttgatcctttttctttccctccaacctgtctcgctcatccttcaatgtctccacttcgagagttagcttgttcaccaagtcaaaacacctttccaccagcagatgtgtttgaagaaggtaatgaatcatgactaaattgcaagaaaaaataataagattaccatcaagtaagattagagtatttactgttggaaattattttacnaggatcttagatctactcacacgtatgttgattaacacgctaaata

SEQ ID NO: 112499 - DNA, 4272 bp, Cannabis sativa
cttactaaataagactcattgttgttggctaaaagcgaggtcaacatatagtatttaaataagaattttataaaaatacacacgtggcgtccctgttggatagagcgttacatatcatatgtgatatgtatgctatatattgatattatatttgttattactgtcttgctagaccttggctcacaagtgctctaatatgcatgcaaaggtgaagcggtatcgggtcaaccatgagtttaagggcttgatgatggattgtacatgttatagccaagctaagccataacggttaggtcctacatgagagattgtatagaaatctcattttgccacttaagttggcttatatgaaatccacttgtaatattttaaaaagaatttacgggatcccggatacttatttgtattatttagttttgaattaaaagtgctattattattacaagttgttttgatatatttttttttatcaagaaaaaaaaagatttcattaatacaagcaaaatacaaccaaactatacaagacaagggcaacacaaaactgccacaacaacaaaaacaagcaacttggctatataattacttccctatgaatctctcatcttgtattgaatgctttctattttttacaatgtataatctttgaataatcacaatttttatctctttgactaggctatcttctcttcttgaatagccttcaaaaacacacatgtttcaattcatccaaacgttgtggatacaagcagcaagtaaagcataagaggtagcagccacgattcctattctctttaaagataaccatacagtctagccttcaatctccaacgaccaaactttgaaccccatccaatgaaaaactgaatcaaccaccttttgggaaagcaagcattcaaaaaagagatgcttatggctttcattaaagatgccacacacaggacaaagtggtgtccatatggataccaaaccttgtaaaaagatcccttgtaagaagttgattgatgatggcttgccacaataaaaacctgtgttttggaagacttaacttgctccaaacaactttgtcatagtgaacacgttgatggtgagaaagattactattgtaaagagtggaggcttttaatttaccctttgcaccaaagtctacaaagtttcctccaataccaactcgaatccgacttcaaggagtgctcccaaaaggattggccctttaagacagaatggatccatctaacccaaagcatgtcatgtttctcagaaagagcttagatgaatttagcaaggatggctttattccagtgaggcccttctctaaacctgagaccactaaaaactttagggaggcacactttttcccacgaggaaacatgtatttactcctattatccttcattccccaaaggaagcccctacaaagctttttgacctctttaatgacactttgagcaaggacaaatatactcatccagtagttacgaagaccaagtaacaccaaatggataagttaagttctacctacaaaagagagatgccaactagcccaagaatgcaatctcgacttaatttttttttatgataataccgcaatcctctttttttccatttagtaggtctcataggcacacaaaggtattttaagggaaaagatccgtcagaaaaccgcaaggtatgaattatagcatccctacctgaagcttcaacccctccaaagaaaattaagatttgtcaacattagccattaagcccgaagcagcactaaattcatccaaaacatcctttaaaacccttaccgaggctaaagaacctttggaaaataaaataagatcatccacaaagcaaaggctaatgattctcaaacttatgcacattggttgaaatctgaagttagcatccaaagatgctagttgaagtcttctaatcaaatattctataacaaggacaaaaagtaaaagagaaagaggatcaccttgttgtagacccttttcacctttgaagtgcccttgaattttgtcattcatcaaaagcgagtaagaagtatttttcaaacatatcatgatccaattaattaacctggcaggaaagcataatgcttgaagaagatcctcaagaaacctccaatctacggtatcataggccttactcaagtctatctgatagcacatctcagggagatagctttccttccatagttctttatcagatcttaaaatattagaatattatgaactatggatctaccattgacaaatgccctttgattctgattaactatctaaggaaggacagcaactaatctagaacaaagaaactttgagatccctttgtagatggtggagcaacaagaaattggtctaaagtctatagctcgagttggacagtctgtttttggtataaacgagatagtagtgtcatggagagctactggacattgacctgaaaaaattcagcactgctttacaaagctctcctccaatttctggtcactgttttaatgtttaagtcaaattatttttactcacttggcttagtagaccccgattaacaggattagcactacgtaatcacgacatgtggtgttcttttaagtaaggcgttacatttcactttgccaaaatagtgaaatatcaaagtgtaaatttgactttccacaattcgtaaatctcattagtttcaaaaaaatagttgaatgctccaaaaaaaattggaatcaaataagtagaacccaacacatagggccaagtgtcaacctagccactagatgcataattctagggttcctgggtgtcgctttggtacttccatggtattagaattcacaaacaagggctcctcacccattttggaccaagataagaaaaatgacttgaacaaaattcgtatttgagcaacaaaaccatgcgcactaggttgaatgtcaacctgggtgccggtgatcaatgcctaggtctactcaggcgttggtcagctctttggcccccaaatggtctccttttctcattgagtacacttatatcttcgttgctgatgaaaacagagaaaatttcaaggagacttcccaaaaaaaaagtcctttgaaatggctcaagttgacaaaatatcaacctgggcgctgggtgagcttcttagccactagatggctctgtttgtttctgaaagtacttttatctgcattttggatgtagacagagaaaattcccaaaaaaaacatcttcaaaaatagggttggaagtgccccaagttgacaatatgtcaatttgggcacaggggacaattctaggtcgacttaggcgttaggtgctcaagtgctccaaattggaaatattttgatgttgattctaatacctctaacatgcttgcggtaggtgttattcgtgtctaagtacaaagtttgagtgatttgcactaaaatgggaccataaactgaaaccctaaggctagatgtcaacttaggcgctgggtgaaactctacgcgcccaaattggcttctaggatgccaaatggacatcctttagtttccaagattgtgactcgaagtcttcttcacttgctagcttagaacattgaagtataatgatttggaaacaacttcccaagatccaaatactcattctagagcccttgatgtaaacctgggcacaaggttaaagatccttcctagggttgaccgctatgactcaaaactctcaactccgagaatgatttccacgttatcaagccagttttcgagtaaacacaattaaaaaaatattaagagtaaatcttgatattgaaatgtgcttataattttataagatgcaaataaaaatctcctttaaaaatgccccctatcatttaatactacctttgctcttgtatctatgtaaaaattcaattcaattttttatttcatttgaagcatatgtctactccaattgctttaaggacactagtcttatcaatctctcactttccttaaaacaaattgaggcatatctttcagtaatgtgtcacacacgttatcctaatggagtttttctaacaaattttttataaatagttttgtaagaaataacttttgaatctgtttttaagattgttacatcccttatatgtaaattcatctcgaattaaatgatactttatttcatgtacttttccctctcataatttccttttccttagcaaatatggtgcttacttattccaagacataattgaccaaaatttatgcctattaaatagggatgtaaacggggcagggtgggtgcggggatcgctcccccacccccatac

SEQ ID NO: 112500 - DNA, 2873 bp, Cannabis sativa
tttttgacaagtgttgctcaagttttgttgtatttgggatagtttaattattggtgatagtctaaaccgcaaaaactgcaccgtaccacaccattttcgcagtgcggtttctgcggttttttagtttcgcggtgcgagtatgatttaagaaattggaaaaactgcatgtacgggttattttaaaataatggtcaacaaccacaccacccgcactgcaaacacccttaataaaactgcattattaataagctagtgattttgaccaaattgcgaatgcactaattaacattatatataatattgaaaacaattacccttaaaagaaaggtgtacaactttttgaaccccacacatatcccctatctttgtcttttaagcgtatctagtccaaggaaggaagctagtcaaatgtgagactataatatttgtaatgatcatgttcccaatttcttaaatttgattaatctctccctcttttgaaccaccacaaacattcatgacacacacacctatacatatatatattttcactaggttatacaattttccttcacaaataatgaatatattacagttttaaagttgaaattaaagtgttggggtgtgtatggccggacctaattggctcctcaagtcagggaatcgaagttggttgcgttgatgttgccagtttccagtcagtgcagttggaccctagaatgtggacttgttaaaaaatttcagtcactttcaatagtgatttacttttttttttttattctcttggttgcaaaatgtggggtgaggaaggttaaatggttaattaaccaacgccgtatatattttatataaaacttatttatcattaacttctagacatgaaacagaaaagcattggaaaaaaattaatgagccgtcaaatcgaacctagaatatactactttagagatgatcagttgagtttcttacaagaactactttattatatattacgatacacatgaatcttttccaccaccatttgaaaaaggtcacccacattttgtaccgatgagctgttattttttacttttaatattcttttaagtgggatctttcagtacgcaattttgtcctgaggctgccacaaaaagccactctattgttaagcagtcagtactagctactatgcaaattatataataataaggaaaatttgttgcaaaagttcactaatattatctacagtctcaatttttgtttgtgcgttcatacccaatttaacaacacaattaaatgctaacaaaaaaaccacgtgttgagaatttattggtacacatatataaaaacaattaaaaattataaaacatttaattatttaaaataaaaattattttaaattttaaataatgataaaaaatatgaattattaaataaaacaaaaacaaaagtctcaatcgttctctccctccctcgctcgtctcttctccttctttgccatttttttgttcagaagcattcaaaagcaattaaaaagattcaatctattattaaattgattgaataaaaattaataaactttaaaatattttttttcttcaatcacttctcctcctccttcccagatctggtatatttgttcacttgaaacgttaacacccctactccgatgtcaacctccctcagtgtcaagagagtcggcgaacacccaagccgatgaacgaccccctcgcactttgaaacctcttaaattctggatctcgagcctcgatctgcttctctctcctagatcttgacgtttatggcgccccagagcctagatctggttgttttcctctctttggcgaagttctctcctttgcatttctgctcaagctctgatgaacatggctgatgggttgattcttttttttgaaagaaacaagtctatttttttttttttgtaatgaatttcctgattttttttttaatagatatggctttggtttggttgggaaaagaaggtgaaatagagggataattagatggatttatttttcagcataataagcacttaattggttgttgttctggtgttgatttttcaaaaaattgggtagaaaaaaaagaaggaagaaagaaggggaagagaagcgaggaggagaacgattgataattttttttgtttttattttttttaatgaatcaatttttttattattttaagtttaaaaaaattattttaaataattatatgttttataatttttaattattattatatatgtgtagcaataaaatctcaacacatggcttttttgtcagcatttaactgtgctattaaattcggtatgaacggacaaataagtattgagactttagggattattactgctattttttgaggttaaggactttagggattattactgctaatggttatggaaaatttgtgttatgtggtaaaactaattagaattttcttcttcttgaactttgacatgtttaaaattgtactcccttactttatcaaaccgttaaaaattcattccaaattattgagattattgaatttgagaacttctgtcaaattccggcatgatatactgatatataaattagcaactaaagtgacgattgtttgaaattctttattttaacattaccaatttattatttaattaaatacatgtggaataatgaaactggtactgaaacagtttttctgtagttacaaaaaacaattctgtaactccagaataaactagaaaaataaatagtgcataaaagtaaaaacacacaaggtttttgtacgttgtttcaacaattctttcagattggtactaatccacggggctacgtccagagataagattcattagatagatctcaaaaatacaaagtaattgacttatgcataaatagactccctctta

SEQ ID NO: 112501 - DNA, 4563 bp, Cannabis sativa
  modified_base (3367)..(3377): a, c, t, g, unknown or other
  modified_base (4496)..(4537): a, c, t, g, unknown or other
tttgtttttcaaaaataaaatttttaaaaacaaaaattttataatcattttgtgattaaaaaattaaaaaaacaaaagtgttaccaaacgacacttaaattaatggaagttatgactagtaaggaaagtaagattagattaatgtcggtatcattttgtttgatatggatcgatatatattgggggacaacttcggagttgggacttgagttgagagttgggaggagggaggttcggtcggctgatgaatggtgatgcaaattaaatttaggattttactatcctatccttaaatttgttaacctgttacaaataattttttaaattattcacaattataaattgatcttttagtgctatgtatataatttaaaattaaaaaataaaaataatatatttttaaaaaatcattaaattaaaaatcaattaataattaaaaaaaatacgtaaaattaaacaaaaaaaaattaattattttttctaaattaactacacatataacattgatatattattgacatgataactagtttagtagtcatatcatcattttatttatgacgttgtgataaaacttgactaaagatgatgaataattccaagactattttaagaaagtatcgggacactaatacataaattatactttggggcttaaaatcctaagagcaactccaatagtgaaacctaaacttaatattaaaatcaatactaaaaaaaatactattttagaactaattttttttgtcaatttcaactacaacactataaattacaccaaaaaaatatatatttttattacttttatatataaatataaataatacatatatattaagaaaattcaattatttaacattattttattattaaaatttaaaaataaaaataaaaaagcaattttagtgtggctgtagataataagataacttttgggattattttacaaatacacaagaataataaaaatacaattatacgaaattttaaatatttttatgaattttatgattttatttataaaaaataggatattttgatctatttttatgttgtaatttttatttttattgttttgatgttatttttttgttacttttatttaatttttttattatttttataattattatataaatataaaaaatttacagaaaaatagtgtattatataattatttcataacttttagtgttggattgtgttaattttagtaaaaaataatactaaatttaaattttcagtatcccttaatgatgatgtaaataagataaaatgaataaaaaacaaaacaagcggccgaaggcggtgggaaacgtcggcataccgtgggccaatttcccataataatacacttgcgctgcttgtgcgcgtgtgcgtgttgccgtaccatcctaatccttcctcgctgttcttttgctttctttatcatcataaaacataaaaatatgtcgataaagttaaaaaaattgtttttattttattgccacgttttattaatcccatcaatgatttgactattctctcatcatattttacacacgtcttacactctcctctcctcttctataaatatacattttttagccataattaactcacacaaagagtaagaagaagaaaaagaaatgtgtagctacaccatgcatgatgagccactgcttgagagggtttttgagtacttcgacaaggacaaggatgggaagatatccccagctgagctgcagagctgtgttagagccacagggggagaactctcactagacgaggctacagcagctgtggagtcgtcggacatggatggggatggcctattgggttaccatgagttcgtgaagctgatggaggggagtggagaagatcaggaagagaagaaaaaggagctgagagaggcatttgagatgtatgagatgggtgggtcgggctgcataacgccagctagcttgaggaacatgttatctaggctcggtggctcacattctcttgaggattgtaaggctatgattcgaacctttgacatcaatggagatggggtgctcacctttgatgagtttgctgttatgatgcgctaacaccaaattaaacaccactatttctttcattcatatatattatatatatatgctttcattattaatttaatttaactgtgtacattataacaatgctaatattaaataagtatatatataagtgtgtgtgattctacaaagatttctatttcttcttgttttttttctttgtatactctcaaattccgccaaaaggtttcagcttggtgacagtaccataaattagagcctaatatttttctttcatttcaatctaatttaattagtaattagatttttaattgaatatttaattacacacttaattttttaattttttttttatttttacacttctgaatatttttttttatattttgagggaattttatacaaaaaattttatagcaactaacggagtaacttaaattcgtatagtaacccatataaaaactattagaacaacctaaaccgtaaatttaaagaaaataaataaaaaataatatatagaataattctcctaattttttatatttactcaaaaatataaaaacatacagaaaaatacttaaaaagtataaaaacatttatttaagtttaatattccatatataagtttaatgtaaccaaaaatttaaaataattaaaataataacactaccaactaatgaaataaaataaaatatcattaaaaaaatatcaaaaacaatcaaatataatcaaaatatttttatattatttataaataaaaatataaataatttgtttgatatgcattacataaagttaaattttaagattggcatttaataatcaattcaattaaaatctaatttttaatatttaatctaatttaattataattaaatatctaattattttatagttaaaattatttgagttcgattagattgaattatattcacccctaatagaaacaacaaaaattactagaccatccccaataagaaagaaaaaatgtgttatatttagcttaacttttgtatatgtgctccaatgtacaagtatacgatataatatattaaaaataagggtaaatagtggcataagtactcaaaattttaggtttgtaagcggcataaatccaataatttttttagtggcataagtaccaaatgtttataaaactgtcattttcttccagttttcatcagtacagactctgttattgtcttaaataggacacatatattttagattatttggtctggacgaaaaatatgtagtatcagttacttttaaatctttttttaataaatttaaaacggaacctgtactgacgaaaatagagaaannnnnnnnnnntacaaacattgggtacttatgccactaaaaaaaattattgaatttatgccgcttacaaactcaaaacttttggtacttatgccgctatttactctaaaaataataataagagtaataacttttctattcgattacttttcttcattttatgtttagtatatgtaatatttttttcttttatttgatcacttttcttcattttacatttaaatagcatgatagtaaataaaaaacaagtaattggtgctaaatatttaatttgtcaaatcagttaaaaaacaaaactgtacatcaacatgaaacatcactgatgttgaacacctataatatggcatccccaaccatactctaaacacattattattaactaacattttacttgttttagtttcttaagataagttagttcattcagttagttttcttaactaactttctgtttttgccttgtaattcctgaatataaataaatggattgtgctctttttcaagtcaagcttttcagctaaattctctatctgtttctcttctctctctctggtttttacctttctggtttagcttgttaagcttttacatggtatcagtcgccttcaatagagccggcgattccaatctccgatcctgatcctcagacagtcactgcacctgcaccagacctgtctgctcaatcctctgactctacttcctctatgtggaatccttttccagttctctttcaacttctctcacgatcaagcttgattgagctaactttctttcttggaagtctcaggtggtccctactgtaagtggtcatgatctggatgacattctctttagtggcatctcacctcctcggttcttggttactgggtagaccaaccctgtctatcagcaatggaagaaacgcgatcaattgcttctgtcatggcttcgttcatccatgacagaaggggttcttatctcagttgccaatcatcacacgtcttctgcagtttggcgtgccttagaacaacgatttgccagtcaatctcgtgcaagattgctccaattgaaaggtcagttttccaatgttcacaaaggaaatctgtctatttctgattaagttgataaagttcatgttgggttttgtgcccnnnnnnnnnnnnnnnnnnnnnnnnnnnnnnnnnnnnnnnnnnaaagatcaaaaataacattttatgtt

SEQ ID NO: 112502 - DNA, 2752 bp, Cannabis sativa
  modified_base (2502)..(2532): a, c, t, g, unknown or other
gtgtcacacactggaaagatgcccaaaggagaggagtgccaaaaataaaacgccacatcacaagacaggaaaagatgttcaaaagacatgaaaaaatacataaccaatgtccatctaaacgaaagcaacgatcaatacacaataattaatgatatatgtgtactccaattattagagtagtgatgtgacactattctttaaaagagttattctaaaaatagttatcataaaaataattatcatgtatgaaatagtattttagtgcatgtatgatgtagcacacttaatttacaagaattgttaaggggcatttaagatgccctttattgctataattaaatatcggatcctactatatattttgtaaagtaacacttcgattagatgtagaatgcctaataatactcacacattttttacatacaaccataatgtataattgatttattgtgatacagatttattaaaattttatttatagttaaattaaatagtagataaaaaaattgtataatttttttaataaaaaaatatataatttaggtgtgttgttgattactattcaatgtgttgtatcgctattgatgtaattaaatattaagtctcacatgatttaatatactaattttattatcactaatcatttgcaagatgtcacttcatgatatttatttttttttttttttgagagaaatggtcccaacaactttaccttcttagagagaacctctaaaaaaaggaagagaacacagaaatttgcattcagtcattaattgtctcatgcaaaacaaaagattaaatacaaggaggagagtcgggccaccaaacctagctaacaatagttatcaaagtatactcaactaaagtatgagccaccatattaagagttttcggacagtgcactagactcgccatactgaacttaataaaataccagccaaaattgtccaaaacaagccctaaagaggagtccaacaacaaatgattgttaaatttggactaaatttagacaatcgaattcaaaaataacattatcaaaatcaaacaaacaacattgagtacccgtacttcgaagagctagatctttagaaatttcaagtgagaaacctccaacaaagaattaagaagttgatgccaaaacctctccttgagcgttccttactatcatacccaagccacaacaacccttagacaaattcaatgtggcatcgatgttggctttaacgaaacccaataaaggaggagaccaacggggatccaccacatgttgtgtcgaagacaaaggaacctgaacaacaccacttgactcctctccactagaatcgagaacatctttcttttaataggctggcaaaaaatcataagcccatgacaccactagttcgagagaaatgatcttgtgattatgaacccatttattctttcgaaaccaaactacccataagacaaccaaaattaactcaatctgatgcttgggtagggagtcaataaattggtgaataaaatcaaagaaatccttacaagtagcaagcggatcaccaagctaaaaaccacacaacttacgacaccgcgcaagagaggagcaaccccacaaagcatgaagagtagaatctaattgattattgcaaattgggcatagaccatcatttaagagactatgactgatgaattttttttgtaggaatctagttagaagaaatttgacaagcaaaagttttaacctttggaggaatattaagcctccaaagtttattccaccaacccgaaaaaccaatagatgaagaagatttgtctaaaccttccttgtgtagtgcaaaccaataaccactattcacattataaaggcctaaatcctcatggccctatatcaacttatcacacattggatgtaaaggccaaagaatagcaagaatagttgcagcttcatctgagaagaaagaagcacaaaccaaatccgcattccaacttccaccaaatgaccgaagaagagctgtcacactatcattgccaagaacttagggtgatagaattcgagaccttgacgccgaaggaacctaagcatccttgtaaatgttaatatgacttccatctcccaccctccacaaatcactcgaatcaaaaagttatttaccccaaagaatattcttctacacataagagcctctttttgacgaaatgatagaactaaatgaaaactaaatgaaaataacaagaaaataacatcaaaacaataataaagcattatcaaaataacaaataacaaaaaaccaacaacaaaataacaaaaatgcaacataaaaatatatcaaaaaaattatattttatgtaataaaatcttaaaagccataaagatatttaaaatttcattgtatttttgtgatttttttattgtctttattttttttttttgaaataatttttttaggggtttttacaaaaatactaaattttaagtaaaagtttataattttactgtcacatggaatttttttacaaaaatannnnnnnnnnnnnnnnnnnnnnnnnnnnnnnaaaataaaacaattaaaataacagtagaataactttaaaatagctttggaataacagtaaaaatttaacgtataaaaaaatttatttcacaataaaaaaattaaaaataatgaaaatttgagtatgcggtgtgaaactgttttttgaaaatgagatttcataaaaataaataaaaggaaattagactctataccttttttatattattctcttttatttt

SEQ ID NO: 112503 - DNA, 6103 bp, Cannabis sativa
agtaatactattaaaaaagatgttaaacatacgatcatgggctagtttaggtgctgttttttttaggctgtttagttgtacttgtttgaggttgctttgagtaattatcgtattattgttatctataacattggtattttctttcgctttcctttaattgagctacaattttgggtgaagctgaaagaaaactttatctaatggcttccaattcatctaatggtagttgtggttcagttaactactaattgtccccgtactcttgttatctataatattggtattttttttataacattgattactcaacattacaacagttgtctagtatcatggagcttatttgtcaatgagggaatggatatctaataaagaatataacaataaaaggccctaatgtgagtcgtccttattacaaatgctctggttcagataaggttaaatttttgaatgatgtttgtatgcctctttttttaatgttaaatgttaatgagggttttgtgacagggaaaaaatatccaagattgtaatttctactcatttgaggaagaactcaagcactgtccctgtgaacgtggcttttgccgtatcgcctttgtaaggggagaaaaattttagtattgctgtgttacgatggacatttttaagtgctaatacttataagtatgttgttttagagatatatcatgttcgtgcatttttaatggctatacgaagcttcgaactggtttgtttcggctgttttttttttggtcagttttagagtgaaacatagggctcaaatctacttcgaactggtttgtgttggctgttcttttgttcttccacttgttttcaagctctgaatgcggttcctcaagtttcaagttctcatcgtgagcatttatttatatttaagttaggatttttgagtcgtagcctctgtttctttaaatttgagctcatcagtattgaattatttttctccgtattttttttgtgcttatacatatgaattgatgaattattgaagagcttaaacattcattaagcatatttttgtattgtaattttgatatttgctctttgtttctagctgtgcctctttgagaaatttaaactcaactcctttttctaatggaaactgatcaattggaacaacatattcattattattctctaattaatgtgatacttataattttattacagtattctttgtttgcttgtgtaatgtgtaattgtcgtatttttttggaactttgttttgacagtcactttgtatttttttttattttttgttgtagtttagcagcttgtattagtaatactattaaaaaagatgttgtacaaaggatcatggggctagtttaggtgctcttttgtttgtttttgacttttttgttgtactggtctgtggttgctttgagtaattgtcgtattattgttatctataacactggtattttcttttgctttcctttatttgagctgctattttgggtgaagctgaaataaaactttatctaatggcttccaattcatctgatggtagttgtggttcagttaactactaattgttcacgttctcttgttatctataatattggtattttttataacattgattactcaacattacaatagttgtctagtatcatggagcttatttgtccataagggaatggatatctaatgaagaatataacaacaaaaggctctaatgtgagtcgtccttattacaatttccctggctcagataagggtaaatttaggaatgatttttgtatgtttttttttaatgttaaatcttaataagggttatgtgacagggaaaaaatatctaagattgtaagctgtactcatttgacgatgaactcaagcattgttcctgtggacgtggcttttgtcgcactccctttgtaaggggagaaagaatttgatgttgctgtgttatggtgagcatttttaagggctaataattataagtatgttattttagagatgtatcatgtgtgtgcatgtgtgtatgggcagggccatggtgattgcggattctttatgaggatcacgtcaacctggcaattgccttcgagttccactctctcgacacaatttcagtcgctttccaaggcttcgagttccacttccttgacacagtttcaatttccttcaagtcctttgcgacgcacttccttagcacagtctcaatcttccactgctagttccactttctcgacacattttcagtcttcttctagcccttcgcgcccgactctcttagcacaatctcaatctccaagtacacaagatttggtgaggaggttttggtctccttctagccaagatgtggtgaacaagaaaactgagctacttgcacaatctctcgaagtggctcaatcaagtgctgctgcctatcttaatatcattaaaaatttgctgattgtgaattggattatgagtagcttgcaaaatggggtggttgcgtagagtagaatagaaagcttaaacttgatgcatttgactgagccacttaagttctacgcaaccaccccattttgtaagctactcatcatcctcaattgctaattatttgaccaaaatatgatatgatatggtaattatttaactaaaatatgatagtagtatattcgaggagtaaaactgtatgatagttgaacaagaaactttgatcaattttggaagtagtattattgctgctaaataatgcatgggtaaggttttatcaaataatttttagtagttgaattaatttgttggaaaaagtaggaggaggtgactacaagaaaatcgagaatagaggaattgaaaacggaagcagtgctactgttgctaatcaatggcctcctcataattccagtcccaatgcatggactaaaaaatctattattggaggaaatcttaggtaattatcttcttccccttcccctcattagtgtcaacacttcagcctcaatctatcattgctcaaaaattatagaatggattgaactggcaatccagaccatcctcagaacaacttctagtattaaaaaaaaaaggaaaaatataggaagtcgagattgaagcatgagatgagatcacatagtgaaatattttgtgactatgtatatgtttatattttgcagattgtagtcacaattgtttcactatatgatctcatttcatgcttcagtcttgacttcttgtatttattcttttttttttcttgacactagaagttgttgtgatggtagtctagattgtcagttctatccattttataatttttgagcaatgatagattgaggctaaagtgttgagactgatgaggggaaagggaagaagataattgtcttgggtttcctccaataacaggtttcatcgtccatgtgttttgaggaggccattgtttagcaacagtagcactgcttccatttccaattcttctgttctttaattttctcgaagtcacctttgtaggcatcatatatccatatgatgtattaagtgttgcttagggtttagggatggggacgaggatggggcgaggaatcctcgctccattccccatttagacgaggaatctccgtcccattaggggcgggtccccgcgaagccccatcccattccccgtgggagaaatatgcattcctatccttaacgcccataattgggatattacctataaaattgtgtatgaattaataaataataaaagaaaggtaaaaataaaataagaaataaaaagtgggtatacaatgtaattttttcaaaaaaaaaaacttaaaatatgagatttctaaaaaagtccacactaatgtaaaagaaattaaaaaattcataactcaaagcattatttatttatttattttttataaaaaagcattatttgtctatgccataaaaaattaactcttataactttccaaataatttttacaaaatgaaattgcccacaatataaagtgtatataaattggggtgtacaatttgtgggctgatcaaccgaacccggccagccatttaattttgggctttagacacggtaacaccaacttgaactgaactgaaaacccaacccaacctcacagcacacggtaaaaaccctaacacaacggtaattgaactgaaacctttttcactgttccaacttccaagtactctcaacttctcctctttcgcaacttctaaaaaactgttccaacttccaagtactctcaacttcccttgtttcacaacttctaaaaattgatccctccatcatctctcttctactttaaacatacggtaacaccaactttaaccgataccctctttcacaacttctgaaaaccctcatctctcttttccctctcttgaaacccctttcgaaacttgctccctccctcatctctcgtctcctttaacggttagttttcttattaattaattaaatgattttaatataattttaaaagtagaaataaaataatttttttaaggtacttatcaatgacgacaatgtcgtcattgattatataatcaatgatgatattgtcgtcgttgatttaccatattaataaaaaaaaaaattattattaacaacaactttgtcgtcgttgatattaaattttgctaacgacattaaatgttgttgttgataatgctttttgccgacgaattattcctaacgacttttcactaacgaaatgtcctcattgatagagataatactgacgaaaaagaggattttcaccaacaaaatttgtcctcattaatgcccatcattcttgtagtgacaagtataagtaattggattacactacaacattttgattcaatacaggcgagagtattaccggcggagccaaaccgtcggtattaatggggttattaccggcgcaaaatgtattctgccagtattactttttaataattaaaaaaaatatttaataaattatagtattaccgacagaaaatccgcctctaatactttgggcgggattttgaccgcccaaaatttaaaatgactaataccggtagactagtagaggtaggttccgttggtattagtcaaataattctgaccgttttattaatactggcggaatccctattaatactgacgggtcccgccggtaataaaaatctatataatcccaacccctaacttagaaaatatttttcatttttcccccaccaaatttcaccccaccccgacccttttcctcctctgccatcctccgaccctcctcttctccgcccatttttccaccgtaaactgccattgcatcgccagtttctttgacaggtaatgtgtttttcactatgtttttttcatttctccgtttcatttttgtttttcttttacagttatttattttttgtccatgcttgaagtattgggggagatactttgctcgaaacagtaacggaaagtaaaaacgcgagaagagtaaaagattggcccaaaatttgcaggtttgtttttttttattagatttatttttccatctttgaatgtttagtaattggtatattacatatatatatatatatgtgtatgtgtaaatatatgtgattggtattgtataaatatataattttatttatgtgtatatataatatgtatatgtatgtgttttatgtaaatgtataatttgtaaacaatgtattatatattatatatataatatgtatatataagatattgttaaaaaaatttaaatgtgtaaatttgtaaaagtttaaattttaagtgtatatagtaatatatataatatattgtttaaaagttttaaatgtgaaaatttgtatatagtaatatatataatatatatataatatattgattaaaagtttaaaatgtgtaaatttataaaattttagattttaagtgtatatagtaataaatgtattttatagtaataaatgagtaatttttttaatttcttttaaaattttgaatagttagaaaattataagtttgttaaataattaattatgtaatgttttttaaaaattttctaaaaacttagaataagaatatattaattactcaaaaagttaattataataaaaataatattttaaaataattatgtaatattgtagtatttaaataataaagatttaacatgaa

SEQ ID NO: 112504 - DNA, 3237 bp, Cannabis sativa
tttttaacgggcaaaaaagttcagggggcacgatttaatacatgtcaaagttcgggggaaaaaattactaattagcctatatatattttttagagtgaaattttttaaaaattattttattaaattatgtaagatttaatatttaattagactaatatcaatattgatatgtaagaggtaagagaatgttaaacatcattgatatcttttagttatttaaagaaagatatgccatgtcaaaaagtacgtctatatttacagctaggatggcaaaataagttttaatacggtacttaaaaatatgaatatattatgaattttacagataaaggttgagaaaattagacacggatcgaaatcgagtcaacacgtcttgatgcaaaataaaaatagatcaaacacaacactgtttaatacgaatttgacacgatttttttaaataaaacaaaataaaaaattattatataataaaataactatataaaaatatatatttattaatttaatgtgaatttaaaaattttaatttttattatatataacaaattataaatatataaatgcaatatgtgagttttctttatgataataacaaaatatgtcaaaatgagtcaacaggaacacaataggatttgtatcggttgaaaaaattaagtatgaattaaaaaataaatcgatacacctaccacaaaatataaaaacctgtgacataaaatataacatgaacacgttttttcttaccgttttaattgagaatgtgttgttgaccaataaaggtatacatacgcccatcgtgataaaatataaattctctgatatttttacaattcttagaaagttttggtaaatatttaatacagtcttttaataaggataagttcgtttgttgtttttgttaagaacttgctggcttgaaagtcatgaatgaaattatttcgatatattttgttttttttgaaaagtgatatattcattaatgaaatataaataaaccgttttctttttttcttagttaattctttttaaatgtttagtcaagtcaatcattcctctatttgaacatataaagagagaattaatactatgggaccagaattaatatcatgggacccttcatgttccacatttctttttactccgggacccattaatgtaccttgaaacttaaaatcaaagctacaataacaccctttttatttgctataattgcttcatttgaaaacatattacacttcactttttttaatcccctattcctattcctattccatgtattaattctttttgtattatacaaatcactattttttttttctagttaaaggagttattttttatcaacctaattagaaagagttgattatgagaatttgaactctaaatcaacacattcacaacttttcatgcagtcaactcatttagctgatcaaaaacatataatgtataatatgaaaaagggttttgtcatgcaactatttgttctagtaattaactcactaatatttagtaatacataccattaaaataatattggctaattaaccctaagcacattagtttccttttgcttggtttcatgcaatgcttgtgcatgtagttatgagaaacctatatatatcatgaacaagctgagtaaattaaagttgactaggtataattaaattacttacatgtgttaccacaatcatgactaaatatctggtaatggggaagattaaaaggagagttttaagattaattaagatatatattaagcttcttttttaaaacaaataatacaaattaatcatgcatgcggatataggagggtgcggatcagagaagccaggaaagccatcaccgacggtacggaataaagcacagaccaagacacaaaaggaccctatacgacactttgtttaagcccttttttggtgatatatgttgcattgttaagtacatgatcaaatttgggttaataaaagcattgagagcccagaagccaaaatccatttcatgccccagtggtccagctaaaaaagaacatgtcagaacaagaccaaactagtacgtggtccttaacctatatatacacatatagggcctatatatgtatgagatttattttttcttttttataaatattgtttttgctgagcttatcctagatgagaaacagactgtctaattaatagaaaggcttgcctcatatggtattacttcgtattggaatattaattggaattgtcaacttttttttttcatccttttttaaaaaattaattcatggtcatgaggactgacagaagcttagtgtatatatacaacgactatatattatatttttttaatcgacaaaggatacataattattgaaaatgttgtgacaaaaaaggaccacaaaaaatcatatttttggaccactactacttttgtgtggtttgggtttcttttcctgactaaacgtggtccttaagcttgcttttgttacatttgcttaaaaacattccattgtcttaatacatggcaatcattcaattatgacaaaagtttacaccctcaaacaaagatcagagaagaaaaagaaaagttgaattcgagatgatatgggtttcatcaaaggataagctcgagtcatcataatttccatatatatatggtcatattttctttttttttttttgttttttttataccgacaaaaaaacaaaaactccattagaatatcaaatcgttcattaatacaaaaataaatttcaatggagcattgctcacttgaataacaggatcagaaaatgagctacattatagatcccgttaggaagtgaactacattgtttgcaaatcatttttaaaaagacctctttattctcgaaaccagccaacagactcttacaactatcaattattttgtcaaagtaggacaacatggataaggaactttaattgtgatagcttggacaactacaagacaatctgtttcaacttcctctggttgaacatttcctctagtgtagacactcaagcctcttctaaagcgccagtatgatttcgggcaacacaagaataattaaaacagttaggatgatcaaagattcaccttaatcacttcttcatttggagttcgccaatgctcaacaccaggatttatcaatcctataaagatgtattttatgtttagtctttgaaattccgtattttaatattcccagtttgattatttaattaagtgattaattaaatgcggaataataaaac

SEQ ID NO: 112505 - DNA, 2939 bp, Cannabis sativa
aaaaaaaaaaaaaaaactcttcatcctactcataaaaatgccatcaaaattactggaaattgtcaattctagtttacccacattattttttaagcatcccatccacctccatttcttgtagaatctcatcaaacacctcaatggagaaacattagttccctactctagcccccatactctgatagatttaacaggaaagagcatgagcaaagaataaagttcctgaacactatccactcaggctaagccacaaattttaggggaaattcaacattatttgttaaacttcaacactaaaatcagaaaattcaacgtgaaaatctagcacaccacaggaaagagaatcaagtctaaaaagaatcagaactcttactttccagttactctaagtgaagtcccttgcttgaagtgcggtgaagatggatgcaagtcctccagtaaaaccaatgccccggattttattactgacgaagccatcaaacctttcaaagtagtataacttatagttccttactggttagtggctacaactggctagtgcaagtgaataaaatcatcaatgaaaccacccaaaaaatgcaatctttgacagatatgtacaatgtgatgattcaattaatcactactcatattcatatttctctcaaccaagatgggtattgttctttcaatcccttacaaacccattaaaaactcctaccgcatctagcttatggaacctttatttcacacacctgtacaagtatagaaaagtacaggagagaatgagaaatggaaagccacactcaaaaatcaaacaaactctattacaccagcaaagatatagaatcttttccccataaatcaagttgcttccctgccacattcatatggataaggcttgtattaatatggcctttgaatcattgaaaatgtgaaactatgagaaagcatcccaaatagttccagacagctcttctaaatgtctgattttttttcttctgacaattgaatgtgtgaatcttagggataaacaaagatgaatcggataactacttgattggcatgcaaaagggatcttttagtaaaatccattgccagagaagatcactggtaagtacacttgactaagatgatttaagagcccaaaaacacctgtcctcacatgccatttttcaaaagaaattttcaaatcttgctggccgccacaactagaagactcataatctagagtatatgcatttgcctcaattcatggccatgttttacaaagactacctcaatgcttggctactaagccaattgctaagaatttcatatgggttcttactaaaacacccaaatgccacatcacagatactcagtttgacccaccacttattctattaagaaaaagttcaccaaagtcagaactctctaaaacaataaacaataaaacttgaaaaccccactgataaacaagcaaaatcattacattaaaataatcacattttagttatatttgatctagatcatgatatgctattttaatgtataacatataatatcatattctttataaacatatacacactgcatatcatacactatgttattttaacattcaaaccaacaagtacttgttcaatagcaaaaaagtcttaacagttatgagcaagctaaaaatacaaaattaatggcactaccagacatgtcatagaaagagaatatataaataaactaatatgaccacctatagatatagtggtagtgtttaactaaattcacaacaatcttgagtatattttacagaaagaatggaaagtattacaaaagtatcaacattatatcattaacaaattacatctaagaatttcaagctctcaataaaagtttcaaaactagtactaacttattctatcaaatgcattttatcaaacactttgcatacaattcaaaaatcatcccaaaacaaaaacatttaaataactaggaaaaaaattgagaaggtgtgtgaatggtgttccgtgttgataaatgtggaaaataaaagttgacctacccgaatgaaattgaaaagcaaacaaggcaaaattcatagaaagggaaggtggccataggtgaaaaagaaaaggttggttattttgaagttggaaattgaagacatttttggtatcttacagtgagaggagcgatacttttacttcgttactcgatcggagatccttccgttgaatggactgttgctgaaaatggcggcaaaataatatatgagtttgggtttataaaaagaccaatttgcggtaaaacccctttatattttgatttttatacacttaatctctctcttttttttttttggcaaaactccttatgttttaatttttatacatttaacctccttatctttttttagtggcaaaatcctcttatattttaatttttatacacttaacttcctttttttttgggggggcaaaacccccttatatttatttttctttgcatatttaacagttaaatattactgttaaatattaattggatgaccactgtgtacacatgtgtatatataacagtaaaacctcaaagtcgatacagtagtaatccagttagtatttaacggtaatatctaactaaaactttaaatttacaaagaaaaataaactttagcattgtaatttcaattttcattccattttataattacacaaaaccaagtcttgacacttcaactattcattcttcctcttcttctatggaaaaaaaaaataattttccttttataaatgaaaattttgctcttgagaaaattaatccccctacctacatgaaatcttaaaacaagaccttgaaaatgaactcatttgtaaaagaaaaaattaaacatacatttatagatacatatatagggatatgattttgtcccgttattgtactttcacggattgtaatctgtgatgtacggcagccgtcagatg

SEQ ID NO: 112506 - DNA, 1176 bp, Cannabis sativa
tgtactcatgcaaatggcagtaccaacattaaggactgcagctggtttagggaatttcaattcagagcttaaacacattcaactatgatttgatccgacgaagagaacgtacacgaagatttaacgattcttgatcttgattcggggcgggcagaggttgggatctagcaacaaagctaatttcagagttgaattttatcaaagagtgaattgaagtactgcttggtgatatgctgcagatcaattctttaattattctagcttcatatgtgatttgaagaggtcaaaatgtactttctcagccaattaatatatgaggaaattcaaactaacataatggggttagttcataagatgttactaagaaagatcaaaggaaagcaataatgagtatgatttttttctttcttttttttttcttaacttgcagtactcaatccatcgagttctttattcataattcttaattttcacaacttaaaacattaatactgctatcatattaaaagcttatataatactatagttgcagtaaattttgtctttgatgcatatatggaattgaccaagattatattgtgaatcacaagttttaaatattgtggtgttgcatgaaccacatcgattctttaacttttttttttgacaatgaactttcattgaatataattagagtttagtacatcatagagaaatggaggaatcgattctttaactttgataagctgtttctactagttttttcaacaccaccgagtaaaaaaaaaatatgtatatgagaataaaaaaaacaagaattcaataaagacttttatttagtataacttctaccttttaacttattcaattcatagttatgtaagaaattgaaaatatgaatattattatttcgtcccaccaaaacattaaaattgtaaaactcttaattacaacacaaatgatcatgtttttgtgactctttataattagtccgtagtaaatagcaccacattattttaggacaacttttcaatcattttctagaatttttatgtgtaaccaataaactaaaaagaaatagggaaatttacacccactactaatttttcccattttattacatttatactgttccacggcaaaaacaacatttatactgtttttttttttttttttggcagtttactgccttttaaa

SEQ ID NO: 112507 - DNA, 3159 bp, Cannabis sativa
  modified_base (3124)..(3133): a, c, t, g, unknown or other
taatatccactcaccatttcctctgaacgacatcttaagaaatttgtgaaatccttttgaaactgatccaaatatgctttcaacaccaaaggaggacttgtcttcgaaatgtgaatatttcctttgttataggcttctccagtttcatcatctactaacccacttgggaccttaatttataatattttatatgtataatactattattattgaattaaatatataaatatttgaaataatcatctcaaaataataccaaacattacaacccattacactccaaaaaattttatttttagttacaacaaaacgtgtgactaattataaaacataatttttatgctatggctaaaaagtctataactaaaggtattaatttgtcgcaaaaattataattttattgtgactaaaattaaattagaaacaatttgtacctaaatactaagttttaatcataagtaatttttttattttaactaaaagtcatatttaatcacaaaaatattatgttgtaacgtctaaaagattatcactataaagaaatagaaataggaacggaagaacactctttgcttatttcccgtcttgtgtgtatcctcctaaaagaattgtttaagattgaaaaaagtagtatttttgttttagtgacaacagactaataaaaacacaataatctacaatgaaatttaactttagtgactagctaatcttatttttagcggcatatttttaattgataacatagaaaatggacataaatggacaaataatacttttcatattgagccttaattataaacaaactaacctttgacaaccaatgcaaactgtaagaagagtgaacaatatgaatggaattgttcggaaaaagtcttccataaaaactccctggcatagccgcgatgaagcatggcccaaacttatcacccttttcattcttaagcttatcatagaaactcgaaagagattgaaagacggcattgaaatcgttcccaaaaagatcgttgagaaaaacttggaaagtgggtgagttgatcttcaaggattggcaaatggcttcaatgatgtctaaaatgtaagacaccacagttagtgtgttagggccggacgagcaacccaagtctgccatcatcaaacattctggtaacattttattagtaccataaacttgttttatagtactttccagtgtctctctcgcagttgatatcgccactctctattattaaaaatattatgtatgaaaccaattaatttacaaataaattaattaatttgaaaaaaatgaagaaatcgtgtaaatacataaataataaaatgtagatattaaacatacttgatgagaagagttgtttgcatagctagtttggccaacaccaccattcatgtgtaggacttgctctgcatccattattaatattagtgttatagcttttgctctgtttttattgtgatgagagcttgtatatattgatagtgatttgtgctgtccaagggcatattttacttttacatttatatatacacatatttttattttaccctaatattaaaaaaattaaataaccatttttaatatttttttatattatatttttgtgttaattttaataccttcccattatattagttgtcgccagagctagggaacctgaaaaaatatagcaacaccaaaccaaaaatacagttatattagaatgacaattttcaaaataaaaattaatatacaaacttataatttaacacacaacttaaaatacaagctcaacattgctaaaaaactaaaaaacaacaaaaattctaagtataactagccaaaggtattaacctttggctagtaacaacaaactaacaccttaatttaaaattggtgaaaattaatatcaaactggttatatttaaaattaaacttatcggaaacttctctgtaattgtaggccctccacaaaataacctacaaaataacaaaaaataaaactctattaccacacaatataataaaaagataatatgaaagaacgatgatagtaaaccaaaccatattaaatataaggacttaaaaaagactttaaaacttatctgttaaaattgaaaagttcattgaagtagaaatcatgagtacaaaaatggattacaggacaagccataataaattgcacaatgccataaaaggcacaaaagccttaaaaggcatcaaaactataaaaagggtccaaaaacaagtgtggtcttattatcatatatactttaaacttataataattaatactatttgaataactagtaaaaagaaaataaatcctattacactatattttaatacaatgtgtgtttggatatatatatgaagtgataattacctataaacttttaatattttatttggtaaaataattaataattacacccaaaaataatatttttttggtagttaatacttaaaacttttttagtaatatttaccaattctcatgggagagtgtaattgtttaagtgtaatatcaattatttcaaattacataattaaagtataattacataatcacatccaattatttaattaaattgtataattacatccaattatataaaaatctaattacactatagttaatttctaatttcctaacgcgctttaaatcacatcttactttttttttttgtttgtcttttagagaagaagaataaagtagtgataataataagttttgtttggtggttggtcttagtccatgggtcagcatgtaattatgggcaattttatttttatcttgctttttactaaatgtacacttttatttctgtttataatgttttgttatttatggttgttttgcttaattattctgttcttttttttatctttaattattgtctattttgttttggttatttgtactgctgttgatgaggttcatcgtaaatttggtgatggtttggtacatgcatatcgatcttgtttgatctttagttgggtttacatttggatgcactgactgatacgggccatcctttatgtctttttgtactttgtcgagccactattttatttgtgcacctcgcataatacattgttgaggcatttctggagaggtgtgtgcactacaaatttttttacttttannnnnnnnnnaacttgtgattaaaagtaaaaaaatt

SEQ ID NO: 112508 - DNA, 6863 bp, Cannabis sativa
ttcaaataaaaaactaaaatattaaataaaattaacactacgtggcttgacacgtaacaatcacctagtatatttataggcagtgacacagacctagaatttttagtttgtgagggcttatttatcataaaaaatatttatacttacattataactactattactagatttatttatttttgtgggggcttttctactattttagttcataattatcaatttaaaaaatttacatttaattttttaaaagacaatatttttgttagtggggctatatatagcccccacaataatataactaggtccgtcactgtttatagaaaatgtgatctagcatattattagagtatattttacaagctacattacactaaattggtggagaatcttcacacaatttcacttcaatagaacaccaaattatatatcaactagggaactaagctgcgcttcgcgtggtgtttctaaacttttataatctttatatataaatatatatattgtacttataataagtgatataatctaaaacataatattttcatgcatgtttatattattattaattactataaaagaattgattgtaaatttattaatttaattatataattagattttattatatcattaattataatttattattttatataatttttttggtaagcatatcaaatattgaataaaaaatatggaaaaaataataataggttgctaactcatattttttggcttataaatatatagatatattatataaatatataaatttaatttgatgacataaaataataacaaaaaattaaattataattaactgagcaagatcaagttatcaatcactcatatatttttggacgattgagaagaatgtaagaatactttgtttatagtatagaagtatactaataatgtagttcttaatacatgtggaattttacaaataataataataataacaaatatataagataaactaaatttattaaaattcttttaaaataaattaaaatattgaaggatgttccctcattttctttagtactttcctttatataaatatatagaaattagatattgatttacaaaaatacttagaccgatagattttataataatgtgtgagatttggactaaagtaaaaataatgcaacttgtaatttttataagattttgttattaaaaaataattactatgaaaagtaattatattttaaaaattataaaataaattattaaaaatttaaattgttttatataggtaataatttcatacatatttaactaagattagtagtacaaaataaaaataaaaatctaaaaaaatatgtattttttattaataattataggttttaattattttacatacgtaataatactatatatcttcaacaaaaattaataatttaaaataaaaaattttaaaaaatatatttttaatttgttaaaatattttaagaattttttttaaattttaaatatttgacaaagactaaaaaaaatataaaaatatatgtaaataaataatatcaatcacccacatattttgatcactaattggggaagattatatttatcaatcacccacatataaaataaataatactaattttgaataaacaatagtaagatatatattctataagtttaacattcacaatagtatcatatcactaaaagtatatatgaaaaatatatagttaaggagtcttattattcttagtttttttattttttttgaaaagagaagccttattattctaatgtgatccccgcctaaagtgcagtgagttgaatactgtcattcaagtttatgacctttgcagtggctgtgctaaagtgactcaagtaagccttgagtgactcgcctggttgttgctttatgttggttaatgatgatacttcaggtcatctgtctctagcggcttgaaattgctttttaaagttatcagacaaatgtttccatgatgttatagaatgatgagtatatttgtcgaaccaactgctcggagctcttgttaaagaagttgggaataaaatgcaacatagattattcgtgacattgttagcttgcattatagtattaaagtttttcaagtgagtgactgggtccatagtcccatcatactgcgaaacatgtgggtttttgaatgcctgaggaaactcagaatttaagatatcaagatgaaacggctcagcttcttcatccgaatcgtaaccaggcaattttccatgttctccatcctgacactttctgaacttatcctctagttcaattattcgcaattggatgggatctccttgttgttgatttgcattttgattgagttgatggcgcaaatcaggtgcattttgattcaaacgctcgtgaagatctgactatctttgatttaagcattctcgaaggtcaggctgccttcgctcataattactcatagatcttgtctccgagtaactttcggattgataacttcgtgaattgctgatactttcttggtcagcataacgtcgaggtttacttccttctcgcatttgcctacccgatcgactatgtcctcgagaccttgaatgtcccagacttgaacttgcttcatcttgtatcagccttctccttcaaaagaggttagatacacgtcctctattcaagtatgtgtgtacatcctctctctctgatcgagaaggacgttgagggtgacttggaggtagcccacctgaccttggttgatttcgagggtttctttcattaccatgagggatttcttggttccctggtcgaggctgtctcgtatcctcattcttgcgagatacttctggtacatcattttgctcattcccttggtttataaatccttgggaaacttgaggaacatctcgccgttgctcttgattatctgtttgattatctattggaagatcccttgtaccctcaggttgttcttcctaggcgttttggggatttccctagtttgtttcttatctcttggttctcgaccctcaaggtcaacctcgtggtcttcttaccgaaggatcaggttgattctaaggatttattccttgtacccaggccgccacatcctctctttcaaactcagtatttcattggttagattcggctaagcattcttgaagtttcctattttctaattccatcaatgatatatatctagttgggtcgtaagcatcctcgcttttaggcacgtatctagcagaattattgacatcttcagtccttctttctgaatttcgatcaccaccactatcgttcttccttgcacgtgatgtttcaatggtatggggtctttgagatcccattggctcttttccagggcgacatgttgtttcttcagggcaattttcatcattttgattgttatcagccattgaatatggacaaatttctgtttgtaaggagggatttttctgagttttatcactaaggctctcaataaaagcaccaaattgttatgcaaatttttgttaaccaaaaataaatagccttttagtaataaattatcaacagaaattaataagttataaatgatagtataattccacatatttttacgtagttttgtagtgaaaatctacctactctatgagtccttattattagggatattttaaagtacagaatacaatatctgattttgaataatagtcttttctccctggcactcaagactgggatgagactttgattaaccgttgttttactcaagaagtagctcgggccattctacaaatcaagcctattgtaaaccaagatgacattctcttttggaggggcagcaggaatggaactttttctgtgaaaagtgcgttgtggaaggctcagagtgatagatttcatcctaaaaaagatgtttggaaactgctatggaagttgaagctgcatcctagacaatcactactcatatggaaagcactgactagcagtcttcctacaaaaaatcggctgggatttttgcatagcagggataatttgtgctgcttctgtggtgtagagcctgagactgagtgccatgttttccgagattgtcacttcacaccgaatttgtggttccttagtccttggggtatcagaacggatcgtttagtctcgctatcatttgaggagttcttcatctggttatgcaattgcaatgatgataaactcatcattttcggggcttgtctgtttgagacggtttggaatagcagaaatggagtggtattcagagctgtatccccgagggtggatctcatccttaggtccatcctgattcgtgctgaagagttttataactcagaggatgtggatgagagtctccgagatcatgaggctgctgatattctcaaggattgtgatcggtgggatattaagttggctgttgatgcttctatccttgacaactcggctggattgggagttgttcagatggatgtgcttagggatgaggccatcacagtaatgcaagctctatcggtgtcgggggtgctggaggctgagttactagcaatccgcgaggccctgcggctagcactggaagaaaactgctgctctgtgcaaatttcttctgactcagctcaagctgtccaagctctgcaggtgagggaaattccgtttgcttggggttcctatcccatctttgttgattgtttaagtttaatatctctttttgcgttctgttctgttgtttttattccttgtgcggataattctttggcggactctgtggctagatatgccagaattaatcgtttgaactcgagatatgttttcagggaggttgccccttttgtggcaatcagttagtgtgtgtttttttgtgttgaataaagttcttacttaccaaaaaaaatatacaactctagtattgtctaacaccttaataatgtctcttaatatcaaattcattagtgacagattttgtgaatgaaaacttacagtgtaaacaaaaatgattgctatacaatatgaggagactaagtttgtcaaggtttacaagtattcttgccaatacctgtgcactttgacgaaccccttcacctcaaacagtctaacaatattaaattactaatccatgaatacataaacactactaggtctttgaataaaagtgtagcaaattatacattcatcattatcttcacaatgactccaccataataagcgtggaggtggaacaaggtggtaaccaccaccttggctggtttgtgttagaatatattaactgtaaaaattaggaataattgtagttatttagtttcctattttgtctctctagttttctatataaatatattttattctattgattaatatacacaattgattaccattttctacatgatatcagagcaatttgattagggttgagaattcaaaatttcagttgattccaaaattagggtttatgtttgaagtttggttctttctttattttaggatttctttttcaataaccctatttggagtgtgttttagttctcaccacctacacaggagggctgcctagctgttcattgtgaaaacccaaaagtccaaccaccagaaacatcgcatgtgaggctcacatgccacccctagccgcactaatcttacccatgcagtagtgcgtaggtcgagtgggaccatgaatctggcaccgattcacttatgctccttatttgacaatctcttattcttttctctttgttattcttctttgtttgtggtttggtaattctcacttagtgtttggatgttctttcgtttttagtttttccctagtcttttttaatatttgcttttgagattatggccgagacaaaaccatatccaaaactagtggttgtttctgatctggttcccatgatgtctaatatcacgaactataaattgattggttcaaattaattagaatggagtaagacgatttaactttatcttaaaagtattgacaaaggtaatcacttgattgatggtcctccccaagaaaaagatgattcaagaaaactggctacaagaggatgcttacttgtttcctcaaattcaaaattctattgataatgaggtaattagtttggtcaataattgtaaattggtcaaagaactaatagattacttagaatttttgtattatgaaaaagacaatctatgtcgcatgtatgatgtttacaaagccttttatcatgatgagaaacaagattattctcttatgaactactttatggaatttaagagaatatatgaagagcttaatgtgatgttgccatttagtcctgatgtgaaggttcaacaacaccagcaagagaagatggttatcatgagctttctagcaggtttttcatctgaatttgactctgcaaagtcataggttcttcttggtatgatgtctccttttaacaagatgcctttagttgtgatctttgaacgaaaactactccatattttacttttaacaatactttggttagtcataataatcgtgcactatagaaaaactctactccaagtggttacaaaggaggcaattcacaagaatctaataatcaaacaccaaaatctagaagcattatgtgcaactattgtaacaaaccagaccacaccaagtcttagtgtaaaaaggtacagtttaaaaatcagtaaaaaacaatatgctaacattgcaagcactagtgatgcatctaaaccccacgacctaagcacctaaacttcctagaattgagcgtacactcaaccctagcctgacacaccaagccgagcactcaatataagccacctagagttgtacccttaaacactacctcattatcgttcaagacttcatggaagctactggtgcattaagtttaatagtgaaaaaccgtgtttttgcaaatgtcagttgtatata

SEQ ID NO: 112509 - DNA, 3328 bp, Cannabis sativa
  modified_base (3262)..(3274): a, c, t, g, unknown or other
  modified_base (3302)..(3303): a, c, t, g, unknown or other
aataagctatttttaactgcttaccaaacacctttttgtcacagcttttttgaaaaatagcttttagctttttcaaaagctgtgccaaactggctctaagtattggtaggagaggatgtaatctttgtttgagcactcttgtatttttgcaagtaagtaattatagaaggttccacatccaaaccagtgaacttgttatctgcagaaaggaaattatttcgcttgttacaaatagcccataaatatcaaaaaatacagctaagtcatctttgttgaactcatcataacctcttagcagaaattctttaatatcaccatatttattattgtagaaaaaagaagagaatctagactgtttccaaaacttacctgccctggaacaatgcaaaagggagtgagtgttagagtcgatttgatttaagtagatggaacaatatgagttatcaagaatttttctaaagaaaaggttaagctttgagggaagtagatgattaaaagcattccaaatgaagtgtctaatttttggggggggatgttagaagaccaaaatgacttccaccaaggcttaagagcatcaacattagaagtattgggattggggttattagggtttgcaagatggtaggcggagctgagtgtgagactgcccaaagggtcatgtctccaaatgagacagtccctattaatatgatagatgggaacattgaggacaaaactaatagtactttcatcaaagaaatggtttagcttgttaacgtcagtgtctatccgccctaataaaataagacacagtattctcaggtggataggaatcattgtgaaaagagatattccttgagtgagacaaccaattcggactagcaatttcagctgacttgccatctccgactttccaagcaagccctttagaaagaagattcctaccccaaaggagacttctccaacaaaaagattgattatgaccaatagaagctcggagtaaattattttggttgaaatatttagcttttatgagagaagcaacaagggaatcgggattagtgaagatacgccaagcttacttggcgaacatggcctgattatggtgaacaatatgatgaaaccaaagaaccccataaaattttgatttacagagttgatcccaatttatccactggagcttatgcttattgcccaaagatccctaccaaaaattagccatgaggctgctgaaatgcttacagattgagataggaagcttgtaacaagacatagcataggaggtgatagcttggatcacagatttaagcaagatctgtttcccgcccttagaaaagagttttttattccaaacagataatttattgctagctttttggagaaggaaaaggaaagaggatttttttgaacaggagaggcattggggaactcctagatatttgtcaatcaacagtttattctccatattaagagaattgaggaaaaaagatctatcgaaaggggtagtgttaggggagaagagcatggaggatttagctaagttaatcgtttggccagtggccttattatagagaagaaggatgtccttaatagcttcacaattgtgagctttttcctgagtaaaaagcaaattgtcatctgcaaaaaagtaaatgggaaatagaaggagcagaacgacagatggatatacccttgaactggttgtggagggttttatgattgataatagcagaaagtccttcaacaacaagaaggaaaaggtatggtgagagagggttgccttgcctaataacatgagaaggttgaaagggagtagacaggttattgcttatacaaagtctaaaagagacggaggagtcacatctaagtataagagatatcagctgagtagggaaggctagatgatgaagaatttcacggacaaattcccattcaactttgtttaaggctttttccatatccaacttaagtgtgtccaaacccaacttaccagattttctgttggaaatagcatgaatgacttcatttgctatgataatattattaaagataatgcgattgtgaaggaaagctccttggttatgagagataagatcattcagatgtttaagcctattagcaacagtcttcgaaacaactttgtaaatggtggagcagaggctgataggccagaaatccttaactctagtggcattcttatcttagggataagaacaaggatagtctcgttgataggagcaatgttggcaccagaattaagaatatgaagaacaacattgcaaaggtccctcctaatagtggaccaattcttctggtagaagaagggatttaagccatctggcccaggggccttatccctagcattttggaagagagcccatttgaattcagaaaaatcgaaaggattggccagatagtcatactgctggtgagtgatatgcttggttacacccctaagaacaatgttaatggaagccaaatctgtaccctttaatgtaaagaggtcagaataaaattggacaaagctattggtaatgtccctaagactggtgatagaggagttgtcatctaaagtgatggccttaatgaaattatttttctttattccagaggcacgattatggaagtatttagtgttcttatcaccagccttaagacaattagccctagactgctgcttccaaaaaacttctgatttaagcaaaagcgcgtctaaagaagattgaagatgattagctttgttaacaacattcggagagattgaaggactggagtaaatactttcaatagacgattgtaaattcttgatacggttcatgaagttgtttttgtccctcccccaagaaatcatgttaatgatgcaattattttgtttattaagaaaagagtaaagaggagaggtgaactgttctgattcctatcaatagactagctatcatgaatcagattgcaaaaatctggctccatgagccagtgattctcaaaatgaaatcaatgagcagttctgatattacgagaattattatcataatcaagcttaatggccctatggttacagccataaaagggaagatgatgaagagaagtagtggggaaaagggtaccccaggccttattattaattcccaatcaaggcgctcaagaagagtgccatgcttccaggtgaaatggctaccggtgaaaggaaaatgagatagattatgtttagacacaaaatgttaaaaattatgaatggcatgagaaggtggtaaatagttgctattgttggaattattttaccagnnnnnnnnnnnnntaacaagtatgtttgattaacatcctannatgaattctaaaacaatgaaattaa

SEQ ID NO: 112510 - DNA, 6113 bp, Cannabis sativa
  modified_base (27)..(40): a, c, t, g, unknown or other
taggatgttaatcaaacatacttggtnnnnnnnnnnnnnnctggtaaaatatttctaacacatttacattcgggtcactagaaacccaaagaccttcggcaacaattacatcccccaagtccaacaagtagcaagcattctttgtttcagtaaagttatgtccatttttctgtccaatactctacaaaattgattttgaagacaatatgttagtttttttaaaaaaaaaaaatctttaatatgataacaactttcataatttaccttaggagaagggatagtattcgattgtggtgcattgcgaaattggccttcgcttggtgttgctataccaccagcctaaacataaaaagcaagattagtttcattggtttaaaaaaaagtaaggtttataagtgtaagaaggaattatcaccaagtgttctttaagtagattcaacattttagtcattttgagcttcatattgtgttgctcttcttccaacttggagatcttgttattacacatattaactatagttagtttcgatcttgttacccctcttccttgtccgattaaacgaccagattttgggttaccaaacaattttgtcaaggcatcctcatcagtattgtctgtaattccagattttgggtcttcgtggagaatgtcatccaattctccctacatataaattagtaaagctaacttataaccttataaaataagtataaagtttaaaaattaaatgattaatactcacaaaaaattcagttgctgttgggttgacaggttcaccattcttcttggtatgggctctcctaaaggcatcaattctcgatacttttccatctccattttcttttttctacacaatacaacaatataaaaataaaataaaatagagactatagtaatagaaacaaaaatacaaactgttaaaaacttaattattaccatatcatcgattgttcgagcgtatcctcttcgacttaaggtgtgtggaatagctttctttcttctctcttgatatttggcccttatatcctatttaatagtaaaccaacaccatttagggaaaatgaacaacaacagtagcaacaacaaaattagtaaaaaattaggcagaatagtatgaaataaaaaccaaatgaaataaaaaaaaaaaaaaaaaaggcagcaacatcactattaattatctcatatttgataagaaatcttaccaaatgttctttactagtttttggagcaacaaatgctttccattctacattacttttggctagtctttcactctcatttttagcttcaataatatcctttacaagtctagattttccagatctccataattctgccatcatttcaaagcacatcttttttttgccaatcatcatgtaagtcatattgtgcctacaataggatatataataacatattatatgttaggagtagaactaaatagaaaataaatgatacaatcataagacttttcattctacctggagggattcccaaagaacatctttcatgattggtgaaacttttctccaatctgaaatagtctaaggaacaacctctcgcacgagagcacccacaaaagaagaaaattgtacagagttagtaccaatcggttgccctttttcattccaatttaatatcctcatgtcattatttctcttggttagatttgccaatagagtcttgcccctagtcttctttgttgagttcatttcattcacatttatatcttgaggtgtttattcaagctcagttggatttgcatctgttgttttctataatctaatagattttctaacagtttgatgtgcttgctgctttgtaacatctgaagtacctccattttggtttgtgtcagtcattttatcttgttgtacaagttctacctcagccagctcttcaaattctgtagcagccccttcttcaaatactctagcaaccccttcatcatcacctaagtcattttgttcctcccttcctcctttttcataaacacttttagctaccttttctacttcatagttaagggatcttctagtttttgaacttccaagtgacatctccatgtcttccaaattatcatttggatctggctctatattatagaccgtacgacgagttgttgctctagtactaagagcgggtggtgaatcaattacaactctaacaggtgcaaaaaacctacgaagagcactctttttctttaaaatagggttttcaagcaacgtatcatcccaatcagcttgactctttaatgattcttttctttttttggccacaatattacataaagcacctggacaaaggtgttttcttggagattttcaaaatgtactcattttccaagttgatgtttctgcaatataaacaaaaaataacatgagaaaagaaatcagatatgcatcatattgttgtcttcttaaattgaaatagaataacaaaaccaaatttgtttcatttaaagtcaaacaagaacgtaaaaggtaaaccataatttttttttttcactcatatactacaccaaaaattaataaaactaaatatttttcattaagccacagagtaatagtaagccagatacaaaaaagagtaaataaatttattcctttcaaagtacataaagtacattagaaaaaaaaatagagaactccattttcttcaatgacatcctctagacaatcacgtgattctagtccaaaataccctctatttggatcctttaaagctatataccaattacttgactcattttcccttgcataaaaagcttatttaacttgtgacgctaacacaaatggatccctaatcgattgggcttctcctatattaaaatttacaagtgtatagaactccaacttcttaacaccagttcgaatatttgcccaatcgcaccagaacagtggcaccttaaatgtacgataattaagcacaattatatccttgataacaccaaaatactcttctttatcattcaattgcccactgtcatgtgcttccaagtatacaccactgttttgatttgttttttcaactccttttttatggaatcgaatttcattaacaatgtaacctttataggaagtgacaccgtgacttggaccttcagccaattgagctaacatgtcatctgctttgttcaagtttgaaatctgaaaataaaaacatttctttaagaaatttgtgtactaatttaaaatataatcttttatctgggcaacagagtgcaaccttttcataaaaccatagaggaaaccctttggaatgtcgattccataacaaagtttgattattattcaagtttgaatgtctttctttcagctcatccatatggatattgagaaatggtgctacaatatctgagttgaacaacacataccgatgtgctactgccaagtttgcttggtcaagttcaaagcattctgctgctgatagtggattttcttatattaatgcgttatcatcattatcatttttcttaaaaaatgtttcataaaagcgtacacattcaacagcaagatagcgatttacaatacatccttttggccgtgcataatttgagacaaaacctttccgtactttcatgtatctctcaaaatggtacatccatccaaattgtactggaccacaaattctaacttctcgtgctaaatgaacaaccaagtgaatcattggatcaaagaaagaaggtggaaaatattcttctaatttgtaaagaatttcagcagcttctaattccaactttacagtatcctccttatcaacaacacactgacacaatccatgggaaaacttacaaagccgcaaaattatctctctacaaccatcttccattaaaccccttatagaaatagccaacaattattgcataatcacatgacaatcatcaaatataagccctgttagcttatgttttttcacatccacacaattgttaatattagagttatatccataaggcaatttcaagtcatatagccttttacaaaataactccttatcagattttgatagagtataatgtgcagcaggaaggcgagtaacaccatcttgttcatacggatggagatgaggcataatgcccatctctttcaaatctaatctcgagttgtagtgatctttagattttcctttgcaatccaacaatgtgttaagtatgctttcacaaacattcttttcaacatgcataacatcaaggttgtgacgaacaactaatatttcccaataaggcaggctaaaaaaaatagactgcttcctccacattttctcagtctcagtatcacgactcctcttttttccttttccaaaatcattagtcactttgcttaactgctctgttacttaaacacctgtcaatataattggacattgaggtgctctttcccttgacttagcggttgtataattcttctttcgataacggtgttcttgtgggaaaatctattatgattacaaaaggccatctttttgctatgctttaaccaaacaacatttgagttctcgccacatataggacaaccatacttccctttagttggacatccagctaagtttccatatgctagaaaatcatttatggtccataacaacatggcccttaaattaaaaaacttctttgtagaagcatcatatgtgtaaacaccattctacaattctagtaactcatctattaagggctgtaagtaaacatctatatcattcccgggttctttaggtccaggaatcaacatagatagaaaggtaaattcatccttcatgcacatttcaggtgccagattatatacaacgagtattatcggccaacaactgtatgtcgaagtcatatttttgtaagggtatcccatctacagtaagtcctaatcgaaggttattaggttctactgaaaactctggccatctcttatcaactgcatcccaagcctctgaatctactgggtgctgcattttcccatctactcttttattggttgaatgccattttaagctagtgtcaagttaaatctaatccctattttagaattagaaagtcaaaagtgttacctataggtgtatgtagagagagagaacgtggctgaaagacttgttttatctttccaatcgagtccctaaatggaagaaaaaagattaccctagaaaaaatcaagaactagatgcctaaatagaggtgaagagagagtatcaaagatggacaaaacaaaattcccagtacaataacagaaatcaaagcacaaaaggtccccgaaaaaattaagaacccacaccttaccttctctactcctgttatgcgatatgaagatcccacacgagaatggacgaagaaatgaagacttcaagccccttctaatggaagcttcaacaaattgaagaaaaaaactacccaaaccccaccaaatgaatcctcaacgaattgaagctagagagtgagaaaatatggtcagaacaaagcaaatggaaaaatataccaagaaaggggaaaacaaaaatacttaagttttttttagtgcctttagtgaaaatacacttagcgtgaattttgtgaaaagatatcgccttttttttttactcctgattactataacccttttaattgtttcctaaaaataattgccacctattttattggcctactataatactttttggaaaaagttataagtttgtgttaaggaaagggttatttcttgtagtggaagataacacttataaatgatccttcaatttatatatatcacaaaatactaatttaaaaataatggagtaactcctatattaaaaagaagatattagtaataaagtcaggaccactcatcaatagaaaagaagaataatatccccacagttatgtagtcaccgaatagatagatttaataagttaataaactactaaaataatatctagcatccatcattcctcaattctaattggcacttagctaatttaagtcatttagaccatctatttcagcttaaatgcaaaattagtttcattggatgtttaataagtaaaataagactaaactaattataatgactttcatctttaactgtaccatcctcatccaatagcatcaagctgagttcttggaatgggagaaaatagggggtgagcttataa

SEQ ID NO: 112511 - DNA, 3824 bp, Cannabis sativa
aagatgtataaattaagtctaaatatagaaacctaaaatacattaaatattatattttttttaagaaagaagatggcagtggcactataatttgggaagaagactagtgtggtgaagttaagccccatgttgaaattgaatgatatcccatgatacatttacatgcattgggtatgtgcctgtgtatggagtttggataaaatttgatattagcaatgattagggctttcgatttgattgatgggtcgggtctattgggacttgtgtgggtctacctttgcttgcatcatatcatacaaatgcctcacgtgctccactacaaatcttcattataaagggcaatttgggtatttgagcctttctttttgactgaatcattattcattattatcctatttgcttaagccatacatcatccacatgcaccttttttgggactccgtgacccattggttcccgtcgacaattctttcattccatctctgcccttatgttttttttccatcttttattttcttttttaactccacaaccacaacaacagcctttggttttataagttatttccatgtaaaacctaatcatatgaatgaacacgttatacatataagttgcatgttactgtactaagtaagtttgaatatcttaaaatgacgtttatacccctcttgtgacttactcaaaaaccaaaataataataaagtaatttttttttctttcttttatatatttatatatatagctagctcactcatttgtcagaaagagacgtttgagagaacggctaaatctcgataaaatactaaacaagtattttcgccctaattataagtatgtctcatctgattcaaacactaactactgtgaccaaatgtataattttttatttatcttttaaaagtaaaattaaatagtatttttcagaaagtgttttgctcgaagaacgtgaaagggttaatatgttttttaggagagcctatgctttcgtcatgctctcttgtcttttacaaatttttttaaaaagacgcctatgattaagaaagcatcatgattatttaatatactaaatattactagttaatcctcaaaagcttccatcatatctaacttgcaaacaaacctaagattggtttttactttctagcgctttgttattttgaaactttcaaatttgaaaagtgagatggtaaaggctaaagagaaagtaaaattgaagtaatgttaggggatcacattaattagtatttagtatttagtatagtactagtacctatagcactacattaactaatatgatcaaaagttagacttaactatagggaggtacgtagtacgtaatatatttataatatctgtgtgtattattgtacatacattattctcaacactagctacaattatttctactattttcataaacaaaattcaaaattgtagaagggacaaaaaaaaaatctgagtgttggtcaaaatttgcattaatcacaataaatttcaatttggtatttttacaagttttagaaagtttggataaagtaaccgagaaagtgaggaaaacagagaaaagtgtaaacgagatgaagaagtataaggaaaaagaaatagtcgtagtttgactatcttggagtctggcttttttgcattgagaaggatgaacatttattgttacatttgtttgggattaactaattagtaataactatgcaatgaatttagaaatttgatagaatggaaacattgattttggtttggtcttttgattttgcttagttggccaatcatgtgctgaaaggactattaaaatcaaaatactaatacatattacaatgactactactctacaatgtataggctctatgataggtaaccttttttcaagttctaaaaaaaggtttttgggtttttgaaacactttcacaactcaaattgagtggacccaactctcctatcttaggctcaactgaggttgggactttcccccaagtacaagaacgtaaagacaaagatttcatataccagtttcaattcaagtactactcatccatatcaaaaatactactaaaacgtggtagcatcattttccctaattagatttttttttttattatggtgtacgtaattaataattagttatattagtgtcagagacgacatttcttgggttttcctttctttaaattagtttagtcataattagaagcttcacgtatgaaaccttttcataattaggggactttgcttgttttgcaaggtcttgaattactatttcgaggttacttatgtgggattaatgatgatcatttcatcctaaaataaactgaacatttaagattaaagacagtaacagtattgtgtttcatcagagaataccttaattaattaaacaatactttaccagacagtatcaatgtgagggtaagtttaaaatcattgtattatatccttagcaacgccaacatatatcctctctcaacattacttcaacaaagcttgagttggagacgtgtcatttctaacccaagtattcaatcatttcaagtgcatgtataattcaaattttaaatttgtagtttatagctaaaaagaaaaaaaaaaaaaaaatgagctatagactatactataaatactagaacaaaaacattgagatcaaattaattaattgtagagtaaacgattgttaaaatttattattaaaatattgcattttcttaaaggaaattgttggagtatcatacttaatttttaatcagtaattaatttatattcaccagtaaatatatttaatattttgaagagttatcattttgttattaggtcgtgaaattttccccgtttgaaggattactcgatggtactcgcactcgtcccactcctaccatagtggatctgactgaatctgatcgaattattcctaattaatctttgattgggtcagcttagaccaattcgatggggttggctatttggatttatcttaaatgaattttggtcgtattttggttaactcgtctaactgatttaataaacgaatcgtattcaaattgacacgactaacacaaaattgatctattagtgaactaaaattaatctattagtgaactagttacagttattttaatattttaatatgttataattaagtcaacatgctgaatatgtcatgaacctattattaattattattggttgacttgtttttaaacaaaatatatttataaacgggttacatattcatgttaatttatttataaaggagttatgctcaaatttttttatcctgacacaattattaaatatatttattatgcaaaagtctcgatgcgacatgaatacgattcacaaataattgccacccctgggctattcaactaaatttttgttagaatgcttggtcacacttctcgctgtatttcctctcgctgtattttctcttaagatatatgaaaggtgttggctcttataccaaattagaaaagtaaattatatgatgaaaaagtggcaatgagctcaatgaaagtcataattaattatatgagatacaaataagattacagtagaaatttcaagtggttagaggtaatgaaattaaatagaatagaaagaaaataatttttattgcattaatttgtttggttatattttaaagtattagaatgacattgaaatgctctttctactattttggtggaatgatgactattccatttaaaaaaaaaaggaaagaaatactattttaatgtaagaagacaaaaaacttattaattttttattaattttttttatgcatttaaaattttatcttattattattcttattcgtattt

SEQ ID NO: 112512 - DNA, 3341 bp, Cannabis sativa
ctttttctttcttctttaattaatgctcgaattaaatttactcaaaaataaaaattaccaagtaagagagctcatcatcaagccatttgacaaaaggtacaacatcttcaatgtctgtaaacgcagcattctcaacttctttaattaaaaacctaatgaaatcgccctgtgtttcaacgtctgtttttatctgcaaaattaaaatacgacaacgaccaaaggaagtctcattaaacagattttaaaaattacaaaagatggccacaattttgataactgctttaatttgaaaagagaaaaaaattaaatagaaagtgaaaaagagaatatcaagtcgaatcctagcactgtcttatctaggaagcaaacgaaataaaatccaaacgaaaaagtagtagaagccaccaataataaagacacttacgacccatcactgttctctctctcactgacataatgaaacaaaaagctagtggcaatacctgtaaatattttcaaaattcaaaaagtaaaagaacgaaaaaaaacacagttaaccggtgacctagacttacagcgagcaagtaggcggaccggttctcaatctcgccgatcatgtcacgggcattggcggctgctggagcatctgtaacgttggattctttccgggagtccctcctcataagggagtggtaaaattcgaccacctctggtacttttctaacttttgccgtcattggcttcaaaccctttgaaggcggaggcggaggcggaggagctaccgttttgtttgatggtggcggaggtagtggtggagccgtgactgacttcgccggtggtggtggtggtggaggtggtggcggaaggacttgttccgtttgggctctgttttctaaagttgggatagtagcacatgctgctccggttggtgaaatcgccggcgatgatgacgatgacgatggcaatgacaatgttggtcttggaggtggttttggaactctgggtacccgagatctgacgttggagataactgcgtaggatgactctgctagttcctccgagttacacctcgagtgccttggcctctcactttcaacagcttctacttctctttttgagcccgaagcttcgattttttgttggctctcttggttaataatgttaacgtctaaagattttactccctttttcaagctcttgattagatttgacttaactgacacctccattaatccctgaaacctctgtgaagacgaaagctcatcactttcaacaaaaaactcatgagtgcctctgctacgatccaacggtcctgatgatttgttcaactctgcaacttcagcttccatcttcttaaccttactctcgtactcgcttctctcttcctcaagcttcattttcatttcctctgcctcttttctcaacttgtcattctctgcctccaaaccctcgattcttttcgaagctttttcgagctctgcttctctgtttgagatctcagtttcgagtatgggaacgatagccactgtctctttcaatagtttttgctcaagaagctcggtcttcaaccgagattctcgctcccggagctcttcgacgaggcggataagctcggtgacgtccggaggctttggctgaacctgtgcagacgatcttgggaagtaaacgccgaaggatcgtgagaaaactgttttctgagtaaccttagctccggagctcggtgaaggagagggtggttttgatggtgggggtgggggtggcgtttcagccggcttttttggatgagctggtgattttgttaggcccattgctactctcattttgccagccaccattgatgagaatgataaagcttcctcctttattttctagtactctctctctctcactgggtctttggggacgctattgttttaaagtcctcttgttttcaatctcatttgagtgaaagacttacaaagacgtccttgtctgattgtctgtccctctaaaggtgagtaagggtgtaggtttgggacttgaactttgtgacaaaaataaaaataatattaaaacgaatggtaatatttagatactcatacatacaaattacaaagagaaactgaaagaaaaggaacgttgtggccaataaattaaaaataaataaaacaatgcacagttaacgaggaacggtcttcttttgctcttggatccacttttacgcacttaatctacgcgcccacgctccgtgaggtcttgtgagttgtgacaccgcaagcgacaatcaatatccaataccatatcatatcatatggtacggtttgtaggcgataattgtttggagacactaatgtattttacgattttttttataattattattaaattaaaatgagtaggcgttaatattaaactaaactaatagttatattacgaagaatactacatatcatgaatgttttttagcatttttattttgtaggctgcagtcatttccatcatgttttttacattacttgcactattgataattttttttatttatttatttgaacaatgagatgtgaattaaaataaagagaggtattgccacacaagtacataatatttttcatttcatgcaatttggtttttcattaattaaatacttaaagttactttaaatttaagtttaaggtccaatgcgtaactttgttctctctaatgtttaattttcttgtttgtgtttttttattttggaggttgggattatcatggtaactgaagaagttgtggtggataatttgatctctaatgcaagtaagctaactgtgaaaattgaggaggacataggcgaaatggaagaagtcttgtttgatgaagaaatcttgaataatgaagaggatgatgaatggctgattaagacagagagtactggggagtttcttgaaagatttgtggtgacaagagtcttctccaaaagacagttcagcaagaactttgttagaactatttttgaaagaaaatgaagtttactccaaaatggaaggaagagattctgcaagtacctatgtgggattcatgttctcttgtgttattgaagctaaaaaagttattatcataattcttgtactatgacgtggtatctgactacgtgacacatgtatcatattttataatctgggtgaatgcttctgtaacaccctaacaattagacatgttacggcaactaattataaaaccctaatcccctaaatcgggattactagaaagataagagcggaatatttaaactgtaatctaaatcaaaatgaaaataaaacttgtaataactttaaactttacaatcaaatgtgacatgtttcgggatcccaaaaatctttacaaaatattacaagtctttt

SEQ ID NO: 112513 - DNA, 3671 bp, Cannabis sativa
  modified_base (3622)..(3628): a, c, t, g, unknown or other
aatgaaaaagaagataaacccatttgacccattatgatgttatcccctaaaacaaccttaaacttcacaaatcatgaaacttggatcgagttagaaaaacccatcttcttctttgtatatttatactaagtttcctaccttaaaattaaaaataaggagaatattcagagcacaattcggatacatatatatatatatatacacaaaattaaacgtcaacggtttaaatgaaagagctcacacttcaaaaaatttctccattattcccatttcatcttttttttttaattattattattaaaataacaaatattttatttgaaaagtcaaatttgtagtcattgatcttggggagttagttaagaagctgtatatagtaacaaaaacaagaataaaataaaaagatcatataataataatgatgatgattgaaaagtgtgcaaaaagttttgtattaatgaagattgacaaatcttaaaaaagtatccaattttttaattactaaaaaacaagtgggaaaagcatctctttgtctaaatttgttggcttatgcacataaaatttacaagagtattgttattgccagtaattttataagtcataccttataattaatcttataattaattagtaatattttgtaaaaatttattagttagtggtgcaattctcaatttataaaggaaataatttcaactaatcatttttgtttatgatttgtctcatttatattaaaaatgacttatcacataagcatatttaatttgtgtatatatattatttagttacatattttaatttaataattattatttaatatgattgattaaagttggtactcaataataatgcttttattataatttttttaacaagacatctcccaattctaatcagatgtattctccaatgaaatgatacttatagttataagttataaattctatgtttttgatgaggaggtgacagctaataatagtgtaatgctgccttatatagttttttttttctcacattttatggtttttcatttgaatattttgttgggattttttcaaaataataataataaaacaagtttgtttgagaataatttaggcatatgccactttccatttctaatggcatcatgaaatgattcttaacaaaatgtcaaaattaatttaattaataaaattttccttcaaatgaaaaatcattatgttaggctttgtatgtagctatattatataattcaaataatctgcacaagatttttgttgttgattgataggataaaaacttttctatataatattttccttctatttttacataatgaacaaatatttagggaaagagattaaaaacaagtacttaccaaaaatgtcttttgaaaaagaaaaaaaaaagattgtgtttagttataatcaatcgatccatattatttgtaatcatttatctcctatattgttactaataatatattctatggttgcaattaaatttcaagaatcttgcatattaatttctttccatgtcctaataaattaatccataaagttattattggtgaatgtaatacaaaatcataattaataaacattaatttgtaataaaaatgctataggtattttttttttaaggaggaacaatggctacattaagatccacacaagatgactaatttaggaaagaaacaaaaacaacaccaccaataacaaaactcaataaagagttaaaatatatgttacacataaggcatttcaaaataaccacaaattattttagcattagccaaaataacttaccatgaaatttttgaattagttgttaacttagagaaaataaggacattaacattaaagtctctatttaacattttaacaaatcaaggttaaatgactgataccaatatgtttgtgagcctacttaaactcgtaaagaaaaatgcattttctaataacatatttattattttataataagtagggatgtgaatgaggcgagaaatcaattagaaagaaatatcattgtctataattttcaagtagcattttatttttttaagagaaagtgttatattctaattccttcatagggttgttcttgtcaaatttaatattcgaagatgaaaaatattcttcatctccattttgtttgtcgtttagacgaataatctccatccatgtcaaattgacatccctatttatatgctaaaaattgccaatgcttttcacttattctttttccaacttgacacataccattcacataatatccactaccaacacttcaaactactatttagatagtcttccataatcctagaaactacatacactaaagcaaagaagaaattttaccccatcaaaagttaagggcaatccaaagcaaaatcataagaaaaaggagaaaagggaatatataccaataaaggggacaactaaaagaaaaagacaagtcatatggccaagattgcacaagtaggtaaaatctcactaagagtgtgccacacaaaaatcttcactttctttcctctttctttccttttttcttttcaaagaaatcttcacttttcttgtaatatcaaagcttcacatcaccatcattaatttttatttatttaattatagggtttagggttttaggcttatttttaaaactattaagtttctatattaggttagcaaaaaaaaattatatgctagctattcttttggcacacatatatcatgtttgtatttttatctcacaagtcaaataacaaagttgtagagcaataattgtgaatagtccatgagagtgtaaagttcaagaaaagaaacctagggtttctcaccattcattcacactatccaatatccattgttgttccatacaatacaggcaagtccatcaaggcatgtgtgttttagactattagagcatttttaagtgtagtattttaaaaaatttatattatttaaaaatataatattttattttatctcttttttatactatttttatactcttaattctaaaatactctaatagtatagcaccttttaaaaattctataattatgatcttacacattattatttaatatattatttgtattaattataaatattctcacactacttatttaactttaattctttattttatttaaaaagatataacatcaatgccatgtagtgtcatctacagaattttctatgataacacatattcatctctaatgatttaatatctttatgttttgtcaaataagtaatctacataagcaagcatcctccaaaatttaactattagaaatgctcttaaggttcaagaactccaaaattgtaaaataaaaaattattagtagtatatatataatattaaatagtagtataatgcatcaaaatggtcttcttttttttttttttttgttgaaagaactacatgttcattaattaagaaagttgatgggaatcacagggggattaccctccccttgatacaaaacagctaattcactagtgatcctagcatttttagctacaccatccgccaaagcattaaaactatggttaataaaaaagaaacgaacaaacgaaatctctttggttacattagcaatagaataaaatgttggatatttattttaccnnnnnnntagatctactcacaagtatattgtttaaacaccctaaatatga

SEQ ID NO: 112514 - DNA, 6328 bp, Cannabis sativa
  modified_base (2516)..(2517): a, c, t, g, unknown or other
caaaatattcctgttagtctctaagattgacacctatttgactatcaggtaaattgggtggaatagacaacagtggaaaaatgtccataaaagtttttctcgactatgcaaaaccgtcgacaatactgaccaatataggtgagtgtttaaaatagtacccttaaaaaattatagatctggagccatatctcaccgccgaaaccaaatttacactaccaaaatcaaatctcaccatatttcggttcaatacagtaaatatatattcattacaaatattttaatttttgcacctatccattaacaatgaaagcaaattccgataattatcctttgaagtacttagccatatagttccttttgtcatggattttcaagagactagtgggatttccacaacgaaaagcactaatgcaaaatgaaaagatgtatcaaactctcacctctggtttaccgtgaacgagaagagacgaggaagagaatgagagagcgaggtggagttgggtggcggtggtggtacgattgggtcgtcagctcgaaggtgattggcgttgaatgagaagtggcgaggaggagcaagataaagcgaggtggagcgagagagagcgacacactgaggctcgctagaggaggtgtcagtggttgggtgttgcttgctgttggaacgagatagccgagagaggagagatgagtttgtgtggttgagagagagagatcgaaaatatgaaaaatgggatctgaaataattggacttttatatatttaaatgagaattctcaacgatttaaaactgtcgagtatacttattctaactgtttaaaaccgttttcaaaccgttgcagattctcaccccatttttcaattttggtcttgtgaccgttttaaaccatcgagaatggtaaacgattgttaaaaactgtcggaaatactccattataacttacggttttaaacagtcaataatttttattagcgacgataaaaaaaagagtcaatttagagaccgccaggagtaacgtttttgtagtagtgtattatgatgcacaaaattatattcaattcgtttttgaacaaaaccgactataagcgaccgtaactaccaaatcggttacggtcacttatacattatcaccgcgattctatatattttaattattatatagttcttattacgtcatctgtgatgtaatacctaataacaacaatcaatataccttatttaccataattacatggataagtttataatatcatttcttaaaggttatttcctaaataaatatatagaatatttaaaggtcaaaaaacagccagcattttgatggaataaaaaacatatttatatataaaaacaatatatatccttgttttcatcaccccatccacaaacaacataaacctcaatccttaattctttcttaaaaaaaccaccaaaattttgtgtttgtgatccatgcaatgacgtaacaaagtttgtggttttttataataactacaaaattaattatataatataacaccaaagttgtgttatatacttgtgagtagtgtccattttaacaattccctaacattatgtttggtagaactagaaaagaaataataatagaatgggtgttcatcaaaccgctcagttcgtacaaaatgacaatgtggtaaatcttaattggttcaggtcactaaatttttattttttatttaaaattaaatttaaatatattaataaaaaaatgacacgtagataataacttgatactgactaagtatatattaaagtttcaaaaatataacttaggtgttattactgtcaaaaattaaacttaagtatttatttgcaacagaaaattataaacttaactatttattacatcacaaattactctataaattatcattccaaaaatgcaaagaaagaaaaagataacaacttttatttacctatgaatataatgtcttaaaattaaataaatttatttttatcatgattttaatagatatgataaaaatatttacactacttgtattaataaaatagagacatgcttaggccactcttaatgtatcaagtatgaaaagatgacaaactattattgatacattttaataattttaatattagatttgataaattttgatttaataaataatactagaacttattaattaattgagtaataccatatagcactttaaaatactaaataatagtactcaataaaataacacttcacaactttcatattagcacctaagtgctaggacagaagtattcatgttttttattattgtaaatggatagttttatatttttacattttaaaataattttttttgttttgtattttcacataattccatttaataattcacatagcaacttaaatcacaaataaaattcgcatagtaactcatacaaaaataagtaattactggagcaatcaaaatcgtaaatttttttttaaaaaaaattagaaaattgtatataggattttaattcccttaataataataataataannaataaataaataaatatagtgtatatttatatgatctcatttgccaatatatatcctaatcctaggattcgttgaatatcccctatatgtatcaaactaaaagatgccaatacatattactttattattaattaattagtgtggtaatatgctgcattttttttatataaaataaaattatattaatgtttttattatatgtatacattgcatttcatcattttgacaagtttgctttgagaaaaaagaaaaggccagtctgtacttaaagagacagaactttgtatatagataaaattatatttgactatttatatttatatatattggtacttgaatgaattattatgatcaagaatcaagatatacggttacatatttatatatatatatattaatattttaagttgttttataaatttttgtccatacatagatcataatattaatctatataattaattaattaacaagtaaccatcattcattatgttttttcttttgttggtgcatatatgggtaaatattgatgttaaatattatattagtggaatcggattatctcaagcaatgtcatcgatgcactcaaaacttggctatgctcatctacggtgttgagtattatattgagcattgttattaagtaccagtagtgcttagtactttctcgatatgttgtattgtgattggctagcgatacttcctaaaattattatattaaattatatgggacccaatacttagttggaccaatagcaatattaacatataaaatagtgctaagtactactagtacccttcggcatttctctattaatacttttgggttattgtaattcttataattatctttcttttccttattatcctaggaatattactaatagtacatttgcttactctaaaactaattttagtggtttgactattctagttgtattataatatttctttacaaagcaatttttattttataatgatattgtcttgacattctttttctcgtttcaaaattgtaataggctagtttctaactttttttttttattttgaaatctagtttctagtttttgagtgggtatatattgtcctataaatttattataacaatttaattaatgacgtgtgtgtataatttgttattaaattaaattttaaataacatttatataggagtgtaaatagatcgagtcgaatttgatttaactataaaccgatccgatccaaatcatataatgatctgctctaccctgctaaatcaaatgcccggattagatcagatctggccatacttatttagatcggatctaatctgatccgacttaacttattcttttaaaatgattttaaattttattggggacctaaattcgattatggatcccgtgtttggtccaagcctgggtctcgagtccaaggtttgggtctgggtcccgagtttgggtcctggtccgggtttgaatccgtatcgagttcctggatctgggttccaagtcctaggtcaggatttgggtccaagtcccaagtcccgagaaccgggtctcgctccaagtttgggtctcaggtcccgagtccgagttcgggtcctggtcctgggtccgggtctagggtcggttcgggtccaggctctgggatccaagtctaagttcgggtctggatccaggttcgagtccagtcctaggtccaagtctgagtttgggtcccaccctcacccgaggtctgggttcggatcctgagttcgggtcctcgtcttaggtcaagttccgggtcccctgtcccctgtcccgggtctaggtctgggttcggatttgggttcagatcctgagttcgagtctggatctaggtctcgggtctgtctgtcctaggtccgggtccaagtctcggtctcaccccgtgtctgggtcctgagtctaagttcgagtccaggttccgggttcgatcataggtgaaggttgtctaggtccgaatttgggtcttgaatcaagtttttttttattgaaacatatcagatcggattagatccgattcaaaaaaaaaaaaaattggcgaggcagaacgaatctaatctgagaatcaataagtatttaaatatttcggatcaaaatttatctgttggatcgaaactctaactcaatctaattaaatggatttttttgacataacaaaatacatttatgacaagtggacccacaataattaactaatggataattgggcatatttttattacttcgttgaccaaatgtgaccttatttaaatatcattcttctgaactatttttcgtacaataatgtacatcactatgaattattatgtgaccaaattcctatatttaattatatatcaaatattttcttacaataaaaagataaagtgcttatacggtgcaatatatacttttaaaaaagaatatatttttatgagtgtatttggtaatattttttaattataaaaataaaaatattttctaaaaatatattttgtaaaattatagggatatcagtagagtaagagcattccgagctaaaatagttcagtctttaaattatagagaaaaaattataaaattaagcttccaacaagtaaggtaaaccttagttattttacataattttttagctcaatgaatagtgcttagctaaatgtaaagataactattcattgaactaaacatatcttaatattattttttttaactttttttttatatgtgtgtgtaatattatatgaattattaatataaaataaataaaatatattaaaaatataatatttaaataatatagagaaaagttagaaaaatcgatgtatgatataatgtaaaaatttgaggtaaaataaataaaatagaattttggttatatattttaaaaaatagagtagagaaactgttgggagtgctctaaacttatgtgtagacccgacgagataccgaaaataaaaatgatataaaaatgtgatattggtgtattagtgacatttatgaatgcacaagactttacattctcttgtgttctcgtgttctgactccaataaaaaaaattatctcacattattcatgtgccaataatgatacactcatttttttggccataaaagatattatccaagcctacattatcagatttgcttgctggcttatttttgtgaagaggaacaaaattcaagcccaaaaacatcttatatataataatattaatatgtgtacacaaacaacaatcattatcttccccccaaactattatataaattccaatatatatatgcttcgaccaataatatattaaattaatgggatttataaccatggatgatagttataactaaaataatttaactacactaggtcaaacttttcttcaaaaacactttgtattattttaaattaaggtgggaatttgtaagtagttttatagttgttgtgtttctagggcatttccataagacaaacttcacaaagcacgtgataattgttttgactaaaaatgtgtgttgggtcatcaaataaataaatcaaatttatgtggtctatttggaataaagtttatgacttaagggtatgattgtcatgattttaatatgtggataccataaagacaatttctaatttgatgaggggccaaatagaaatagtcaataaatattaccaacagttttgtctgttggtaatataaacagtaatggtctccaatttgtagtatcgtatctttttattttcttgaaaccccattttcaagagacaaaggttacagagaaagaactcactgcaaattggaagatcataccaattaaagatcatttaaaggtcga

SEQ ID NO: 112515 - DNA, 2163 bp, Cannabis sativa
  modified_base (1609)..(1614): a, c, t, g, unknown or other
ctctccgtactcctcccttccctctctcctatcctatatctcaccggatttatcgcttaactgtttcctcttcactctctctctcactacttatattatatgtattatacatactcatatactcttcatcattatctttgtccacaacccaaccgtttgatcaagaaagaggaccttaaaatcgaacatttcatcacctaaacgatgttgattgttgtttgggttgagatcattcaacgattttgattgattgattgcttcttttgattatgccttatcaaccaccttctcaattatctacccaatttgttttagctacacgacaattttgtggcctatcattgtttcaatgctctctctcattctattcattattattattattataatttgtggcctaattattcggtgctacattggcatacataatccaatatctaactaagattaaatcaataaggattcatgagaacaaaaaaaagcatgagtattaatgtacaatatgttgtactataataggcaaacgaaaacgagtgccatgggaatgaatgaatgaatgggggtataatatatgagtgtgagtgagtatatattttatatataatatatctatatattatatatattctcttggcgttgtctgatggtcaaaaacagtaacaaagtgtcagtaagagaccggctactgtcggtgaccaagaccaagggaatggccgagacgaggcacgcgcgcgctcagtggccatcctacaacaacatcacttaacactctgcctttttctccttcggccaaaactaactcatcataggtcgctttcatcaacccaattttctccaattcttttgttttttcttttcttattaaaaaaaaggtcactatccatgataccatattccattcctcgagtcactacgaaaaaaaaaagaagtgaaaaaactcagttcttaatcggtctactactactatatactctgcttattcggtcgcccataatcactgacaatttcatttttgtttccctacttagttatttaaatatagtagtaatagtatagtaacagtagaagtgtgtactacagtagtagtacatatatacataaatacatatatacacattttcaaaatcaaaaccatcccttcccttctttctaattttttcctcttattttctctacttatttggcgttttctgatgtgcaatgattcccttcacatgtaactataataataaaaataattaggatttttgccgaaaaacctttaagatcgttaataatgtcccctaaattatggagattgttaaatttaaggatttttgtttaattttattcaattttactatttcagtgattgttaaggtactaaaccatgcttcccagattttaatatctaccaaatcatgtccctcgaactttgacatgtattaaattatgactcctgaactttcatccatgctaattttttttactaaaattggaattagttcttaaatctaacaatctcaatagttggggcatttttaacgactttaaaagttcagaacacatgatttgatacatgtcaaagttcaggaggtaaaaattctaattagcctaataataataatannnnnnataataataataataataagacacttttttttttgagtgtttatttcttaagatcatattattaacttttttttgttctttttattctagtttagttttctggtttggtaatttatgaaattgattatttgtaaatgggattaaataattaattactgttgatttgtaatgacatgtggaaatttaagacatttttcatctaaaacagtgggataaagagaagaacaaaaacatgtttgtcctctgaattttacatgagttttaacctcaaagaatatatttttcttttttatgcatgatttttttttatagattttgtttccctatagagtgacaaaataaaatactactatagtctaaaacccaatattcttttttttgtgtgatctatttgtaatatattctcttaaataactatcacattaataaataatttaaaaaatggaaggagtttcaatggttaaatttttattgtaaccatcatggttacatttttttaagccattggattactattatatggttgtgattaatttggaaattaaataa

SEQ ID NO: 112516 - DNA, 1363 bp, Cannabis sativa
  modified_base (37)..(58): a, c, t, g, unknown or other
ggagttctttcgtaatgggctaccgaaaaacaagatnnnnnnnnnnnnnnnnnnnnnnaccaatcaatccatttaagctctcgtcaactgtgtagtctcatacctacacagtctcggtattatcacacttgacctttcccaggtgatgtgggattgcacaacttacctaatatttccccttatggatcacgggactactgactgtcacgagacccctgccagagctgctgcggtctatctcaagggtgaagcttcagcattttaagaagcaaagttttgcgctgtggctagtttagttttccaaatttgggtaaatagaaatgattatttttggaaccgaaaaatgcaagcaattgtagtttgtgtacaggtggtaaagtttaatgtcaagcataaaattactagcatttttttttttgatgaatcagctaaaattatattgctccaaacaactatttttacaatttaatagcaccctcacaaatagaagagagcctaaaaattgaaatctatacacgtatgtatttcattttaaatcaaagattggataagtaagaaagtatttcggatgatatcaaagttatgaaagttaggagtaggagaaccgaacacttatggaggataggcttgtttattgtaagtgcatagttttactaagttatgaagattgggcttgtatattgaaagtgttgttaaaaatatttcttatatatagagaacgtgatacttaattatgtcattagtaatataattaaatacctaaaattttaatggaggatatgcttaccttataattatgtcattagttttactaagttaagaaggttggacttgtatattgaaaggattgttagaaatatttcttatatatatagaagcggatacttacttatatcaatatatagtaatataattaaatgcctaaaattttaagtatgtaagcggcagcataaactcaatatatatttttagcggcataagcactgaacatttgtaaaactataattttcatccagtttcgtcagtatagactctgttttaaatttattaaaagaatatttggaagtaactgacactacatatttctgtctaaatacaataatttagaatctaagtcttatatgtgtcacatttaagacaataacagagtgtacagacaaaattagagaaaaattataattttataaatattagatacttatgctactaaaaataaacaaaaatttatgttatttacaaacttaaaactttaagcatttacgccgttcactactacaatatgggcctttagcttccctttttttaacctattttataaaaagggaagctaaagggtgtgagaacacccaccagattcgaaatt

SEQ ID NO: 112517 - DNA, 3172 bp, Cannabis sativa
aaataaacattgggtttatgccgcctactaacataaaactttgggtacttatgccactatttaccctaaattttatttcaatagttctttggaatctacattaattttaatcgatgttatgagaattctaaccttttgtgtttgtgttagaacttttgattgataaaaaaactatgcaattggtctcactgttctggtatgcaggatcgcatacagtatgattcaagatgcagaggaaaagggcctaattacaccaggaaaggttagtcatgaagatttcctatatttaatatatggttatataattggccatacatattctatagcatggtattactatatatcgagccattgccatagtacatatacagtttttatgcaatccaaatctagtaaatgttttatatatatatgctaataattttcccgctacaagttcaaactaagttcagtttagttcttttcttctctttatttcaaattttgttaagcctcaaaagcaagtatgttcagtcagtcatacaagggaggctaccacacatgtaattgatttgttgaatttctgaactctgaactaacatctttttctgaccggctatgcttgaataatgtgcgtgtggtggggtgaaagactgtcctagtggagcctactagtggcaacaccggcattggattggcatttgttgcagcagtcaaaggttataaagtaaaattagttatgccaattataagcagtctcgaaagaagaatggtgaaccgagcttttggagctgaggtgtacatcggaaaccctgaaaaagggattcaaggggtttttgataaggcctttgagctagtaaatgagacccctaacagctacatgcttaatcaatttgaaaatccagccaatccaaaggtattatgcagaaacaatggggtctgtgatgttgccatcatgatcagattatttaattaagctgtctttgttcttgcagatacattatgagaccactggccctgaaatatggagagattctgaagggaaaattgatgtcttggttgcagggataggaactgggggtacagtagcaggtgcagggcagtttctgaaggaacagaacccaaatatcaaggttcatactttatatacaacatgtgtctagtttcgatcattttttgttgtttgaaaagggagatggaaactatttttaattatgttaattgggcttctctttaattatgtataggtttatggggtagaaccagcagaaagtgcaatctttaatggtggagcaccaggtgagcaattattcttaaatcacttggtatccatattcatcgttgtgctttgctctctcttatatttttggatatttagttcttgtaaaaaacaaaatcttcagcttgtcatttttgttgcatttatgattaaattattgaattttctaactagacacgcatggtttggacatgtcttagggaaacatgctatccaaggacttggagttggttttgtcccagaagttcttgatgttaagctacttgatgaagttattccagtaagtttaaaaccattttgcatatttctcaattctcaatagtagttgttaaatgttagaccaaataaattctcctggtcaacaagttcaatggaaacttccatgatttaattatacaaagctgctaatgaagtcatgccatattcctttcaataaccaggtatcaggccaggaagccattgatatggccaaacttctagccttgaaagaaggtctgctggtatgtcatctaatttacctttttatcatttgacttaattgagttaatgacttaccttacttattttaagaacatatattttgcaggtaggaatttcatctggtgctgcagctgttgcggccattaagattgcaaagaggcctgaaaatgctggaaaacttattgctgtaagtcttgatgtgttcttttaaagattattatctttgtggtggtggacaatactctaatataatggactaatatatttagttgattctgtttaaaaaaattcaggttatattccccagcttcggagaacgttacctttctactgaactatttgactccatcaggcaagaggcagagaacatgacttttgactaaacattattcagagtttgcttcatcgtaattgttatgtattggatttagtcatccaaatatcagatctttcttgtcacttactcagcaaccagatttttacaaaataaatttctcatcttcacttgtgttctaatgtattgaattcagccataatttaatcagatcttgatagctgtttagttagtttcaactgcatagagaagaatatgagtatgatgagactagagcaatattgaaagactaaattgacaggggccgcgcgaacgcaggcccccactggcacaaattatgacgttggttctcccacttggggagaccatgggatagcacccctccgaagtgcaatgaaggtcactaacccaggccatcgaccttcttgatcacctattgaccccgtccaggtaagtgcctttagccgtgggctactgttgttatctatagatctcttttcccaacctaatcgtattctccttcgatgtgggactacgctattcatgctattcttcctaattttgaacactagaatagtgctgacaacaatggaatgaaaataaaatgaaaggccaagagttttttttttttcaaaccaatagcctatgatgcatgcagcaaatattttgtaagcagataatctctaatataattgtttttctttttaaagaatagtctattaattggaaaattagaccaaatggtcattacaaagtaagtcattcgagagataaaaaacaagaaaacacccatactagtggtgggcgaaggtccaccgagtcatattataagcggcaaaattacatgatttacgaatacaggaaaacatacaaccgataaaactattagagagctcataacaaaaattaaaatagttctcaatctaccaacacgacgagaaacacgattgatagagttgatgacgaccctagagttgaggcggtggcttgttgcacatttaatagttcatttgactaaattaaatgaacatttattaataatttctacattgttcatttacgcttcaggctttttcaactcattctaacttaactttgaa

SEQ ID NO: 112518 - DNA, 3104 bp, Cannabis sativa
  modified_base (27)..(32): a, c, t, g, unknown or other
aaaatagattacattgaaatggagttnnnnnnagggcataaaacctaacatctatttggctaaaatgacttatgactgaactaaagctacttaaaagagtacctattgtatatttagatagccaaagttgcatatttctatgcaaaattctttgtctacccatatactttcacatttaactatccagataatatttttgtatcttgatttaaaatatagctttttgtctttatatccttttcaataaccttcttgaaattattttcactcagttaaaatttctcaatgcacatagccaaattgaattagaaatttaattcaaaataacacaatttaatcaacaatttctcaaaaaaaaaaaattattaaactcaaatctcaactccacatttctaccataaggtaaaattttatcactttataattaaatcactttattttattttattctcaacatagataataatgtactcataatctcaatatgtcaatataaaaaactattttatttttacttttctctttatttgcttaaaaattaacacaaaaacttgaaaaataactctcttgaaatatttccaaaactcataatttgaatgtctcaattaaaataaaaagtgaaatttatataagaattactttttcaccattagttatttaaataatctcaatattatatagacaacttaatatattttctaaaatgtctctttgagattagaaaattccatttgacattcatagttttctcaacaaaaataaaatattaaactcacatcactagtcacaaaatagtgagaatattttcacttgttattttaaaattatctcctcattgagagtaacccaaaattatatcaaagtcaacaaaattaattttgttcactatgatattttgaagacaacttaatatactttttaaaatatcattttgagatcattaaaaaattgtatttgacattcttagtttctcaacaacacaaaatatcaaactcacatcattattcacaaaataattattgagtaaattccacttataactgattcttatacaagcatcgacatcagcatacaacattaaaaataacagaacaagaattaaacctagtggctttgcctctacaagactagaaccagaaattagttaactcaattgtaactaacttccagctcgatcagctcttactactactctataaataagatacaaagaagaagaaatttattgtataatcaaagacagaaaaagaaaaccttgtgttgaaacttcagctccaagatccaaagagaaagggtccaggcagagagtaaaactctcatggtgaggaggttgaaggaagagagtacacgcaccaagaaaatggagttagatctagaagtttaagagaagaaaagctgcaaaagatgaagtaatcaagtcttacctgatcgattcttgtgataggaagctccaatagtggaaactcaagccaaatctctgagacgagcttcccagagatgtagtgaactctaagataatttatggtgttttctctccctttctttatttactcctttaattcttaatctttgttgtgtgctcaagaacttgctctgctagggttttgaaggctgagtaaagtgatttgtaagtgttgtgttttgtgtgtttggacttcgagactcttcttgaaaagtctcttagtcagtgtgttaaacaacacagttgtatgtggtcgttttgttcttattgttgccatttgtgtctaagtaaaacttagacaagagaaaggtcaaaattgaccttagatactgataattggtttttgttggtgtagggttaaaaaaaattaaaattcttacaataatgatattatttttacctgtacttatcagttgacaaatgcctttttatgctcttaaaggcctcttctcactcttctgtccactcaaattttttgttgcctcgcaatacattgaaaaatagtaggcacttatcagttggcttcaaaatgaacctgttaagtgcagccattcttcctgttaaggcctgaacttcctttggtttggttggtgatggcatatttatcaaagccttgatcttctcagggtttgcttcaagtcccctcgcgttaactatgaatcccagaaactttcctaagaaaactccaaagaaacactttttcggattaagcttcatattgtacttttttaatatctcaaagcactccgcgaggtctgtagtatgatctccactctttatcgaattcaccaacatatcatcgacgtagacttccatgtttcttccaatttgtctcgcaaacatttcattcacaagtcgttgatatgtttacccaatatttttcaaaccaaacggcatgactttatagcaataaagtcccatgttggttacgaagcttgtatgttcctgatcagggacatgcatttttatctggttatatgcagagtatgcatccatgaacgacataagcttgtgccagcagatgcatcaactaattggtcaatccttggcagtaggaagcaatcctttggacaaaccttattcaaatctgaaaagtcaatagaagttctccaagttccatttggttttgggaggagaataggattggatatccataagggataaaagtcctcgcgtataaattcgttaaccaacaacctatccacttcctgcttgagtgccccttgtctctcggaatccaaggatcgtctcttttgtctcttggttgggtaatttgtgtcggcatttaagtggtggtaaataatctcagggtcgatccctatcatatctccgtggctccaggcgaattgatcctggttcaccctcaaaaagcttattagttgctatttcaattgttcatctagattctttccaatgaacacacactttgtgagattccttgggtctagaacaacttcttccaattcctcaatcggttttaataaattcctttcatcttgaatctggggatcaagatcctcatctttcttctcgcctttctcagccaagactaccattagctggtgaccggcctttctgttttgcagctctacgcggtagcattcgcgagccagcatttggtcacctcgcactactcccacac

SEQ ID NO: 112519 - DNA, 3896 bp, Cannabis sativa
  modified_base (510)..(514): a, c, t, g, unknown or other
tcttggacctcaatgtccacctcatggtcaccctcctccatagcgggcgaatctttttcggcacttcgcaatgtggccagcaaggccacatgaggatcagatgtgttgaccttccgcattgtctgctttgtacgagccatcatcctcctcttggacgggtactgatgcaaatgttgtgcaaccataacagcaggaacgacaattggtcggacaatatatgtccagtttgacgggagataatgcctccaacccttcttcaattcccaaatcaagcggttgtacccctctttagcgatctgctcgtagtaacaatggtgttgcactacgggttctaaagtaggagaacgatcactactcacctcccaatcttcaaagcacgagttagaaagtccatcactcaaataggacggactaacccgaagacaaggttgatccttgtacagaagttgaagcaagtcctggttgattcggtgttcgcttccccaaaactcacctgggttcatctacaannnnnaacacacaagatgagtgtttggctgggatatcgaactataaacaggcaaatatgccgactaggagtactcaacaaattaagtggacaaaaaatgtgtaaaaatcaagtcaaaacccagaagtttgaaatatctgggtttagggttaaattccacgaagctttgaatgagcaaggtgaaagatgaacaatgtgtgattaaaagcaaatgtggtaatccgtgagaccatacagactattacagaggaaatcataaagttttgaacctatattttctatctatcttctataacaactcaagaacgcatgtattcagtacaatggaaacccaaaaattaaacaggcaaagtaaaaagagaaggagattgaaaacttactcattgtttgacgcctaagtttagtctagacgaggctacttagatgcttttgttggggatctcacgacagacttgaagtaataatcctttttttccctgagtttattttggtagagaaattagtaaaagtaaaattatgaggaaaacccagccttatttataggcaatctggtgaaaagaggtaatcatttcaaaatgccttagacgcttcgattccctcccaaaagcaaatctggggaaattaaaattaatcatgagtaactgtccaagcgtgatgtgaaaaactgtgtttcgaggcactaattaagtcagagtattaattagacaaaaattaaagagacgcctggtcagcctcacatcgaatcacgaacagacgcgcctaacacgtgtcacccatttacacacataagtagttcggataaagtcttcacgcaacttctgaagtctcgtacagacttggggggcaatgttatgccaatttcagtactctgatgtggcaccacatactagtgacacgtggaattgacttcacatatcttcttgaaaggatatgtcgaacaaagcattgtaaatatgtgcacggacgaagctttcttagccgagtagtggacggtccaggcagcgtgccaacacttagaaacttcaatacttgcatcgtaattcacaaaagcaatcccaataattctaggatcatattacagagatatggcaagctgtccaaatccctcgattagtgtattctgtatttaatgtgtaatcctaccaattatagacattgtaaatagaagggaaacttttccctcaaaacttataaccctataaatagtgatctattctcatgaggcaaagggtcgagaaactaatcaaagagtatatactcagagatatcattgtaagagctctaagaaaggaatcacttcattttgtgttcttaagtcaatacagatcaaggggagtaggctattaccaaactgctcggggccaaacctctataaaaattctgtgtctttatttatttcattatattacttctatattatactacttgtcacttacaattaagactcattgtcgttggcctaaagtgaggttaacacatgttctatgcaaagcattatctttgttattctcccttccagaagctagatcaaaactgaaagggtttaggtgctctagatcgggaccacgtgttactcacttattctttgtagacgatagccttatgtttggtagggctaatggaggttataatgaaactatacaacatattcttctaacttaaaaggctgccacagagtagaagattaattttgagaagtctgctctcagttttaatctaaatgtgcaacaggtggatcaagatggggatctgagagtattatcagtggctacgcatgacatgtacctgggatgacctacggtgatcggtagaaacaaaaagcaggcgtttgaggggatctatgagaaggttaggaagtgagtgtgaggatggaagcaaaatttcttttcagccggtgggagagaagtacttatcatatttattcttcaagctattctaacttatatgatgagtgtctttaagctttcagcaaaaacttgtgaaaaattaaagtctattgtaagacaattctagtggagttcatctggagatcaaaggaagattccttgggtgaaatggggaatactatgccagcctaaggtgatgctagtaatgcatattttcgttaacaattacgagcctattttcgcaatatatttggcacagaaattacaagtgatctaagaaaaaataatataaacagaaataacataaggtatttacgtgcttttgcaattaactttgcatagtccacgagtcaatcttatccagatttttcagacgcagaactataataaggaaaactattcccgatactttaaaaagtatctgctaactctcattttcaaatgggagaactagtgccacaatatatcattgtctaataagacaactaataactaagaaacctaacaataatttaagagtagtgtaataactttttcgtattagaagtaattaccgtatcataatttttcatgcaatgtggtacaattgaattttcttacctcaacaatctcgggtcctatgtcacgacaatgttagataaataattcaattgagccggatctagggcttaaactcaaaaccagaagttttgacattaataaaaagcgtggcaattctctaaatatcaataaaacacaaaattttaggtgctggaacaccaaacggttaactgttttcccaaactgcttaccataatctgggagtccatcctagaaaacagttcacctataatgaccgcttaactttaatttggaaattaacagataattaggatttaattatgaaacttgcatattagttattttttattattttacggagatttatttgaattcacaatgcattttatatgtcatatatagaatttcatatttttgcatgttttgtgccagacaacattggaacgcgacatttggctattagaatcacatcttagtatttttagtatagtggggcaatatagttagacatagagaatgtcaggaagcgtcgagatttgagaagtgaccaaattatccctaggtgatttaatgactttttggttaattggagggcaaaatgataattttgcccaattgtatttttgtcttttaatgtatatttattggagattatatgttgagcttctcatttaattaaatagataaaaagaagtttagtttctttcatttttattaattagaagaaaatcacataaaacactctctcttttgaacccaaaagaatccaggtagattttatgtttttgttgcttaattctgaggtttctaacaagtttctagtgatccaatccaaggtataacttccttagactgtcctttgtgttaattttatgtttttagttgagttcaagcatgttttttttaagacatggttctgtagtttctgttgttgtttgtga

SEQ ID NO: 112520 - DNA, 1202 bp, Cannabis sativa
  modified_base (85)..(93): a, c, t, g, unknown or other
aacgtacatgactatgaaaaaaaattagactaaaaaacttttctggatgtcgaaacaagtcaagggtgtatcagtacatcccttnnnnnnnnntgcattatagaatcaccctaaataataataactcttcataatttgtgaatccatggaatcacttttgagaaggatcttgctagctctgaacaatgagatctttccatggatctcaactatatgatcaaagagcaacaagaaaaaaaaaattacaattactataaatatcggtaagaagttttgcttcaaaaatcaaccataattgcaactagtgcagggagatctttagcaaaccaacatactgcttccataaacgtcgacgaaagaatcactacaaaggcaaattttgagtagggccgacctagagttgaaatgcccttaagaaaaaaatactcttattataacaataaatgggatttttttaatagatattttttaatttggcctttaaaatgagtaggccctaagtgctacccgccttagcctagggtcgaccctaatcttgagcaaaccaacatatgacttccataaactctgacaagagaaaatcaacaatatgaaatatccatgaacacttaattgcccaaacatatatattgttgggtttcatgccctaactaaaatctaaatttaatttaatattatttttaaatcaataaagttcaaaaccatttatgatgtagtttatttacccagaagctgactctggtgacctgaaaatcaatttttgacacgtggcagaaagaaaacatcctggagttgagtactccagagtcatagcagacgacctggaagggtccctattaactctaggaacttcgcaatgggtgtttgtatcccgccaagttatttccaactcatcttctttcactattctgaatcaagaagacaagaagaattcaagtccaaggtctaaaaactgaaaagagacgaaactgcatcccataagtaaactcaggcgctagggttttcacccagcacttaggttggcattcccaattagggtttcagtttttgggtccgtcttagtgcgaatggctaagacctatcacgaacatgttaaaggcaccaaaacacttttgaaacgccctaaataattaggcacgctacccaaaatgtttatgaaaccctaatcccctaatcgtgattactaataaaaatagcgcaga

SEQ ID NO: 112521 - DNA, 2485 bp, Cannabis sativa
ccttttgggaaggtgcccaaaaatgaaaccgtgagggcttagacccaaagcggacaatatcatactaatgtgggagtcaagataaggtagcggcccgacaaggtggaagagcagggcccaacaatatgaacctctcttttttgtacaatctatatattgatataaaggaaaacacaaatgaaatgaagtggcatcctctataatcactttttagctatttatctattttattaggattttagtaaattaatattttcttgagtcggtataacctccataagtgcttagtttattgcaactaacctccaattctaaaattttggtggtaaaacccccagaaatcgtgttctattagcaatttaatatttccatctatttgtgggtgttaagtgtcatgttagaatgtctacgtgtacacagtgtacacgaggcacaattttattgatctatgtaattattattttttttataaaattaaaaaataaaccattaaaaaaaaacaattatattttttctttttcttttctttcctcataatattttcattttttttttctttttatttttcttttctttcttcttcttcatctatcctgatgcctcctccttcgacctcctccaccgactctgaagccccacaacacgcaggcgccaactctgagtcattccatctctccctacgcagcggccatcttctgccgtcggtcctccccgtggctatcctccatcaaactcgaagacccaaaacccactgcaaaccctccccgtagctatcctccatcaaacccgaagaaccaaaacccactctaaacttgacctcattcttggcagtgattccccttctcttttaccaaaaccctccatcactccctccctaaatagccatgagcatatttagttttcttgttcctattattcactttttgtttcctttacgccatgaataaaaccaggtggaagaacaccattgagagaccaaatcattggagctatttggttcgtagccagagtaggaaaaagagggaacaaaggtcaaaccagatctgattcttgttgttggagctattcaatcccttttcccaaatctgaatgagagaagaagcaccaagattttgaatatggtttgcagctttttttttttgctaattgtttgggatttggaatgttaaaagaaagagtaatttgcggcataacctccataagtgcttagtttattgtaactaacccccaattctaaaattttggtggtaaaacccccaaaactcgtgttctgttagcagtttaatatttccgtccatttttaggtgttaagtgctatgttaaaatgtgtatgtgtacacagtgtacacgtgacacaaatttattgctcaacataaataattatttaaaaaataatttaaaattaagaaaaaaaataaattttgaaataaataaatataagacataattaaattcaaaataaaagaaaaaaaacctaattttgaaacctaaaattatcgcacagccacatctccctctcagctgcatctcccaccctctccctctgttcattatcgcacctctccctctgtgcattattgcacaacaacccatccattctccgaccaccccaaaaacccatccacagccaaaatacaagccaaaccaccatttgaataatcagggccggccctgagaatttatgggcctaaggcaaattttattttgggacccttcaaaatatataatttttttttttgaaaaagagtgttttgggattcgaacctatgacattgtaatatgtcatacaccttaaccaactaagctatgaatatttgttgtttacaatacacttaattttacttaaataaaagcctaataattttttattttttaatttgggccccctaaaggtgtgggccctaagcacgggcctatcccacctatgcctaggcccgaccctgtatatatatcaagtagatatgggaaaaacttatttatttgatcatgtacgtagaacacaaagtatgaggttttcatcacctcatgatcctcattttaattttaacgatgtacaaaaaccaacagaagaaaggaaaaaaggaacactaatagaactaagggaaacagtgaataaaatgctaagaagtctctttaagggtaaaaaaaaaagtaagaggaaacaacattgagaagcctgatccaaatccttaggcagtggatgagtccacgagggacggttatcactcggatcatttttctaatgatcctatttataatgtagcaatatatgaagaaaatgattatcataattttgaatttactcctaaggaattttcattcccagatggcgatctagacaaccaagatggtgacttaaataaccaagatcgaagaaaattattttggtactgaacgtgtaaataaaattttgttataatataaagtattttttagctgtttttttaaattttcttaatagtcttagcttttttttttttttttt

SEQ ID NO: 112522 - DNA, 903 bp, Cannabis sativa
gcacgtagtttttgctagtatactaaatatgtatataccttttaatacataaataaatttatataatatattcaaaattattacttcttaactatatgtcacccaaatttttatataatttttgtatcttatatataaatttaattatataactacattgttggtatattgattaatagtgtggacgccaatttaaaacatgtatttttgctaggtgatttgagtcgataatcggattagatttaattaatttgattgtttatatctctctttttatttataatgtatatttcataaaaattgtctctgattaacttatgatacgtgaacagtactaataattcgaaagaggccgagctggaagcttcttgtggctactttgccatgtgagtgtaaaaatatttattagataacacatatccttgtggttgacttttttatatagaaaaagaaatgaaatgttttgaacttgatgtgaaatagtattttagtactaaatgtaggatcaatatatctatctatatatattatacatccaaaatactgataatatatatcactatcatataccgtaacatatatgagaataattacgattaattatttgatatataaatccagttatctcaacgacaatttgttgacggggtccataccaagaagtttagaacatctattgtacctaacacacctgtaagtcaataatgctaatactctcatgcacgtacgtacttttgataattttttattattacttacatatattactcatactaaaagtgttattattagacactagtaatgtttaacactttttataagtagtaatttataattaattgaagatatattttaaaaattattttttaaaattatataagattttttttttgacaaagtgat

SEQ ID NO: 112523 - DNA, 4812 bp, Cannabis sativa
  modified_base (177)..(177): a, c, t, g, unknown or other
  modified_base (722)..(728): a, c, t, g, unknown or other
catgttgtttatgcctgttagagtgtcaattatccatgttgtgaacgatgtaatttaagggcccgtaattcgccgagcagttgttccactcaggttggtcgatagacctaacttcagaaacaaagtaagattagtataatgttatgcgtatgtatttacatgtttagcatacatgtngtttatgcctgttagagtacattgataggagtatcagtatacatagagttgtactggatactgataaatgtatattggctgaaatactgatcgatgttatcacattaatatggctggagtatgactagcatattgagtataggctaatattatggtcgatagtattatcgtatgaacattctagactcagtaccgtgtgggacacgggaatggggttatggttgggtgtatgggtgcctgattataatctaggatagtagtatgttttatgttatgcttttcttacaaagtctgttgactcacagttacctccatgtgtaggtaaaggcaaggctaaggctgagcagtcgtgagagcgagctgatgaagattgtacatgtcggggtggttaggcctggagcgtacgatccttgagacatcaggatttttgttgtttagtcgctaagcgacagactattatatatgtatatttaaacttttttaaaagtttttgtaaacgggatgccaaaattttatatgtatgttactttatgtttttaattaannnnnnnaaattttaattaatcatgattttcgataacctcgttgattagtaacgagctgcacatcaagttaaaaatcacgctaacatgcctaagatagttaggatgttacacatatttgcggcgacaaaatttggaagattagtccaaaatatgaagggttttactgacgcaagtagtaaaatgtgttggtaaaacataccctttatcggcacaaaaacttaacaaagtcggcaaaagtcatcattttcgtagtgcacttacccatatctttccataaaattatagaactttgagctttttcttcgataaatttgatttccacgtaaatatgggcaaaatcaatgacttttgggtctagtacaactattttggtgtgagattttgcgtccgaaaatctcaaggactccactcaacttgagagaatgagagaagaaagaaagaaaggcaatagagaaaagagaaaagagtaaagagaagggaaagggagatgtgagaagtattttggctagttaagaaaagatagcatacttttctaagttttattatgggaagaattattatgttattttgagccattttcatactatttaagcaatatcatatcctttatactttattttcaaaccgtttcttaaatcttttcaatattaatctttattttttttatagcaccacaacaacttttctacataacttcaacaactaccccagttgaatctctcgccaccataccaaaccccactttgttcgccttttgaaaaattgtgccatccacattaaccttgagataaggagacaaaggtgcaatctaatgccctattacctctcttgaaaccaggttttgagtggttatatattttgtctgagcattattccagttctcaaaggtgagcttagctaacaacacaattacttcaatggtagtcgatttaagcttccaaactttattattttgatgtttccacaatgaccaacataccatagctacctcaataatagtagcatttgaccaacgggttaagccatcctgaaaccaagcagtagatgatgcttgaataaccgtgcctgttgcaataacacatttctgccagcaggccttggccacagggcaagtaactagtggatgcaaggatgactcaagcactgcataacactaggaacaatccacattcagttgaacatgtttaagtctcaactgtgtttttgtggggagacattttgaacaagtacgccataagaaactcttaacttttggggtatttttagttgcgaaagagatctccaaaaacctaaatttccctctgcattccagtttccttttagctcttgcaagagatggaaagcactacgcacagagaaaaaactagatttctcacgaacccaataccagttgtctgcatttgtttcgtcactcaaaggaatactccaaaccagcgttttatctcaatcattcaacacatcattaagtatctcctcatcccaccgtcgctcccccaccttcattaaagaatttaccatgatgttaaccaacgctggatgattagaagtaatatagggattagcatcatgaatgagccacagatccttgccgacataaatcctagcaccctaaccaactctaattcgaatgccatgtttgaccaaatctctcgaggcaaggacactcctccatatgtagcttggattggagcctaattccactaagagattggatccttgaggatagtactgagctttcaaaacccttccaaccaagctatcttccttagtcaataaacaccacccttgtttcccaagtaaagccaggttgaaatcgtgaatatctctaaatcccatttctccaatatccttgtgcttactcatgtttttccaactcatccgatgtataccttttttctgagaagaattcgaatgccaccagaaattacacatggtcatctcaatattcttacacaccttctttggcaattgaaaaacgttcattgcataagccgcgagagcttgaataactactttaaggagaacctccttacccgaccgtgataataactttccataccagctttggattctccttttcaccctatccataatataaccaaagatcatatttttgttatgagaaacagtactaggcagacccagatatttgttattatcatcagcgtgaacaactcccagcacaaccactatattagcacgaacaataacagaagtattggtgctaaaaaacactaatgatttctcaaaattaactttttagcctaaggccctttgaaatacctccaggagttattggacttgagagacatccccattagttgccttgcaatacaaatagctattgtctgcgaatagcatatgggagatagtcaggacactattagctattttacaaccatgtagccacttgcgctcctcaaatttccaaattaaggatgaaaagccttcaacacaaactagaaataaatatggggatattggattgccttgtcggattctacgagaaggcacaatgagtccaatctcgtgcgatccactaaccaccctgtactccaccgtatccaaacactaaaatataagcctcacccacttatcatcaaatcccattctagagagcatcgcacaaagaaaggaccattcaatcctgttgtatgccttacttaaatctagtttaagggccatgtaaccatctttccctttctgtttcctctttaagtaatgaagtatctcaaaagacaccatgatgttatcagtaattaatctaccaggaatgaaagcactttagttaactgacactacctcattcagcaagaacttcatgcggttagcaagaactttgatgatcactttcgacaatacattacaaagagaaatggctctaagctcactcaagcttttgggttttttcttcttcggaattaaaatcacattcgtcttattcagcccaacatccatcaccccagtataaaagaacttacgcactgaattgatgatatcccgacccacaataggccaaaacttttgatagaaagccgaattcataccgctaggccctgagatttatcaggatgcatttgaaacacgacagtccgaacttcctcctctgaaattggctttaacaactccatattatgactaatagatacaattttcaacactgatgaaataacttcactccaatccacagctggatctttaaaaatatcatgaaagtagtcaaaaatgacattttcaagcccattatcccacccaacagtgatacaatcagtattttttaattgaataatctgattgtttcgacgcctggcattagcacaagcatgaaaaaacttactatttttattgccaacttggagccaaaattgcttatatctttgtttctggtagatttctttttgatgtaaaaaatcaaacaatctctttttttttctcttctttaaacaatttcactccctcatcatcacgccttcctttcaatcttttaagagtcaagttacaactcttaattttctgggcgaaattgccagtaacatcttttccccactccgctagatctttgccacattcttgaattttgaactgaagggagcaaccttctaaattattccaacacctttgaacaacctcctcgcagcctgtctcacccaaccagtaattttcaaacctaaacttcttctcccccactctattttgagcacgcgtatcaagtaacaaaggtgtatggtctgaaggagacacctccaaattaattaatcttgcacactttgataactgaaaccaatcggagcttgccattgctcaatcaagacgggattctattagtgtcattattttgtgaccgtttttgttctgtgcaaggtgtattggtctctgtactatctaaaatgttcttagtgtcatctgatcaataaattttgcctatgagtatgcttgtgtttcaaagttcttgagcaatgggttgattatgtcctttcccatctactatatgctacttcgattgatactaagcttgaatcttccccagataaaaaggctacctcttccagatgcaatgggaagagctctcttaaacctttttctaataagt

SEQ ID NO: 112524 - DNA, 4234 bp, Cannabis sativa
  modified_base (847)..(863): a, c, t, g, unknown or other
ttttttttttttttttgtgatgttgatttgaacctgttctttaaggcttgcaagaaagcgggagtttggtgaaagggaggggagaatggggatttccgaattgggtttcaggtgagacacaacaccaaaaaacagcttcgtgttggaacgtagagggagaagaaagaagaaagacgattatgatgaaggggcttcatcaagggcaaaatctcccaccagacgtcacccaagtgatcgaacagctcgagcgccattgcttggccccagatgattctctcgtctctaagtcctgttactacgacctccaactggtatcacaacacgctcttttatgtttgtttggtttcctagaaaatgtgggttccgttgagtttaacctatgtttttcgtcttaaatatttcaggcgagggaggaaatgtttagggaaaggcttcgctacttggaagctatggtaattatgcattatcgattatatcttggaaatttttttcgactctgtttctgtgatgatcttggcgttgataaatatatatattgttttgttaagttgcttattggaggtgggattttctcaatgtaggcaatttacagtgaggctatagcaatggtggaagactatcaacaggcggtttcggtggctaaccttggaggaattcgggatgtgcagggcttattcatgcaacttgggttaaagaattcccctcaggttttaagtagttacattttaatatcggttttcaaatgagttcgttcgatttaattattatccaaattcatagacgaaacgtttgccacaagacatctattgacatatacaaatagagtactattattattattattatnnnnnnnnnnnnnnnnnttattattattattattgttttctccgtaatgtttttctacgggatctcccacaatttttcaaaacaatatgagtagtaataataccaaaattaagattcaaacatcatatttgcacacatacttgttttgatatttatatgtacgttcaagagactgtttgaattcttattttgttatcctaaatcatccggtaaaaaaaatgttagaggacccggtaacacatgatacgctctcgtgtacaaaaaatggagttgtaatttatccatatactgaaaataccaacaattattataggtagtggatagtgattaaaaacaattactactatagtggtaaccatataaatatatattcatacaataatgtaaagttagttttggcaaatttccactgctatcttcaaaagtagttcctttgtacttaagttgtacataaagagcgaaaagaaaatgtaagtttctgcaacatggtactggtacttgtccttggttctgaacttgtattccattgaacataactgttgatggctgaaattttggatgaaatcttgcttgactaaggtgacgagcttctcttagaaatatccagttattttatgaggcttagatttagcctgtttggagaatgacatatttgtttatcaggtgtatgagactttggagcatcgtatggttgttgctgaagcagctcaaaggttgaggcttcctcttatttcaaaagatggtgaatttcgtgaggaggaaattgagaaatgcagtatcttgtcacgaagttcccttgacagtacaagtagtagtattacaatcagctcaacctccaattcaaccaattacacaactgccaatagcacttccagtgctgcaaatactattctttctattgctaccgattcagaacctggagttggtggtgttcctaaccgcttccttggaattacacctgcttatttatggcaaagtcaactccagcagaaccccttgtccattgtaaggcagtgatgcagtacaaactcttgttatttagtgtgcttttttcagcctttttgttcacgcatttcatgttccatatgtatctattcagtgacatttttgttttgatccctttggtcatttattaatatcatagtactgctttattaatgtaggatatgacagagtaccagttgtgtctttcccgtgagattgaggctcgtttaaaagctaaatgtgatactttagctgatgcttttataatggatgacataggtataattctctcttgaaaaaaaatataaactaaccttgcccttgtcatgaagtgcatcacatccactggggaatttctggtttgagataatatctaatttgcctatgcttacatatattttaacatatttggtatttctaatcccagcttttgctgttgtagattcatcatctggacatcaaaattcaagtacacgaattccagaaaggttatcctcttaaataggcttttctcttgtaattgaactaaattaaattgtgcgatgtcctaattttccttttgtttatcttacaagatatcattcctgatttaaatgtattttggctgggaaaaaaagaagattatatgtgactcaaaacattctatatggtgtatggatctggatggttgaattacaggaagaaatcatctagttttattagtttgaattttgaatatcaactgcggttaaggaagtaattaatgtcatcttgtagactgctgggatttgtgtcaatcataattttagtgacgagaacatgagggccgatttttgtccttgtttgtagtttccttgttttattgagatttattgtcataaatcaatgattgtggtaatctttcctttataagcactgcttgaattatgtatgctggtctgcaatgtgttattatagcacttcattattggttgtatcagggttaaattcatcatagaagagattgaaagggaagaagctactctaagagaggacctgtactctgcagatagaaaatttgctgaatattatagtgtatgtcaataagcagttcatgtcatacagaaatccctgttatttttcaaatatttcttctaatgatccttgatttgcttaaaataattgcaccaaataggtcttggagcagatactgggcgtgcttattaagcttgtaaaagatttgaagctgcaacaccaacataaatatgtaagccttttcctttcttgagatctcttacaattggaggcgattcttggcttttagcattaaatgctcctagaacttcactgagtgtctattcttgtgattttgctattatgcaataggatgaactacagaaaacgtggctctgcaaaagatgtgagaccatgagtgcaaaattgaggtttgtcatcgtatttctgtaaaacaaatataaacttgtgaacaatggagaatattcagaatagatacacagactgcattttcattttctgtaatgggagttttctttttatcttcttagaactccatccttgatggtactacactaatcttataaaagtataccttccaacattgattttcttggtgtttgaatacattttcagctattttcatttcatatgcttaattgggtcattgaacaatgtgatctagcctcatcagctcactaactcataaatgattgtcttagggttttagaaaatgttcttcttcttgaaacttacactcaggaatcaataccagctctacataaaataaggtaataagtggtgacactccttctagtgaatctgttgtattttttacccaaagttaatattctgtcatatttactgattaccaggaaatatcttgttgaggctacagaagaagcttctattgcatacaacaaagcggtatgcttttcaatcatgattgtaaactaagttttctcttttggttgtgaacttttcatctttttaaagcatttttttttaaaattataataatatgaggcataatagtgagaatcactttgacaatacaaggaaatagcaattacataatactctgtcaaatctttaataagataggagataacaataacaataataataatagtaaggaatattgatagcaaaaccacctgaattttatattttttatattttttaacatttaatcacaaaaactgaaaactgattttttgacggcaaatacctaaattgcatatctgttttggtcattacccttccgcccaaaaatcagtttttgtgattaatgaaaataattttaaatatttagaaatttaaagaattagaaaaaattaaatatttaaaaatttaaagaataaaaaaaaattaaaaaatatttaaaaattaagagcatgtttggtaatgttttttgttttttgttttcaaa

SEQ ID NO: 112525 - DNA, 1122 bp, Cannabis sativa
tcatatacatattttaactttctcttctacatttctcacaggtactttcaaaagcagtagtgccacacgtaaaaaatagcagagctacatcaattatatttttgatgggaaagaatatagcaatattgaaaatgatgatatgtatatatttaaagatatgtacataataacctatgctaaaatcccatataaattaatgtagaatataaacaacattctgtgtagttaataatttgatggcagtattttatgtattaatttcttttgttgttagtaataaattattcacatgattagcatgcaggacacaactgcaaatccatgagacttaaaaggactagattacatggagaggcatttatatatatgaattcaatcttcatgcatgtcataacttctgaaagaaacagaaacaatatagctgacaaccccaagaaaattaaataaaaatggtaattaagggcatgattttcttcatatctgatatagatgtctgtcatagtaaatatgcaaagacatgaaataacacccatttggctatttacttattttgaattcaagaaacttgtcttttagttcttggatggcttctataaacactgtagtactagctactatacataacatctctcataataaatatgaggataaccaagggtaagagtagtggactaacaaattgcaagggtaaaagtgtcaaatcagtacatatattttttttaaaactgtacattacatgatatatagagagagacagagagagtagattttttatatttattgtttatttttcaaaataagaacatgcatttgtttttatatttttctctttctctctctatatgtctgtagtcctctccactctctgacacactactcactatatggcgtaaacttgatgcctgatagtgcaagcaaagcaaccctctttttctaattttaattttcttttttataaaactcccttcgtataatttcctctttgcctgaaaaaaatctgtttctctctcttttatggttgtgtctctactactataaggcataacatcttgtttagtgcttcactaacaaaacccacctcttaaactctttcacttcctctcttcttttccttctctctct

SEQ ID NO: 112526 - DNA, 4129 bp, Cannabis sativa
atcctgattaggggattagggttcataatcagttttggggtagcgtgcctaattatttagggcgttacactacctccataggctggccgaacatagcctcatccaactagccaaacaattaagtttttttcaaaaataataataataataattacaagggtgcgttctataaccactaaaatggttttttttttttttttttaatttttctaactagaaaaatatgtttcaaaaaatgttttcattttttactctttaaataagaatcaaaattttgaaataaaaataagttactttcaaattattgatgctaagaagtggtcaataccgtctcgctagattagcgagataaataatgagtttaagtatataatttagagaggcacacaaaatttatagtagttcactcaccacgttgtgatggtaatggatctacgtctacttcaagtttttatttcttatgagatggtaattacagaaaaaggctaagtttttaagctctggtttctagagagagacaccagaatgtgatgctctgaccttgtgcgtagttttttgaatgtgcaaaatgaactaaggaagctctccttttataggtgaaggagccaaaaaaaaggaaaaatattcaaaatattaaaatcctaaattggctaattttgaccgtagatgatgatccaatagccaaaattaacttttgaagttaatagtcattcttttagagcttggcgggagtcgggacccactgtaggtaacctggagcttatttttgtaactccgtttgatattgaagtgtgatacatgactttatagaacattaaaataactttgaaagataagttgaattgtgtcaatcaaatcaataatgagtgagttatggctgtattattgaagacagttcacaacccaacgcccaggttgacatccagtgcgcatgttgacattccagcgcccaagttgacatatgacatcaacctagatgttgggtaagtgaaaacgcatctaagtaatgtactttatgatgcttaagtgatattttgacattgtttagtttgttttcgtgttttgatgaagctagtcaccaattcccggagatgttattgctctacaaaaataagaaactctaaactcttcatttccgagtgagtttctcatgttggaaatgagaaatgtaaagttgtgaattttacttctctaacttcatggatcttagtcattgtgaaaaattagacagacgatcgaaacagaattagaactgaataagccaaacacaccggaccttttgtcaacttgggtgctaggtacttcatttctgagctcctagggttgtcattttgatactatcaattttcttatactatagaacgaagtctcctaccatattttggaccattttgaatttaatggtcgaatcaaatttggcatttgaatgatcaaaaccagtgcaccatattaattgtcaacttgggcgctaggccctgtttgtagggtctcgagattgtggctctcttctcgagttttctgaatcttcattatttttgatgacaaaaaaattgcccataatactttttgaagaacttgattggaaacagcctaggttgacaatatgtcaacttgggcgcttggcctagtgctaggtgtcaacctgggcgctgggtcccctttatggccctttgaaagttctgtttggtccccagaaatagttgaatattaatcttttcagaaaatggagaagatgctcagaaaaattctcataaaacacccttgaaatcgcccaagttgaaaaaatgtcaacctgagtgctgggccttgtttctgacacccaagaagtgttgtttcttccctcaaaagtacctatttccccgttttgatgaagaaaaagaagatgcaaaagtcagatcattgatctaatacttggaaggcacccatattgataaattatcaacctgggcaatgggtgaccaggaaccgggtgctttggttcctcaaaaatgaacttgttctaaatttaattataatgcctcaaatatgtttgtggtatgtctagttcatgttccaatgcaaagttagacccatttttactaagacgggcccaaaaataaaaaccctaattacggatgtcaacctaggcgctgggtgaaatcctaggtgcctaggttgacttttggggtgcaggctcatgtaatttcagctcccagggcatggatttggatgctttatatcttcatgatatagaatagtgagttagaaacaacttagtaggatccaaacacccattctggagttcccgaagtcaacctgggcgcaagtctagggactcttcctaggttgacatgttatgattcaggactactcaactccaagttgtgttctttcttaccacgtgttaaacattaatgtccacatcaacatggctacttttggtgaaacacaaatagtgcatcctgtaacacttttattttttaataacacaaaaaagaatgtagaatttttgttttttgtttttgaaaattaaaaatctattttataagtgttgaaaatttgttttgtaattcttttttaataaatttaatttttatccctaaactatgatatttagaatttgcccttgatttattattttgtaaaataatcctcttgaactatagaaatatttgcaaatgttcatttttgcaaaaaaaagaaaaaaaaaattgtgatataagagtgatcgaaagctaatttattataattcgtgagtccatgtaaaaataattgtatagacaatactttaatgataaaatctaggattgcgtgtctgaaattttagagtaatgtttgaatatttaagattatatacttggtttcaactacatttagttagttaaatatgcttcatagtgaattatacgagtggctcgtggccgcttcaataaattatgtcttaaaataaatgaaatacaattgaggggaaaaatttgcaattattttcataggttgaaggaaaatttttacaaaaaaaaaataataattttggaagaaaaccttataagtgtcataatttggtaggtaaatattctattaatccatgttcgagtaggggcttggtgctgggttgtatctaagtcagggtcgggttcaaatcacgaggttaagatcaaattgattataattaaaaaatgcctatttaaataaaagtttgaagtaatttatttttgttttcaaaattttattttttagtttgaaagataaaacagttttacgaaacatatttttaaaatattttgaattatctaattaaaaaaaaactttttgaataagtgttatataacacacacaaaatttgtttaaataatttttttttttcaattataatatattttgtattccttttcattaatattttagattttgacccgaccccaaatctcaaatctcgacccactttctcttactttattttcttagtccttaattaattaaaaaaatactttaatttttgtgatttaaaaaaagtaaagaacaaaaatgttacacattgcaccatcattcgtaagagtatttctaacagagtataaaaaatgtggtgtattattatattttactacacttaaaaaattactactccaatagttttcttaaaagtgtattaagtttagcacatgctaaaagttgtgccaaattagacacaagatattatattatacaaaatttaaactacaataaaactactttttatttactataatgacactaattaccatataaccattatataaatgattaaagaatgaaaataatatatatatatttttttttttgtatattctcgataaaatattaaatgacctacaatataatcattttttttttcttattttacattttgtgcattataacacaattataagtattgggccaaatataacacaaagtttggatcttccattggagatggtgtaagacaatcaattcacaaggagtttagcaatagaaacattttctcttggaataatgttaggcatcttaaagtgttcagcactataaaaagtgtcatattattattggtacaatttaatattggattgtataaattttagagcattgctattaggcaccagtggtgcctaacaccttctcgacatgtcacgtt

SEQ ID NO: 112527 - DNA, 1653 bp, Cannabis sativa
tgttatcaacatttcaaggcaagggtatgcagcatcaatgtgtactgtacttgttggaaatatagtcaccaagtcattgcaaccgcgaatgtagatagattccaaagacgggaaattacaatcaggtaaagccacatttaacttctgacattcatttaacttgaatatcttcaaacatgggaaaatctcaccattttgatcatctgcattagtaaatgaccaatccaacatagtcattcctttgagatgtaaatgtgttaagaagacaaatgacttatttaaagaaatgccatcattgtggatgtgaaggcaatcttcaatttcaagatttgtgagtgaacttagcagccgaaatgatgacagcagcacgcaacaattcttacaactttctagagcaacatgttccaagttacaataagatggatgtgttacccaatcaggcaagctcgtgccactgtagcccttgattgtgagtctcttcaaatttatgtgtggttttagtgcatcaagaacttccttggcttttgatgaattatcagcttcactatcccaattcaaaacaagcccggtaagatattctttgctcttcaagcttccttccaaaacatcactagcttcttgaacatactcaaggcctgaaatacacaagtctccatgcaaattctccaacttacccaactctttgatcctgggcccatcattttcacacaaaacaaaatcacttagtgtctggagattgaccatattgcaaatcctcggcggcatctcttttaaaggtgttcctttgatcataaggtgacgcaagttgattagcttagaaatgttggcaggcaattggatgagctctgagcaacttgacaatatcaatgtttccaaattgtacaaaacacaaattgaagtaggtaattctttgatgtttgtgcctgagacatccacatatcttagatgcttcaaatttccaattgaagcaggcaattctactattttagatctaggtaaagaaagtgttcttaagcattctccaaccttcaaaaccatttcaactgtcgatgtgtccccgaatccattactattatgtgacaataggccgcgcaaatacttcactttggataagctctcaaacaatctcacttgattccccgagtcatgcaaatatgaaaaatggcgaatcttgcttgtaagattaagtaggtcttcagaattgtcatagctacactttcctgatacaaacatagctagatcatgcatgagatcatgcatagtgaaagaaaattcatcacttctagatctttgtaagaatgatcttgacattaaaacattcaagtagtcttctccaacatcttcaattcttttccctttttgaggttgcaaaacaccttctgccatccatattaagattagtttttctctatcgtatctttgaaattcataatccttgggaaatatggagagataagaaaaacataactttaaatatggaggcaaaaaacggtaacttaaccacaaagctggaacaaatccaatattgcaacaattgggaaactcccatacaccactttgcagtacatgtttccactcctcgcgagttgacatagatcgtaacaaaccagccatagattttacagctaaaggaaggcctttgcactttttaac

SEQ ID NO: 112528 - DNA, 2478 bp, Cannabis sativa
ataaggttgctcatgttcccaaccaaccatgctgccaacacttacatttacaatttttaaatttattaacatatgatctacttttactgtcgatatatgcatacataattttttgtttcattagatgtctctactttttttctctcttttcttaacatctcatgatcacatctcttttcttttttcttatcatgcggctacaatgattagaagaagaagacatcaaatatgggctattgaggaacaactgaggaagagaagatattggtgacaattttgatgagttatttatggataccgttgcaactgaggaaaatgaggagctttgctgagttgttgaagcacttgaactagatgagtaaatatgagttgttttttagcatatgcacccctttgaagcacccgaactagatgggttttaagggatttttctaattgtaagtacaagggggtagtggggctgcaagtcactagcacagttaggctatgtaattgtatggaagttggattttggtgagtgaaggaaaatgtagaaaaaataaataaataaatttttcaagtttggtactgaaatttttgttgaattgtgtgttttttatacaattttttttttttttttgaatattgctattgggcatcagtggtgctcaacatcttttataggaggtgtctaccccacgacattctcaataaactattgtcttaagtaatatgagatctgatacttaattacactaataatagcaaacactaatgaatatgctagacaccaatagtaatttttcacaattcttaattatttattatttttatttttttcttacatttttcttactttctttgtctcaccaaaatttaacttccaaacatagtattaatgaattttttcagcagggaaagtgtgaataggatgaatcatacttctatttgcttaatctcaaaaaaatgaaagtgcttcgaaattggatcatttaagtccaatacttttatgccatttatgttacaagatcatttcttgcatttcgactgatagattaaaggaagtgatggacaagctgttgtctcctttccaatatgtgttttcctattgggtagttggatagcggaatgttcaattctagcgctcttagcttgagcttgcctaggatgttattatgctcaagagtgagttctcacccatttttacaagtagttcttgtaagaatgtcttgtaatattataattaataattataattaatttttatttttttgtgaatatttaattagtcgactcaataatatatttatgattagcattatcataattattaattttgttatctaattaaatgttttcattaattgtcaaaatattctaataattaaatgtgacatagactttaaaaaatatattagctatataaatgtaaggtattggttcccaatctcactactcatttagtttctatcaaatcatcatcatagagagttaaaaagagcttggctgaaaatcagattaatatattagtggaatttacatctatcaatggctgaaagtacacatatttgatctttttacatatctatattcctttattccacattcataggattgcatatatgctttagtttcatattattctaatatttggtatcagtagcctcgttacaacatatgtcttgatttatatatgcattcttccgagtctatggttgcatattttgttgaaagaaaaatacatttttaaatttcataatgatcgattatatatataaattatatatggttgagccaaacatctcgatcacttagcaagaaacaactttgctacaatcttgaacagaacatgttcacccgattgaaccttcttcccaagagctcaataactcttaggacaaaatcagaggagaaaattaataaagttattagttgtgtgtaatttgtacaatgattaatcaatcggttacaatgggatacaaaacctatttgtagacataggctaaaaatggaagggtaccgacccctaactaactataacaaccacttaacaaaacaagtaagtggcttagtacacgtgtacactatattagcatacattacatttacaattctccacctgaactgaactgctaatacacaactactaatctaagtagaaaaaattactaaaacttacggtgtcaatgatatcagatgtcagtgacgcagtgttgaaactttgctatagtaagtgttttagtaagcatatttgcaacattttcctctgttgagactttgcatagtttaactttttcttcattgatcacatctcagatgaaatataatctaacatcaatgtatttggtcttttcatgaaatacttaatttctgcttaggtgaagagcactctggctatcacaaaaaatgttaacagttctttggtttattcctagttctcttgtgattcccttcaaccaaattccttctttgacagcttctacacaaattatgtattca

SEQ ID NO: 112529 - DNA, 3430 bp, Cannabis sativa
  modified_base (3375)..(3381): a, c, t, g, unknown or other
ttataaggtaagaaatcgaatatgaatgtataacaatcttaccataaaaggaaaaattattttgtcaactaacgtgccaaaaaaaggactttacatatatagatgatatgattctaaatttgacatgatccaataatgattcaacacctatatatattgtgttagattaatatgagactatatgtgtatataaataattctatgaatcgataataaggaatatatattgaacgtatacaaataaaaatgatcgaatattgtaacctctatccattgattaatgtcagcccccactaatgtagatgtttagatctgtaaaactaagagaaaaaaaaattacggtatagatttttcaagttctcactaattcttttttatggtgatttgataaaaattaaatcaacagtgagcttaaggattaataccttatattttttttttttttgaaagaaaccatatattgcaacaagaagataagaagagagtacaggttacaatatatcaagatttggaatactacccttccaaatgacctagctctcaagtcttaaagctgtcctatctaacttatgaggaacacctttaaaactcctagatagatatactggacagaaacattaggaaaattagagagagaggatacaatatgattaactaagtctgagagtgaagacttatccttccacctgtgtttaattttacttattaaaatcttacaatcactctcaacaatacacagaggaaatcaaacaattaaacaccagttaagggctgtagccagcgcctttgcctcagccataataggtgataaattgccattcaaaggagaagagattgctgccacaacctccccacttgaattccacactgctacactgatcccaattttatttctgctattgtccactgcagcatccacacttaatttaaataaaccttcagcaaaagactgactcactgaattttccaccatttggccttgaacctgaactggtgttgcactctaaccctcacggactgcaatacaatctcgagcttcataaaagtcatttaacaatgtattcacctgaaattcagcagtagacaagatatacttattcttattaaataaaaccatatttctcctgttccaaatttcccaaataatacataagaaaattcttagctcctccttagacaaaatatcaaaccccctaagaatatactctcttatatcataacatacatttattatgtaagtagaaagatttaaatcgagactcactccactccaaagaagccctggaacactctataagggcatgggaaactgtttcagcatgtccagaacaaagggaacaatgagaggagggaagaactttcctatgaaaaagattaagggcaacaagaagagcatgatagaaagccctccaaataaaatgtttaactttttgagggatcttaagattctagagggctttccaccaacgaatgaaagaatgattatcagaagaagtaggaagagaagcagagaacttagctaaatggtaagcagaattcacagtgaaggatcctgaagtatgacgctcccaaataaggctatccggaagagtaggatcaccaattgggacaacaagaatagctaagactaactcatgatcaaaaaattccaacaaccaatccttattccaacaaccattatcatcaataaaataagagagaaggatctgggggttgaacattacctttataagagatgaatctccaaccagggatccaataggagtgcataggggagatagtttcaccattgcctactttccacagaagacctcttttaagaagatcccttccccaaagtaaattttgccatgtaaaagaagcacaatgacctttgaatgcattaagaaaagaattgtgtctaaaatatttagctctaaatagtctgaacacaagagaatcaggcatcataagaatacgccatgcttgtttagcaagcaaagcttggttatgatgaacaaaagaacaaaaacccaacccaccagaaaatttagactaacacatattaccccaatttttccaatgaatcttccttttatctcccaccgacccgcaccaaaactgagccataagactttcaatctttctacagacagaccctgggattttaaagcaagacatagcataagaagggagagcttggaccactgctttaaggaggacttctttcccatcttttgaaaacaaacgtctattccaactgttcaacttagaactcactttttgaacaagaaagttaaaatgagagcttttagacctaccaatacattgtggaatcccaaaatacttactcacaaaaggtttattatccaggcccaaattgttataaaaaaaaagtcagaatcagcaggattggtgttaggagaaaataaaacagaggatttcgagaagttaacatgttgtccagtggcttgatgataaagatctaaagcctatttaatagctaaacaagattgggtagaagtagtagtaaagagcagactgtcatctgcaaaaagaagatgagaaatagaaggggcaatacgacaaatagaaattccatgaaaattattaagagattcctgatatctaatagcagcagacaaaccttcagaaataagcaaaaaaaggtaaggagaaagagggtttccttgtctaatgccacagctagacttgaaacaatcagacattacaccattaacaagcaatctaaaagaagcagtagagatgcatttaattacaagtgaaacaaaattaataggaaaataacaacgaagcataatattttgcacaaaattccactcaacttgatcaaaagccttttctatattcaactttattgtcgcccaaccaaccttaccagattttctatgattagtagcattaaggaattcattagcaataaaattattaccaaaaataactctattctggattaaagcactttgattcaaagaaaagatactattaggaacaccattcaaacgattagctaaaaccttagaaaccactttataaagagtagaacaaagactaataggcctaaaattcctaactttatttgcattctttttctttggaattaaaactactatagtttcattaattaaagaaagatcagcattattattcaaaacagaaagcacaacagcacacaaatcaaggcccaacatagaccaatttttttgataaaaaagcgcattcataccatcaaagcctggagctttatcaacaaccaactgaaagagggcctgcttgacttcatcagcagtaaaagccttattatcccattttttttactctgacgttgttgggttttatgccctaaataaaaccccatttcaatgtaatccagannnnnnnatatcaataaagtaacagaagtacatttcattcatttgtgtatattttg

SEQ ID NO: 112530 - DNA, 5373 bp, Cannabis sativa
tattcacttgtggaaacatggaatcttatgtcaatctagccttgcaatacaaagactagaaataaataaattgaataagcgtacaggaaagaacaaatctgcattaagatcattactactttgatctagagcctaatttttaggcagtaaggaacatgtgtacagaatctcaactgtctacaaatacaccataaaacatgaagacacttcaaactcctatagcttagctagacaggtttccagcaggaaagggcatatattcgacgtcctttccatccttgcatcaaccactcgccaagttgctcgacaagaaagtccttgtggtaactcaattgtactttcttcttcactgcttcaaaggtttcctggtcaagtggagtctgcttgaagccagccctggcattccgaacttgccactgcttgtaggactccggcctctcgactctttccatgccctcacatgctatgatgttgtttatatctcttccatatattgctttctcaaactccatcctgtacctttcttcacggggtactgttgaatcaaacatatcaaacagcgaagagtagtgcaggagtgcctctctgaaccgtgtcaagaagaaaggcgcattatatgttccattataaacaccatggatgaaaagcgcagggtttatcttccttaacagctttaggacagtgtctctaggattgtttatcaccacagtttcatcaagtatgtgctttaaccggtacatacagttgacaacaacaagctcatctttgttgattttgagatcctcatagtggattgtttcccatttcttagcaatcatgttgtactctgaagggacattgaatctcctgcagtaattctctaaccgacgctttgtctcttcgaccctctcagtaggtcgaaaaccaggttgtggaagctcaactccagtcattctaagcttaggaggtcccccgggtgtctgtgagaggcgttggataagaccaggccattggaaaccatactgaataccaaaatcaatgatgtgaatggttttcgcattctttgctagtttcataattgttctgttagcaaagcaatatgacatccttaagaagggacaagcagtaatgtatagctggtgacctcttaagatatcaaccacagacatctcattgcttacaaggggtgaatacaagactttgctagtaccgaccaaccgcgcctcgaggccattggcaaaataatgagctaatctctgtgttgcagctccatcaggagaagaatgttgccttatctgcttgaacaagtctgttgcagttctttggtcatagcttgctacagcttgggcgcattgagtaagcaaagtccataaatccaccatatcagtcttgtctttgtcttgtttcttggaacgcctcattctacctgatctttttccctgctgcttaacctcatgctgctgctgttgttgttgctgctgcaacttctttgcaaattcattttcaccatggttgagtaacaccttatctaacatctcagttggctcaaaatcatcacccttcacggcggcctgcttggcactcctaacttcttcttcactgttaccatcaccaaattcaccctgatgattcttcttccccctttgtaaacagacgccatctttatccaaatcaatcatttgggtatttcccttttgaaagaatacacttgttgttggttcaccgaaaattggaccttgaaccaaatgggtatgatcaaaagaagttttgacagaagaggaaaagggcttagaagatacaacataatcacctttatcacaagaagatgggggataattctggccaagcacatcataaaatgacttctctgccgcttggagagccaaagggtcctccaacatcaatgactttcgctccaggtcttcttcctccatgagcatctcacttatgaatttgagcgtagcagtgaaggaatcactgtagcctggagaatctactaactcagaacaagagctcgaattattctgacttgactcacaagcatggtgttggtgaagttcatttgaataatcacaaggttgtgaaattccaccatggtcgttgtttatagcatctcttacataactttggttagaatagaatggaattgaattggggctgttgtaactaaaaccattcattgaaacaacaaattcatccaaaagggtatccataaaaaaaagaccatctatatatatatatatatatatatataaatatatctttaggaaacaaaacaattttggcagaaaactcgtgaagacagaaccaaaatacaacagctgaaaaatcaaaggacaacaaaaactacaaaactaatgtgtacacagtcaatcaaggataagagtcacaaagctagaagaaaccccaacaaactagtatggactaaaaacctaaaagggcttcttttttatctatatatatattatatgtggaattttacacttgcagaccaaaaaaagaaaagaaaaacatagcgatcatgattaaagtgtaatttttttcccaaagcatggatggaaaactaaagagagagagagagagagagaggcaagagtaccatcatggtaaaatgaatgttcccggaagtgctagaaaagtgaaaccagagcagttaaccaggtaagccgccaaccatgtaattatttacaagatatattattacaatttaccatgaaccaatcactttctgagagaactaaactgtttggtggttgagaggcttggctttcaagtcgttcaactcaataaaggagcaaaacaaacaaagacgaagtcggttgttctttttctcacaaaggcgatttaatttttcttcttaaaagaaaaaaaacgcgagttatcttcgacgctatctcatttctgttgttgtgtaaaaaaataaaataaataatctcacggatggaaaatgttttgacgcgtgacatgtagcttcttttgccttttctattctttttcctaattttgtttctagaaacctcgtttgcggtagcgaagtaaaaatagaatgttgtggtgagggcatgagaataaggatggtttttaaacaaaattaatggagttatttatttttattttttatttttttttattattataaaaattcacataataattgaagcagtaatttaaattgtaatttaaatttacatagtaatttatatatttttttattttagaaaacctgaaactttattaattagaaataaagtactaaaaaaagtaaagaactattccatatatactcattatcaaaatttaaacctgcccgagcacaggcatgagtaattttattaaactcatgagaaacataataatctatatttaaactatgagcaattactaaatcaactcaaatcataataataaaaaaattaaaaaaataatataaaaaataattttccaaattaaaaatactcctaatacaaaacagtaagtcttcacttagaataacaaacatccaggaaaattaaaagaaagaaaaaaaaacagtaaaaagacgaggattatagtagtttggcaaaatttatttgctcatgttcactttttatcttttaagaaaattacattaagtaaattttcaaattatttaaaacaattaccatcggcattttaatatcatcaatacaaaatgggtgtcattatatgtttggtatgagtagaaattttcagattttcttggtaggtcaaaatcctctattttttctctttaatttatttgtttttttttttctttttttttttaagatttttttccacctatatctgggggttttcatcaaaccggtcaaaccggccgtatcgcaaaaaaaaaaatgtggtttaaaattttttgcggtgcagtcgtagtttgaatttttctcaaaccgcgaattgcggtacaatttgtggttttaaattattaatatgtagttcaaactgcgtcgcaccgtatattataaaaatattaatttttatatttatttaggtccaatatgtgaatgttccactcaaagcacactacttattatattgttgaaacttcatttgtttttccatatttattttcaagtagtggtatttttgacaagtattgtccaaattttattgtatttgtgatagtttaattatttggtgatgatccaaaccacaaaaatcgcaccgcaccgcaccacattattttttgtggtacgatttctgtagttttttagtttcgcgatgcaggtgcagtttgaaaaattagaaaaactgcatgtgcaggttggtttgaaaaatagtcaaaaactgtaccacccgcactgcgaacaccccactcatatcaataatcgtggacttaaaaattacactaacatgacatattctataagaagatcattttaatatataaaaagtatattttttttcactgttgccagagaaaattatcgaaatcaaaagtaacattttagtttcttttatattcatgtttaaagataaaataattaaattttaacataaataaaatttaatatactaactaatttcataagttattaaagtatttattaatttatattcaaacgtaactagcttatattctatataagcttttttatagagtaattttggtaaaagtttaaaaagaaaacatactcatttatctctctttcttttatttaattttatttttctttttttaataaaaaaatttacattgtgttagcaccatgatgctagtgacctatcttattcaagattattaaagatttgaacaaaatctaagagcacaaattagaatctaaaacaaaacaatcacacacaatgatttataagcttcacttgtcttagaaacacattctaggcggctagtatttggattccacaaaccaagataataactctcactatttcaaaaggtgtctctcagaattaccaatttaagatacaaattataaacaatacaagcttttacaaaatacaacgaagatttaccttaatcaatcaaatcccttagttatatacacaagatccctttgtgtcaatgttaaactcccttcaacacatttcttaatctgaaatctcttccaatcttcaagcctaagactcaaactaaaatcccttcaatgcttccatctcatctttgatcttgtacaaaaccttgaaccatcacccatgaagttcctacaagaaatcggtataacgaagaaagataaagaagaataaaaatgatccaagaccctcgaggtaaaatgatatatctcttcaatgaaactgcttcaagaaagcactatatcgttgggctttgtgccctaaataaaaccctattttaatgtaattttttctattcaattattaataaagaaacatatttaatttcattacttatttagtatgtca

SEQ ID NO: 112531 - DNA, 3265 bp, Cannabis sativa
atatatgatttattaattccgcactttatacttaatcatatatgtttcaatttatacatataaattgtctaacataatacccattaaaagtgcacccatatatatatacacaataaactttataaaattttcaaaacaaaaaaaaaaatctaaaatataaattaataatattatattaaataataatataattaaattagtattatatatatattctcactaactatatatttcaaataataatataattaaatatataatttaaaaaaagtaaaatatatatatctatacatacaacatattatttaaacctaattattttttagcattcactcttctatctcttcttctcattttcctctatcaattatttttatattgctcttgtattgtcgtttatgtattagtttgtgtttacaatattaaattttcaagtatgacatatataatttttatatacaagtgtattattatttttgtcattgatgcaagttttgatttgtaaatatgattttcttaatatttttttctttgtaggctcatccataaaggttatctctttgattcaatacactaagtcgtcgccctactctctgaagagatggacgaaaattccaccttcagttgttccaagcaacaagatttcactttccttcatgtcatctctcttggcaatattgtaagtaaactcatatacttttaatttctatttataataaattgctttcttcttaagacaagacaatttctaatttatatattacaatttttcttaatgacaaataatgctctttaaaattttaatattgatgttgtgaagaaatgaacctattttccttatttttcatatgctatttttgcggtgttttactgtgataggtggctctacttcatttggcagccaatattgaagatcccaatgaagatttcctaccgttgcaattacaatgattagataatcattaggtgtacgaaagatttcttttctgttagaaatatatacatttataatgagccttgcttggctctatcgtgtaccctcaggcccttggccttgtttataaatagaattaactcagtctcctttccttgagctgagattttatattaccattgcttttctatttcttcacttggtatcagagcaaggttttcaccatatttgtagaatcccaaaaccctgaaaacactgtcccagctcaatcttcatgctgctgcatcaacaatacttggtgcaagctcaagtagttctcagctcccaaacccagtcacacatcacttcagcacactgaatcagcctttttacataactatagtctgtggaaaacaatggtttcaaccatagtaagaggccaccgattgcaataaaaaaaagttctatgatctatattctaatgtttagcggaagtaattttctgttcttttaatatcattaggaagaataaataaatgagtagttccagtagttctatgaaaataaaatgaagagagaactttataggttaatttaaaagtaagatataggttattctttttgaatcaagtgacactttaatcaattggtgatttcactatgatataatctcaaaagggtcaaagcaatgtactaattccaagctttgtctaatttgttcagaggttgttgatgaagtatggatccctaattttagtgatctctattgtggttatgtttatctacttgtggtagccctacgaaatcgggtgccggaagggtaaacaagaagaaatgttaatttattaaacacaaaaatctaatagcttcccaattgagtctcacttaatgcaatgatatgacataaattttaatttacacctttttttagttgatgatatagacttattgagaataattgttaatgctagagatatacgaattgttgacttgctattaattttggtagagatattattatatggtttgcctctaatgatgtttaaggaagttttctcttttagaagtaaatttggagagcttatactttaacttacaaatttttgttacttactctatttaagctttacttgtactttttatatgtgaatgctctgtgcttattataatgaaatactttcttaaacaaagtttcgtgtgtaatgacagcctctggcagatgcagaaagagtcaagaaatagagctcttaaagtcatatggcggctcatcctatgtgagtccatagccttatctctccattttctgtttttgtgatagtaaattagatagacaacatgtttatatatacatgcatttcatgaaaaatattagatatttttttttttttttcatgtaataatttacttaattttgcattgttgttttgatgtcttgtgtggaaagtaattttcttagtttactcattatgctcaatgaagaattagcatgggtgattgtcgaggtacaattgagaatagaagagagatttgttttttaaactgattctttcttgtttttgaattataactggtttctgagttattatgtgctatttgttttttatttattttattgtggaaccggttctgttttaatttatggataagtatttttagaattgactccttattagtttatgtttttttatttattaattttaaccggttctaaatactttttatgttgttttattttttttagtcaacatatttaaatattgacccagaccatgattttgttagtaagttgcaaagatagcgttgcatttattttgtatgatttatattactttttttttaaaaaaaaaaaaaattataaccgatttcttagtagttgtttgttgtatgtttttactcatttttttgtagactcagttctatttaatttatgtctcaatattgttggagccgatttttttaattataaccgattttagttattatatgttatttgtttgtattcattatgttatagaaccggtttgagttattgtgtgttttttatttttattcattatattatagaaccggttttatttttaattataaccgattttaactattgcgttctacttatttttattcattatgttataaaaccggttctattttaatttataaccagttttagttataatgtactttttattttttatccattatgttataaattcggttctattttattgtggaactatagttttatttttaatttctgtttttgtgtattaggaactgagtttctctttgtttttttttttttaattgtaattggtttgagttattgcgtgttacttgtttgtattcattatg

SEQ ID NO: 112532 - DNA, 1751 bp, Cannabis sativa
cacacacatcaagtgatactcaattatagtgtgtaaggctgtgaagaatccaaattgaagagaaggagattcgggctcagatcttggtgatactgtgctatagacaagatacaagagatagagatttgagtggaaggagtcattttaattttgctgcacccaatgtaaggtttctcaaaccttatatgtgtttaaataatattgttttataaattcatattttggatgttaaacaacatacatggtagtaaatttagatcctggtaaaacataatcaaacacattggaggcttaattcaatgtttttctagggaagggtctgagatctaagaaatcaacataattgtttattttattgattagtttctggtcagtatgtattctttttagatttattgtatctaaatatatatcttgttgttttcaggaacacaacaaatttttatctaaaaggcaggataagttttctcctcccttttgtttggtgttgagaaagtggtcaacaagatgttgtttgacaagcatagttatcgtggtaactttttgacttcttcagtaagtgtgatttttatagcttttttgtggttgtttactttttaaatttacattttcttgtgttgttttttggtaattttttttaatattttctcactttttcttctcagcatattgatatcaatttctagtacccgtgtaagaaaatcaagtatgcaaaggagctaaaattaaagtttacgacaactgattgcctctttagtgctagcatcacaaatatctatgattggtttattgataatcaaaaaagatatttttgttttatctatagatcatattgtggtctaatatattatgggagaaaagatgttatgtgctactgcacgacatttagttgatcacgttgttttcctgattatatgaatgtccatgagaattggatacgtggtctcttaaagttatctaagtgtcacatctctctgtacaactcccttaagaacagtaggtttgataaagctgcgaatgaggcttgtaatcctttttctattatgttctcatattatttggctatgttagattttatactcttaagaaaaaattcaggttttttataatggagccattaaaaatcattcatgtttctagattccctgagcagaatgcagcgtaagtttttcagattttgttttgttttggtttttctatttttctaaagtgcatttaatgtttgttaatttttatcattcttttgatttttatgtattttactggttgtttttgtagtgactagagtattgctcttgcaacttttgcaaagtattttattgatagtaagcctgtcgcatctgaggattttggttgttttattttatcactatgatcgaaagaagcaagtggaagatattgatagcgagtctaattttccatgaaatttttaatggaatcatttgatattattttttataatatgttgttttttcttgtgactgaaaataatgtttacatatagtaatttttatattttctaatgtttgcagaatgtttaagttgtttatatgttgttttagggttgtattattaaatgttctcttaatttttctttattatcaaaaaaatactaatataataacttgttataaaggttgctagaatgtttatcatttttttctattttgacattctttgatagatttaggttcaagatcctcgttttcattcataatttctagcgctacattataagcaaaaatattatc

SEQ ID NO: 112533 - DNA, 1485 bp, Cannabis sativa
agattttattttatttgatttcttaaaaaagaagcttattaccttcaatctgataatatactcttcctccttctcaacgaagaaggtattgaatttctcgagctcatcttccaacaacaaaatgaaatcgatctcctccctagacatgtgctccttatctccggcttccaccgcatcgccgccgaaagcctccactttcgggcgcttgctcggccgctctccgacgacgccgttagttttaggctcaatagacttcaatttcttcttcaaatccttataggacaaaaacttgtctcgccattccggcaaggtttcttcaatttggttactcaggcttttcccaaacttcatcctagctataataattaggattatatgtttgggtttgtatttagaaatgtgaaaatggtaaagaaaatgaagaaaagggttttacgtttttgaatataatttttctatttctgtgggaaagagaaggaaaatgagagaaactggaagaaaatgtttgaaggggaaaagtgagaggaggagaagaggagggggaagatcggaagggagatataactgtaaaggacagaatattcgagggttataataggaatatccttttgttttcgaagagtatatttggggttttattccttttgataaagattatttgatttctttatatatttatatttaatttttatagatttgaaaacaacacgtggatagacttcaggactgtggctccaggctccgtttttaagcttaggaagccaatcagctgactcaaaataaaaatttctctaataaacaaacaaaatatatatcctcttagataaatgtaaaagttattagtgttttaatatttttctttaggaggagtcctgccgggaactctctttataattttttagtcaatttttacgcttaaaaatatatattcgtatattttttttttaatttttttttcacgggggtgttcgttatggttataacatcatccctataaatttttgaaaattttcgaatagtttacagtgccgaaaatacttttgagttttttacacgtgcgttataaattgaaatatcaagaactttgttttcagtagtgtaaactattcggaatttttcaaaaatttacaggatgatactgtaactataacgaatgccactatgaaaaaaaatttgaaaaaaaatatttcggcttgtgatttcggacatggagattgactaagaggttgtaattagcatttctctttcattacgtgttaatattactatagtttaattaagtatcgtaataatttttattctttaaagagtacggttaatcaattgtaataagacacatccaaaaagtgataaataccattagtgtttaatagcaatactgatactcttattaggtacatactaaggtgggcagcatccaattaaattgaattgaatcaatcaaatctaatttaatcacaaaaaattataattagattgaatatt

SEQ ID NO: 112534 - DNA, 5178 bp, Cannabis sativa
aaaaaatataataatgttattttatggtatataaacaattaatctcatacaaaattttcaggtggttcgcgtctgtgccttcatcaactcagccgaaccgtctatatgtacactcgggaacttccgccggagcaacgagcaacatcccagcgatgctggccaagggctatcctcagcgaactatcttcgagaatctggacgacgcaggaatatcctttggaatttactaccaaaacatcccagccactctgttttaccgtaacttgaggaaacttaagtattggggcaagttccactcgtacggcagttcctttaaaagtgacgccagcaaagggaagctcccgggctacgttgtggtggagcagcggtacacggatacaaaatcttccccagccaatgatgaccacccttcccatgatgtctaccaaggtcagatgttcgtgaaggaggtgtacgagactctcagggccagtccacagtggaaccaaaccctattgattatcacttacgacgagcatggtgggttctttgatcacgtgcccacacccgttatcgaggtccctagccctgacgacattgtggggcccgaaccattttcgtttcggtttaatcggttgggtgttagagttcctactattatggtctccccgtggattgagaagggaaccggtaagtactactatactatttatttaaattgtttaccaattcagtccatgaattgttttcaagcaactaaattgatgagttctataaacaatatcaaagtatgtttagaggtctataatattaataataggctaattaggattttagtgatgtagctaattatgtcccctcaactttaaaaatagtacatgactatgatttagtagatgtcaaagttccagtgacatgatttggaagatattaaatttggaaagcataatttagtatataaataatcattaaaatagtaaaattgaatgaaattaaacaaaagtcttaaattcaacaattaaggacatattataatactttcaattttttaagtatcattcactttttatttttttttaaaaaataataatagcaaaatgttttttttttcaataactgtaatatataacaatgtgtcacaatgattttttaagatatacaaacactttttctatcatattattttttaaaaaataataatataaatatattttttagatattagttaattatttaaatattagttgctattacttaattattaatttaaacaataataataaattacatctaatataatttaattatatttttttaaatatattaaattttaatttaattttaaatttatttataaatatgtctaataaattttattaaataataaaataaataaataaatttaaatatttttaaataatataacttgttaatattaattgaataatataactgtaagtttgttataaagtatgactaattaatgaaattgacttttaatttaaattttaattaaaatttacataaaaaaataattatttaatttgttgatactttttaattaaatttaaatatttaaatgtttttttcaataaaaaaataattaattgatttatttaaggtgttaattttaaccgttagctttaacgaaaaaaaactattaaactaacaatttttgtaaaatagctacattttataagaaaaatgtgaattgggtaaaaaaataataatagaacgatatttttttatatgttaatttgaattagaatattcttttaaaaaaaatcaatattttttatattttaaataacatcttgtattatatagatacatttaatataacatatatctataatatatattaaaaaaaattgttgatgaaaaactttaaaataactgttaaaacattctaaatttcaattgtttctacagttttatcatttataaaatgaagtgtatatatttactatagaaaagttttatagaggggtctattgatacaatttttatttgtttcaacattttggagaatattttagttcaattatttttatagttgtctatgttttagttatttaggatattttttttttgaaatttagaaaaattatttaactcgttgaagatgaggtttaaacagtctatttcaggcgcgtataaaataaaataaaaaaatcttgcttgtaatactgtttgaatcctattttcatgtaaacatagaaaaattctacaatatttctccttaggtttatggatgtaccctttattattttttagtctaatttttttttatggttgtttatgttgttatttagaacattctgtaaaattttaaaaaattcaaaaaaacttagtacgcttgaaataagattcaaattgtctattttacacacgtataaaataaaaaaatagtgtgtaacagactatttgaaccctatttttgttttcgatgtgttaaaatttttgaatctctctaaaatttacagtatgttttcaataactacaacgtagacgataatgaaaaaaataaactaaaaaattttctcctatcgagaaacagatacggaatgtattggtggacctcttttaaaggtaaaaaagaaaatcccttttatggtgacttttttttctcctttcttctttttcattacaccgacacgtattagatttagatgttgatggtgtagtagatattttggttaatgcaatgctccatttactcaaatattttattaccaataatcacttttcatgttatagagcaataattgcatttcacactgatctcctaaccttaattatcttcaaaattatattttttgttatttgttatcatacctttggttacccttacaaaaattaaaaaaaaaaataaaacaacataaaattaccttagatatgatcacagtatgaacatcatatagtgatgtactcctagatacaaaggacaaacgacatgaacttcatttctaattacttaaaagacatctatatttgttttcaagtcttctttctttctcccagcgaaaaaaaaaaaacgaaaaaaagtgttatttctttcatgcatttccaaaataatgggttgggtacatgtcaaattatacaaattataattaaaaagcggttatttaaacgaaatactatatttgttcgtcaaagtaaatatatatatttatatatattacaggtttcttattctactttcttttgagtgtttgtcaactatctcgatttatttcacactgctttttaaccaagttgggcataacgatattgatggccatctgtattttgttggtttcctttatttggtgggtgaaatcatagttataaagtacttttattagtgcatgattgtcacgctatgccaataacatattaataaattgggagaaaatctcgctcatttttgtccaactatcttaaccaacactcaattgcggacttgttggatagtaaatgagatgatgttgattattaatgggcggttaggaaattattgttgattttgcattttctctttcaaagtactagagtttgaattgttacgacatcaaattaacatgccaattgtacatgaaaggcacacacccaccacaaaacaagagtaaaaaaagtacagacacgaatgtatatgttgggttaagcaattcctggtaaacacgaaaacatgtgattatgtcaaaaatatatatttgtctggcataatactatcacagaaaaatgattgatttgcattaatatattgctgcctatgcagttgttcatggaacaaacgggttgccatacccaacgtcagagtttgaacattcgtcaattccggctacggttaagaagattttcaatcttccctcaccttttttaacgaagagggatgaatgggcaggaacgtttgaaggcattgttgaaaagaggacagaaccaagaactgattgcccaggttagtcacatgacatatttgatagacaccattagtttgatccaactgtaagagaagataatttaatttatttatttatttatggacattggtttgagcaggtatactaccaactccggtgagaataaggaagacagaggctaatgaagaagcgaaactaagtgagtttcagcaggagctgctgcagcttgcctctgttttgaatggagataacatattgacaagcttcccagaaaaaattgggaagcaaatgagtgtgaaggaagggaaagagtacatggaagaagctgtcaaacgtttctttgaggccggacgttatgccaagagaatgggagttgatgaagaacagattgtgcagatgaggccttccctcaccactagatcatcatcatccaatatccctgatgagaaaccatgacaaaaaaaaaatatatgtagtattaagattatatttatatagaaattaagaattccgatcctagaggtgagcaaaagttgtaattaaagaagctttgcaaagttgtcgattcattatgtacgcacaataaaaagatgaatgtcaacaaatcatatggataatttttatgcttctttgctatctaatttgggatgaaagttgtgtggataaatctaaaaaataaggggtttttacgaaaatattagattttgggtactgtgtgccagaattttttacaaaaatactgtctttttataaaataacaaaacagagtaattaaaacaacagtggaacaactaaaaaacttaatacagtacacagtataaaacttacacaatatttttaaaaaaagaaaacaatatttcagaaaaaaaaaattcgtcccacaacaaaaaaaaagtaaaaaaaaattgaaaatttcaatatgtgatgtaaaaactcaaaaaaaaaaaaaatcgataatgaaaagagcatatattttatatgatactatttttccatattagccatgtaagactttctaatatttacaatattattagggccgaaatgtaaaatgtacttatttgaaaactaaattagtaaatattatttttttaaaaacaaattacaaaaattacagaatataataaattaactaataaaaattataaaaatatatttactacatattatttttttaaaattgatatataataataaaattaaaggggttttcttttcatttttacacttcaaaataattttcttttttcttttttgcatttttacgaattctatatagaaactcatattgcaacta

SEQ ID NO: 112535 - DNA, 1314 bp, Cannabis sativa
ttttttttttttcagaatgatgttgatgaaactggtactttttctgctgcttttaatgaaataattagtttttaacaagaagaaaagcatgtttaatttttgaaaaaaaaaaaccagcatctgcaattgagatcattttttatttattttggtgttttattttttgaaaaagaaaaaaaataataaaaagaaacacaaatttaaattttttttatggcattcttcgcgacttttttcaatatttttaagtttttttttaaaaaaatatcacatttagtataattaaatatttatgccatatatatatatatcaaaacttatctttattttttcatatttttgtaaatagccatataagtttcctattagggaaagaagcccacaaaagcccataatcaagacactaaatatggggcaagtatacaattggaaaggggctaatccttctcactacactattatattctttaatttctttaccttgcattacatataaataatctctaacgcactacttaagcatagagaggtatatgcagcttttatgtagaaaaactccaacaagaacaatggagatcaaagtggttcttgatgaagatctaagagtgaagatcatagattcaaaccattcaaccaaagatcttttctttagggtggaattgcaactgttgactattctactccgagcaaatcatatttgacctcaacatttccattgattatctcaatctttttccaacacatgattgtgacagcaagggaaattgttcgtacgagtctatcatatatatatatatattatatgtataataatcttaattttgtcgtgttttacctgatctatgataattaatgaagtttggtacgtactttgcaatattttttgttttcaattttctctgatgattcttttgttgactctagttatagtacttgatgttatatgttcatttatgtacatagaggatagaggatgagagagagttattatgcataattcataaaaaatctatatttaatacaaataattcaatttataattgaaaatatattcattatttataattgagtaaacagtagcataagtatttaaaattttaaatttgtaagtgttataaatttaagtgaaaattacatgatatatggaatttcatacaaaagttacaaaaatatgacatttataggtttgccactctcttatagtattttttcacatttaaaaatttttatggtatttgatatgccatatttttgtaaacttattatccaaactcatatttcatgtttttgtttctagcttaattagttttattt

SEQ ID NO: 112536 - DNA, 1728 bp, Cannabis sativa
ttttcacataaattgcaccacagtcaaataattcgactatccgactaagtcttcctttcctgaaaaatataatatggtttgttattatgacatcattacattagtcttcttctttgacattaacacgattgtcttttattaatttcttgcacttttttgacaaaaccacaaaaatcattatatcttgttcgccacttaaagacacacacacttaaaactagtgtgtatccactattcagtttgagaatttctacttttatcatctcaatttctttcgaaccctacttccttttacacacacacaccactcaccactactcaacactatccttaatcatatatcattatgactccgttgttattatattattatcttattccccatacgtatacacttattatatatgaaagacaaattaatgtgaacgataaagctgcacctttatctctccaccgccgctcatacaacaagccatttcatatacattatattatacgtatgcttttacacgaatgatgacattttctttccttaaaatatcattttagtagattgcaaaatcaaattgtcatcattttaaaatgcatatatgagtttctaggttactttaataagaacacgtgttcgtaagtatatgtgaattagaagataaatcatttagatgtgttatcagatggtttttaaaccttacagtctcgtataaaaaagacacatgaccttcaagcgtaaggatcaggagtaagaatcacttattgggggacaaatcccaatatgtagaaataagtagaaatatatcctcgccttaacatacaagaaggtaagcaaccgaaacacaatctagttattcaccatgaatcgtacaataatagcaaaatatataaaagcggaaaataaagagaaataaacacaatggcgacatatattataaagtatgcaaagacaaaatattatccccctgacctatataataattttaactattaacaaatgatatttttaatatggaattataagtatagtttattaaacactaaatagtaatgacgagtgatttttattcggatcacatatgtgttagatttatgtcctgaaaaatatgtaaaagatattttaattttaaatataaggtaggaaattcagtattccaataatgcccctacaccagcaccacaaagtgcaaaaaactaaggtcaaacttgacctttcccccttgtgcggatcacaaggtatttccctcaaaatcctatcccctttatggcagtataaagcttttcttttctctaaccctagtagccccttctctttacttctcctttgaaaaaacctaacaaccacttctttcttccctaagagaagcttcagccgaaccctagcagcagccctcctttcttcttctccttccttcttgctgcaatcgtgagcctcctacagtcgacccccacagcagctccttcaacctttcttcttcttcttcttcttcttcaagctcagtcacacctctccataaccgaacctgtacaaccaaaataaacacccaaaaatgacagcaaagatctaaaatgatctttgttggttattgaaaagagacccgaaaaactcaacagaaaaaataaagaagaacacaatagttgattttggagttcccctcaaaatcaagggtacatctccgcaaagatgcttgattattcactatccatgtcacactaaaagaaatgtcacttttacca

SEQ ID NO: 112537 - DNA, 3674 bp, Cannabis sativa
tttttttttttttttttaccgaaacctctatttacaaagaaggatatttatggcgtaagtactaaagtttttagtttgtaagcggcataaaattaatatttttttagcagcataagtatctaatagtagttaactataatttttcgtctagttttatcagtgcggactttgttactgtcttaaatttgtaagcagatttagtttttgaattgttgaaagtagatttggaagtaatcgatactacacatttatgtcaaaatctaatgatttgaaatctaggatatacacatatttaaagaaattcgacgaaaattatagattttctagtattgaatgcttaagcccctaaaaaaaaatcattgagtttatggtggttacaaatcaaaactctaggttgcactcccaacaacttttctataatatacaaagctcgaatatttaaagaaatgtgctaacaaagaaatccatcagatgatttatattgattctttaaaataaagaattagtagcactcccatcaacttctctactatatccttcagaatactataccgaaaccctactttttctattttacttgaaatttttacatcacaccatacataaatttctttatatttatattatatcatttaaatattatatatttagatattatttatttatttaaatgaaaaatatgagagagaaagaaagagaaaagaagaagaaaaagttaaaataataataaaataagtttgaattatgaatagtgtgtagctacatttgaagaatgaattgtgctagataaatttcttagagtactcacaccaactctcttctctattctttaaaatacttcactaaaatttcactttatttattttacctcacacttttacattacatctcgtaggggtgcacatcgggtggatttggctggcttggatttttcaagttcgggtgtaggaaattgcataccaaacccgcccattataacactgagtttagagggtttctagtccgagtttgaaacgggtttggtgtgttccactcgatacacctgaaaaaaaatttaaacctaaatctaatctcctcactcttcaatcctcacttactttcatcataaaaaaaagatacatctaatctctatcttctcctctctccttcacatatatatagcagtaattagcagtaattagccgataatgtacaaaaaattgagatgtaaattgatagtttgagcaatacaagtttccttattcatcaaaaaaaaaaaattataatatatattatccatgtttttaagcatgtgacacgtgatatttaaaggaagagattagcctcataatttcttaattaaagtcctccattacaatcctgtcacggggaagcctcgcgtatccaagagcaagtaaagactgagaagatacatggaagtataatttgctctatcctagcttcccaaacgcagaagacctattatctctctcagacacggagaggtccaaatatggaagccaacctagatgatacctggacaggtactcaaaagtgcggatgtcaacctcctaggagtgtcgtagatgtctacctttggtagaagccaggtcactaagtgacagttatactttttctgacacaggatcagattttgtctcctgtgtccagactggtagtgtgtacacttccaccaccttttttccagacaaatattatagaccccttctattaaaggtaaaagctttgggcgacacgtggactctacttttgaaggataaacctttgggcgacacgtatccacatagtacaaatggtccctaattgtccagctgtaacatgcataggcacaattgttttcaaaggacccaatagtcagctctcatattgcatgtaatttaccccattagtgggcttttagcagaaaccctaggcgggtcatgggcatgtccatactcgccacctagtctataaatacctttctattttcatacgaagggaggatcacgacctacatagctaaaattctgccaatattactttttgtcttcttcttcttcaagagaaactaagagtacaaagttaggatttcctgcaaaaatattataaacacatcaaatacgccatttgagactaatagactgactcatggactaaggttaacagccaaaccacgtaaataatctccatctcttcattttcgcattttgttatttctttagttctcaaatatttagtttccaaaaatctcggtaagtattttggtgctttcattgagaggtgaaaaaagataaaaaaaacctgtagtgttattgctaccatagttttcacacgaaagacggttccttagaagactcttctaggcatcctcgagactgttatggaggaagtaaaccccttctcgccagagcatgtccagtcgagcgatgcgataaggggggatacatctaacattaaaaatcaagaggatgatctacacaactagcatgaccacatcgataatgaaggagatgttgagaatgatgaggaagaggaggacaatggagagtatgtcaaagatgggtactacaaagatggctatcattatgagcaagaccctgaaatagttcgagtgtctaacgagttgctagaaaccaagtaaaagctagtccatcaagaaaagttttctcaaagaatggagagaatgagggcttccatttaagccaagtttggagatctagatgaggaagatcttgacgataaaccccttgggggaatgtgttagaagaaacaccaggaaaaacccttacaatgctagaacctctgctcctgtacaagacatggggaaggcaaaggtaggtgaccctaagaactctaatgctcctatacctccttagaaaaacacaaatccgaccaataggccttcttaggtgcagaaggcaactgatgcctttgggctcggacgtccttctgcccagaaaggtcctgtagcgccaaagggactggtacgaaagtaccaaagcccaagggaaggaaaaactgcccaaatgattcagtaaaccaggatggtgggacaaggggacattactgcgacgacagttggtccacggtggatcttagaaggcatctagatgccaagtacgaaaaggaaaaaggcgagaaggtaaggccatgtggtaatgaccttaggaaccacttaaacgataaattctgtggacgagatctactggacagtgataccaaaatgttggaagaacaaattactgtgctgatgaaactggtctggaaatatagtggggccctcacggactcaaaggatgaggacccggagccatgcgtcagaaggatcacggaagctccactcccagagaactttaagatgccccaaattgagctatatgatgggtgcactaatcctaagactcatctagccaaatacaacaagatgatggcaagagttagcgaggatgctgaatgtctgtacttctcactgactcttaccgaatatgctaaagattaatggaagagattggctcctcgatcaatcctttcctggaaggagttgcagtccaccttaaggaaataatttattactgcccgtgatcatgacatgaaaatgggctccatcactaatgtcaagcaacaggcgggagagagcttgaagaactttatccagcacatgatgaaggctgtaacgtccccgcttcaagcctcca

SEQ ID NO: 112538 - DNA, 4386 bp, Cannabis sativa
aagtctaaatggttacaaggtctacagatttgagctcatttgtcaactatatattgtgattttttcttttctttttctgaaatactattttctttacttaaatccaggttttcatctccatagctttgatacttggagatgggctctataactttctcaagatactgtttttcactgccacaaacatccataccaaaatgaagaacaaggcctacaaaacatgtaaataatgtatcttaactcagttgtgcctataaatagctagcattagtctttctgttaatgaaaagagaaagacttcaaccatcctctaatggggataatatagtaaaacaaaatcaataaattttcttattatgattgtatgaagtaattgattgagtacatgacagtagatgtagaaaaaatttaaaagggttttgttattctttattttccataagaattataatagttttttcactgtttgtagtctttttacttcttaaaataggaacatagtaataatggcaatatttgtttgattgaaaaagtttctcttttattgaaagtgttctagatattttataactagtagtaactttactgatatgactatcttccattgcagctctaaataatcaaactgagacccttgatgatcttaaaagaaatgagttgtttgtaagagatagcattcctctttggatagcatgcgtcggttatggtttctttgctctcatttccatcattactatcccaataatgttcccggagctcaaatggtactatgtggttgttgcctatattcttgcaccttctctgagcttctgcaatgcttatggtgctggtttaacagacatgaacatggcttataattatggtaaagtggctctttttattcttgcaaatcttgttggaaaagataatggtgtggttgctgggcttgttggttgcggtttgatcaagtccattgtgtccatatcttctgatttgatgcatgatttcaagaccggccatctcactctgacatctcctcgatccatgcttgtaagccaggctatcgggactgcaataggctgtgtggtggcgcctgtcacattctttcttttctacaaggcctttaatgtaggggacccgaatggtgaatacaaagctccatacgcaataatctacagaaacatggcaattctaggtgttcaaggcttttctgccttgcctcagcattgcttgcagctctgttatggcttcttcacattcgccattggagccaaccttcttagagacctttcaccaaagcatatcggtaaatgggttcccctcccaatggccatggccgttcctttcttggttggtgcttactttgccatcgacatgtgtgtgggaagtttggttgtttttgtgtggcacaaactgaatgatcagactgctgccctgatgattcccgctgttgcttcgggtttgatctgtggagatggtttgtggattcttccctcatcaatactttcattggccaaggttcgtcctccaaattgcatgcgcttctagacagcaaactaagaagaagaaaataactcgaattgtgcttccttagatagagttatgctctttccgactctcgagagcaattcaaatggtctggcatgtggtttgttagtataaggtttgagattcgagtctctcctggatatccacacaatttcgatgtatattagagctcgagcaaggtaagagaaagggaggagagtcagctggctcacacaaaagagagcacaagtactctaccaaggtaagagcgagaatttattcaattataacatctatgattaagttctgaatacaagtaagattctctgatcaccaaattacacttttttttttgctgtcaaaggaaatttggctagaaaattagtttgttatatattgctatacaaggaaataaaaatgtaatgacacattttcatatattttgaaattgattcttgacagagtttctcccacatgagagtttttccattgtttgcttgagctttgcccatccaatctaaaatctataacatggtgacaaatcaagtagatgatgtgatcttatttataaatatatagatttgtgtaaagtccatgaattttattgaatttcaggtgtggtcattgaaaataagtgagtggcatggttgaacatacttacatatttattgaaactcacacaccaagacaaaaacattaaagtccatatccatatttgaatatttcttatcatgatgttttcagtatcttttctctttaaaaatattattacagaacagattgattgagccacacaacacaagtttacttaacaatatggttctttttctcttaatgattttgattttgtgtattataaaagtgtgtatgacattatttcttggaaaaattgaacaataagtgatttgaaattcataaataactgtatgaaactcttgtaaatatattttctgagtcaatacactaatctattaggcaaaaatataaatcaatgtgatgttcttgtggagtttatgtctcttttttgtagttgattgttctacattctgggatgtttttgcagagtttaagtctctttttgtagatgattattcttcttcaatgaagtttatttacactaaaaaaaagaaaatgtagaaaacaacaaaatggtgtttttttgtttcaataaccaattttttgtcactattttttcataattttagctctcttttcttaattttatttacaatttttctttagtaatttaatctcgttacttattactttaacaatatctatattttgtaaatatatcaaataattgttctaatcatacaatttttttttttggctaatgaaataaaaacaaaatatttttattagaatattaaccaaacacttcatatttattttttttaaaaaaattgcacttatttatgataacacatcttaacaaaactaaaaccatagtcaaacatgctttagtcatttttcaatgagtgaaagtctccgatcatgaatagaatactagagaaattttgtgaaggttcacttcatgctttttctttaatagtttttcttagaaaaaaaaaaatcaatattgggtggtagaaaattttgagagaagagttgaaaaatgaaaacacatatgaaaatctctattacgaaaaataaaaattaatttcataccaaaattctcatttaaagcaaaattataatttatttgttaaaaaaataataaatttattgtcgtccttgccctttttcttcattccaactagggctcgtcgcctgtccatggctttgggtgtggccttggtcagggtctaattgcttttcccaccatattcggcttttgtgccttgtttctcccctctcaatcaagttttctttttcttttcactaatggtttccttcttgggtgtgaggtgtcggttttgccaccgttggtgtatcgtatgcatctcttttattagttggattcgatcattaaaaataggccttggtagtggttggttgaggtttcgggtttagtgttaggtcttttcgttcgatacgaaggttgtggttggtttgtgttggcttggctgtgctgggttgtggctttgggagtccgattgatgaaagggtcgtgtggtcaagggtgtctaccattacttaattctcactaggtttattggtggtgtttggtcactgaaccttttatttgtgggttgtttttatttgtgatgttttgttttttagatttatttttatttttaataatggtgttttatcaccactctactgttattgtagtagggattgttatgattatggagggggtaatcgccttgcccccgtttgggtcattcgtctgttatgtaatggctcaaaatactattgtggcatgccaatcatccctcttcgtattagaatctggaggatctccagatattttttgccctatattttatgagtcgtgctttcatcagcgtgatccctaagatgtattattacctaatagcatgattcatttataggtgtgttttgtcatatgttcattcggattaaaaatctattatttttgtaatattttgaagctttaccactggcaatttattagtcttttagttgaaggtgttattagaattttcttatttttattgtaaacgacatgttttgtctacttttaataaatctgctccatgagttgaactttgcctaatttatctattaatgattttttttctttcaacttatttttttgcagaaacaaaattaatattttgtttaaaactcaggttttacgaagaatatatatacagtaaaacttctatttaagaatactctattcaagaataacctctagtttgttataaaataatcaagtcccgatttgggccagttataaataag

SEQ ID NO: 112539 - DNA, 5680 bp, Cannabis sativa
aaattaattaatgtgtcacaattatattagtttaatacattatagaataccatcttttattagaaaatcttaattcatggtttagtctagtttttcatgatcattttggtttgtaagattacatgatcagtttgtgtcatcgtgttcctcattaatttcgactactcttatgtctatactcaacaaatggcaacacatttctttgatctttaacaagttcattttactacattacttttatcacaaaaaaattattctctaatgaacctttacatatcatgaattagtaaatatttattttaacaaattttcttaataagaaactactaaagtatcctactatacatgtatcttattgtgtttataatacatatatgtattttattgggctatgaaaaaaattggatatataatggtgacatttttttgaccatgatcaggattttaccgttgagttttattacctcataaaattatcttacaaaatatatttctaatatataattttctaataaatttattaagtatatattttgatattaatatgttgtaggtgttctcttatatggacaaaaaaagaacctcaagtcatcttttatgaattatgatattatagtttttattatctaatattttttcatgagatatctctttctcatattgaatcacatagattaattggatgaacacctgaattatatgttaggatatattttttaaaattcttttttaatggtattcattataattataatatcatctctatatatttttaaaaaaatttaagtaattcaccgaatacagagttcttaattaatattctaacttaccttaaaaaaaaaactttataatttcaacattgtaagttattcgaaactataaaataaaaaaaaaaaaactaaaaaaaaattatggtatgtattttcgagtacaaaaattaactaagaggttataataaaaggtgtaccactctatatcttttccaaccaatatctgtactttggtcccagggttttgtcatatagttagagattagataataacagattcatattatgacattattatataaatatatttatatatataaaaattaaaaaaaggtaacgtacttttgcctttgtcattggtggtgctggaggaagcctttgccgagcgcagcttccttttcttcttcacttccaagccaccagtagcattggaatccggcatcaatatcctttcagtaaaaggattttctacttttgtcccgaatgaggtattcgatccatgatgaaaagcaaaggtatcatcaaacttgggttgagtgattgtcgaatcagtaataccattattgatattattattattagtatcaaaggagggaagattacagaactccatttcggataagggggccagatcattaaaaatggatgagggttccgatgagaattgggaacgagtactatgattgaaagtagtgtattcgggattggttggctgctgaagctgctggtgataatcagtagtaaaggattggttttgggacgcaaaggtaggtgaagaattgttattactattattgttattattttcagttcttttaaaccgggcaccggactcagctacgatcatatccaggtcattttcaaacattgatgaattatcagacagagacggaaaagatgaaggaaatgaataacaagtgttgttattagcaaacaaatcttcatcatcatcattattattattattattattatgaatgaacctgttttccgctcgagctttggactcagcaactacggaatcaatgaggccactatattctgacgacggtgatgatgttggcagtactgtcggtcgaaagtactgggtcatcgtttgggtcgaagggagtcccagttgttgattatgcacagtacccatattgctgttgctcttataatgatcaaaagcctcatcattattgaccaacgtcgactgcggtgttgcaaatgagaaagcagctggtgaggaagtagtaccgaattgatctctattgcgatcatcagtactacatcttctaagttcgagatcagcctcagccagtaacctgtccaataatgacatctcctcagatgggtcggccgtttggggcggaggaggtggtattggtgcccgcatggaatgaaaaggtggtactttttgggtggaattattaggaagcatggattgatgaaatggtgtggtttgggtcgaagtgagaactgaaggaggcattgtttcactggaatattgatgaaacggtgtcttactgtaatattgataaaagggtgttgtttgggtggaagaaggtagcactggaggaggcatttgatgaaaaggtagagtagtagtggtttgggtgggcggatgagtatgcgaaagtagctgttgacgacgctgatcatctggaactggaatattattattattaccgaagacctgcatattcttgcgcctatcgaaaacttcattgttggccgtgaaccttgaagaaaatggcgaagctgatgacattgaagaattggtagtaggagtagtactaaactgatgatgacgattagtactactgctactgccattgatgatttgatcatttcttcgaaactttgattctgactcaactcttactgaatccaataagaagccagtacaagttgacggtgaggaaaagttcgattcaaacggcgccgtttggcttggaggaaaagggagcatcatttcattattacataacatcttcatcgccaccaccatattattattattgttattcatgttttgaaaattactcatcatcctcatccgatcatcatcgtatgtagaagtagtaccactactactgcttccaactcctaagatcccttttttataatttcctaccaaacaccaaaaatatttgtttattttcattatgtttaaaccagcaaaaacaaaaatgaaaccatcgaaattgtgtgtaattaatccttacttctttgtcgaggaggcttctccttaggcacgacaatcggttctttgcgtttcactactcttttgcccttactgttgttcgattgttgtagatcgagaagactgggacatgactgaaatataaaattggacaagatccaacaaaatgattagtctagctatctagtgggtatgaaatcgtttatatacgtaatatatgtatacataccttagtcctagtaagtttctcgttcatcatttcagcaaatgcaacaggaacgaaaacccaacacaccttgtaatacttccactagtaagatctgtcgggactatggaaaccctaaattcaccagggacgctatatattcactcaccaaaatcgttcgatgaccagtagtaggattcagtaccatcgcatatggttgtacaagctcttcagtccattgtgtttggtcctgactcaaactcaatgataaggagtagtaatgttttgtctcggtttcggcggaaccattattaggtttaagtaggaattaaaaaaggaaagaaaaaacgtgtttatcttcttcttcttattattatttttttattttaaaattaattaatttggattttttattttttttattacagctcatacttcaaatataatgtccgatttttaaaaatagattattaaaccaaatcccgaatttaaaaataaaaaagaaattatacaaaaaaatctaccagaataattacaaagaaatatgctgaatatttataatatagtaccggaatcccaaaacgacgaacaacgaaacgatcccaacgtcagtgtaattctttgttcggaagtgagttgactttttttttttttattattcttaatatttgtagttacattgtaatattcttattaaattataatgaaatgaatattatatatttttttgaattggattttttaataaatattaacacgaaaaagatttttttcttatctgaaaaaattacacgaaaatgttggtataggacaaaattatcttagttctaattatggcaattataaatcttaaaatttaaatattatgctacatgattatcatttatcaaatttgggaattttagttagtgatattgttgaaatcatgagttaaaacataaaacaaatttagtggaaactgcatatataaccacggtccacaatgacttgaatgaaaaataagggaagagtaaatttatgcaatgttgcagctgccacgtttttaaaaagtttttagatgtagaaaaggacaaaaagaaagcaaaaagtacttgatttcaaaggacaagctaggtgaggtacgtcatgattatatttcatcatgttattaatcaagccaggaacttccactagtttccgccctcatatttattgagtaatatatgactatatatatattaatatggtttaccaaatgatccaaattctacaaaaatatatttattaaagccatatttttgtgtgtgaatataagaattaaaaactaaagatatgggaatctagtggcaaatcctacaaacctgttcttaataagaaatatatgaccgtatgaaaaaaggtgatttagtaatgggagtatatacatttcccaaaacctttgctaaccattcattaattgaacctatcttggtctcaaccttggttattattatatcatctttattaataataatatatattattatatatgtgagaggtttaataaagaaaactagagtgaaaaaagagttaggacaacacatgtaaagaaacaacaaaaagagagtaccttggaagagacaggtaagtctcttagtctctaggctttagttaattgtgatgacagctagttagttgcatagtttcactattctgttattgatttgttgtacgtaatatataaattcttgctcctgttgtaatgaatcaattactgtttttttcagtttatatttttcatgtctttctttctctttctctttctctttcattatctgtttaatttcctctgttttacttcttgattggttatcatggtaaggaggttcaacatggtatcagagcattctctccttttatggcaaacatgacaacccttggaaacaacactgcagatccagttgtgcatggacttcaagctacaaacagaccacgagccaatcaaaccttccaagaccttgtcttcttcaatcacaacatttcaatccatttaaacgattataattttcatttgtggaagtcgtaggcgttggttgctatcaagggaaattgattgctcaaatatatcaaagagcctcctccagctgagttcttgaccaatgaagatcgaacagaaaacagagtcaacctagctcacattgaatgggaagtccaagatcagttacttttgtcgtggttactatcttccatgatagagagcttgctcacaagaatagtaagttgcaacactgctcaaaaattttcgcacgaagttacagaacttaaagaaaggttctctaatgctcaataattatctcttgaaagtgaaacaaatagttgatctatttgctttagttggagaagttcacagtgatcgagatcatgtagcaaccatctttaagggtcttccaagtgaatacaacaccttttgttgagttttgtgccttaaataaaactatatttcaatgtaatcttttctattcagttatcaataaagaaacagatttattttcattactt

SEQ ID NO: 112540 - DNA, 6131 bp, Cannabis sativa
tggaagttaaacttaagtatttatttgcaattaagagttaaacttatatatttatttgtaactgaaagttaaacttaagtatttatactacaaattatttaaattaaaatatatggagatttcgccaccaaatactctttattttattcttaattttaacccttcattctccattggttctttccttctttttttctcaacctcacccatccatttagtatattacatgtattttatatataaatataataaagaaaaaaacaaataaattccactcaatcaaagttgaagtacaacaaaggaaaaggaagccaaaaagatgatatttttattaatcactaataaatgaattgaattaaaaatatcaaagtggatttgcataggaaaagaagaaaagaatccaattggtctagatttttatatactccaattacatctaaatcaaattggaatttaataaaagggttttgttcaatggaaatggaatgtttgtgatgcataccattttggagaacaagatatgtaaaaatgtcacctttcatttttttgatagattataccaatttggtggtttatcatgaataaatagagaagcattatcatgtattagtaagaacaaaataatttgatagtggtggtcccctattaaagttttaatctttataatggtaatctcaacttagaggacatacaatcaacaacaacacatgctaaagcactgtgatttgataagtagacaaaattctgcttcatcttttgctttctttaaatcattattattattattattattattattcgatttaataattgaacagttcaaaagtactcaaaggaaaaaggagaggaaatgatcagatcagagattattaatattaatattattattaatcatatcagacaacacagaaacacacaaagatattatatctatggaatatgattattgatgagttcttttttatattttatcatgagattgctgcaaaatatttgaagaaagagaatatgggaggaccactcacttgacaacaaaagatgaaattaaagagaataagatttaaatattaggtatgttttgggatatgagtccagttagtacctctttttgatacctccatatgaatctcatctgaatggagctaagctaggagactacaccattccaagagaatccaaggttgtggtcaataaccctgcatagtggaaaaagttagaagagtttcgattaggctccaatgaaacctgggcagaaggaaagtcgattttcgagtcttaccatttgaagtgggaattagaagctgccctgttattgcaaaattgaaacattgatttaaaaccaaaatttgaacaatagaaaaagagttcagctcttaattggtgttacatcaacaataagagatttcaaaccctttgaaccttcatagtctttcttgctcacctccaactgcaattttaccaacacttgttaacattaattctcaatatatataattgataattatgttcaaatcaaaatgaagatataaaaagttaagggattaacagggaaaaagttcaagaattttgaacctaagcatcaaagaacttcatttatgtttcattgttttgtatgctaaagcacaaaaattccatcctaaactcgaagcattagactaacatatattagtgtcattgaagagatctacaaagttacactcaggttatgagaagcttatttatttagtttgctcttcacaaaaatgacaaaaaagaaaactagaattagtattcccttttacaataagattgataagtcagaccaatgttctgtttgagaattaccatacccgtgtggtttcggtgcagaactgttcttcaatatcaatttatgaggatgatttatgacctgaataagtagacttttctacagctgaagctgattgttttgcagggatgttttacttgtttggccaagattcgaaattgcagaatcagtgtctggacttgacttgatgttagaatttaattagccatattttgtcttgattgctgagtatcaccactcatctattgttggctgcataatggtacgtttaggggttctgtggaagccagttttgggagttgaccatgctattgtacatttgtacttgctgaggtaatcttcatgaactgaactttaagttgttcacctgagatattcaaggtgttgacaagcccaactaccgagaaatatcatcccaaggaagatttttgcagatccactggactaagcttaagccaagaaaacacctggttgacccttcatgccctatatcatcaccaagctaaggcgttggtatcttaaaaagattatctaagtcagagagaggattcatcatctgcataatagaaaccaaggttagtcacttatcctatctccacaagtccatgttcaaaatcagtaaagtcagatgttaaaacaaaagtgaaaaaaaatggtgatattgtgaatctattgactattacctggcctttctggttgctctggatgctttgatctgtacaatggagtgaaacagataaaatatggagctgtagcatgttcaatctctcagttagcaagcctattattttggttttagaaaatctaacacgacggtattagtctaaatcaacccatggtgtattttgccaacaattcacaattggtcaaatagaggctttagtacaggaacagcaggaggccacaaattagtagttccaaaagatttggttcttccggtattgttttttcttataaattgtaattagcttcctgtaagtccagttgttatgctttgtgaactctaaaaaggcctctgaattcaagtggaaatcccctttacccaaaacttcaaacaccaggggatcggttagtactttcggagagctgttcatgttcatcaagctaagaacaaagtctaaattccttcctagtcttctctccaagtaagcatccacaacacatccataagttactatgtctggaacaaccatctcatgcttcatatgttggatgctaagatgaagatcccacagcatagtcattcttgaaaatgctagggcccgaatattgaaggtagtgatgtctggtctaaacccggattctatcatcctcaggaattctctttggagggttttcatcttgaagttggcagcataggacaataaaagaagattccacaagagatttccaacgtcctttctgccaagacccacctccctcaaaaactcactgagcctgtaaagctttttctgcttcaaataggcaagcgctaccgctctgattccatccttgtcaatcgaatatctagacctctttaaacggctataggcagcctccatttctgtcagagagccataaatgctatagtatttaacataggcattaccagtggcagcatcaacccgcatacccttagacaccatctcctcgattgcattctccatcaactcgagctggcctccattcccaaagcaagagatagccaagcagtatacttggggtaacatatccaagtttctggagctaagctgagcaagaattcgggcaatttgatcaaaatgtcctctgttggacaaagcatcaaagagtttggagacagtttgaatttccggcagaaaagagctattaagcaattgatcccaaatggcttccgcttgcggaaacagcccattttgagcaaaacaaatcatgagtgaatacaaagtcgaatagtcatcatcatcgtgggtaagtagaaagtcttgagatttagaggaagaggaggacttgagctccaacaaaagctcatcagccacaccaactagttttacatatctatcatcttcctccccattagtaaacacacctctctgtttcaatcaaaagttatgaaattatgaccactaactcaaaatctctaaaatttagggaaatttaccaaactaacaaataaccacattcaatttacattgtgcgaccattataatcgcagtataaatttgtggtcgcatagcgtaatgtttcatggttattttgctaataaaatttttcacaatgactactttcacaaaacactctgaaattcattgtacacaaactaaacatgattgatttcattcatgaatactgacacactaaccaggcttagggaagttcgatactgaaggcggtttctccaggtgagcttaggtgttgagagagaccatccaagcttgggaagcaaaagaatctgagaggaattcatcttatcttggtaactgaatcttcttctctcctctatagaacttatccttaatcataatagctttgatacacagatttatttcaagtttcaaccctaaccaatttgaagtcttgacagtctttgcaaattattgattcatttcatatccctagctaaaaaaaaacttcatcatcactacaaaaataacataactattcaatcaaacaactaattaaacaaaatttgaacattaaattcagatattgattacagaacagcttcaaaaacaagttaataatggttaaaatttcaaatgtatatatacgattgctctatgcttgcactatatagtatagatatagaaattgtatgaaattaaggtttgagaatttaccagagagagagagagagagatatggagtggttggtggtcgtgagcgtcggaagcgaaggagcagcgatcggcgcggcggaagagctgactgaggctgagaactaagataacgaattgaatttttttttttttttggttgcatgttttagttattttttcaattattttttggtattcgagtgaatattttagtttaatttttttttatggtcgtctacacaatagttatttaagatattttataaaattttaagagattaaaaaattaatacgctgaaaatagagttctttattttataggcttgtaaaataagctatttaaatatttttaatgtgttaaatttttaaaattttttaaaattttatataatatcttaatatcttaaataattataaaaattaaactattttttttttcaaagttataaaataaatagcaatacatgtgaaccccatttagagtgcattataaatttttttaaaactatatatattggaataagtttaaaaaaaactattataaatagttggataaaaaatttatagtacacttctacttgtcctattagtttattttatttttttttcaatcttatacataagaccatccatttttaaatagtttataatacaaaaaataaaatttaaatattttgttatatacataatatttaggtattgataagtagttatttgaactttacttttattattataaattacttaattttttaaaaaaatttataagtgatgattaatgttcgaatttgtatattttaatgctttaattttatatatataaaattaatttaaattaaatatttttgtaatttaaattgtaaaactattttagttaaatttctttttaatttactttgatttgttgtgatttatgcaaagtagtataaataaagagcattgttatggggtaccaataatgcttagtgtcacatgctcatcttttcagacattaaaaaacacccgtgcaataccttgacttctcaaggctaagatcaaccttctaaccatccatgtaataatagtctcatttttttttcgcgcgaacgtgtgcctcttgtacactcccgtcccttgaacaacttttgcccagtcatgctcgcaagcatctatgcatctatgcatcgaaactttttagctaatatactcgcattatccatatgttctcactatggcaaggtaaattctaataccatcgctcacctagtcctccgtgaccaaggtagcatgtgtgaccaaatgccaacaccaaactaacgtggtgtctcattcgatattatctgaatagtctccgtcatggcctaatgactcctatacatccatagtccattcctcaaggcaccatgcctacacacatgttgagaggccctcaagacaagccaccagactactagcatatattagacaatctctttctagcacgattcatttgtctcatgcgtatatgcaaactagctccatgaatgactaccattgtcagctcgtgttgagacttgtggccaagacgc

SEQ ID NO: 112541 - DNA, 4435 bp, Cannabis sativa
  modified_base (4372)..(4372): a, c, t, g, unknown or other
gagtactacaagagatagcttgacggcgtagtaatatattatcaattaggtagtgcttagttgtatgtatatgtgtgtgtgtatacacacatatttaggatttttgttaccattttggagttgtggtggagttcttttaaaatgcttgatcagcacaaagaaatttgttgcaagtttctattatttgatacaaaccattttattctgtttctttttaatgatttcatctcttactagttttcttttatttctattaaatattgcagtgcaacgcaattcaatagtcaaaacattcaactcatcttcctcttggcaaagctgccatagatatgaatcttcttctaacaactttcatgttactctttttctccaactcatcgctttccgtcgatccatgtgatccaatggtccaaaaaggcccgcgaactcttcgatcagacaaaatcacagtcctcatcaatggctactccgaatctcggatccctctcctccaatcaatcgccactaagtactcgtctaccccgtttgtctctgcggttctcgtcctctggggaaacccatcaaccccaacccaaaccctagcccaattctcccagaatctcacacactcctcttcattcggcagtgccaccatttccctcatccgacagaaatcgagcagcctcaacaaccgattcctcccacgaaccgcaattcagaccgttgctgtcttgatttgcgacgacgacgtagagattgacgaaaactcattctcattcgccttcagagtgtgggaatcgaaccctagccgtttgattgggttcttcgcccgatcgcacagcttggatttgtcgaggaaggcgtggatctacactgttcatccagacaggtactcgattgttctaactaaattcatgatcatgagaaaagattacttgttttcgtacagttgcggtggtgggctgttaatggaccaactgagaagtgtagtggaccgggcccagaattgtgaggacatattgatgaactttgtggtggctgatgcgtctagggccgggcccattttggtgggggcaaaatgggctcgagattggggtgacaaaagaaatgaggtggacgaaggtggtgataggcaaaggagattgaagggtgtggtggcggaggttgggttgagtagtcggagaagagagcataggaagaggagaggggagtgtataaatgagtttcatagagtgctcgggagaatgccattgagatatagctatggtaaagttgtgaattctgtgggtgaacaagggctgtgtcggaaaggagggaaactagtgttttgcgatcactaacattatttttcaaggagcattgctgctctccctccatgtgtttgttcttgattgtatattgctgttgcggattaattgctagagcaatatgcaaaagcctcagctcaggatggaaattctacttagttgaggagcattacataaaaagaagatgagtctttgtagaccttacccattaaagctttaggtagctcaaaactcttatgtttgctataaacatgttacattttggattagatttgtatttactttgtcttatttataatgtaggaaaacagttagttttttgatgtttagagactctttgtttattttcagattttgaactaaatttgcacttgaactgttgtcgtattaatatatgaatccgtgcaagggtgaagctatgtcctgcatcaatttgatttaattaacataagaaaatatatatatatatataaatatatacggacaagaagagtactacaagagatagcttgacaattatttaacagacttttttttcagttaggtagtgcttattaacatacatggaaaattgttgcaagttgatctattatttgatgcagaattattattatttttaatgattttatctcttacaagtatttctatttaatattgcagcgctaggtaattcagtaagtcttctactgagtttaagatcatcttcccatctcagagctgacaaaatctccccatctcaggttttaaccaatttctgtttgagatttgcatattgtttaccaattaatggtgcttttttcgatctctcggtccctctcatcatcagttcgcttccaaaaccccaaagtctcgatagtacagtttagtgtagtctcgggagatatactcaatcacttgcaagaaaatagtggcaatgtggagaaaaccctatctacgtttaagggaccactggattccaaatttgtgagcggggtcctacacagatgctatcctagccagtctcatacgggtctccggttttttatatgggctggtcttcaatcagattataggcatactccttacatgtataacaaagcttgtaaattgtttagcattagtcagaatccgaaacttctttttgatgttattgaggcttacagggccgagagatgttctgttactgttaagacttttaaggttgtcttgaatttgtacaaacaagcgaaacttgcagatgaggcattgttggtattgaggaaaatgccggaatttggtttgagagcagatactactatgtataatttggttataaggttgttttgcgtaaagggtgatatgaatacagctgaaactttgatgaaagaaatgggtttgattgatctttatccagatatgatcacttatgttgaaatggctaaagggttttgcagtgtaggtcgattggatgatgcatttcgattgtttgaggttatgaaggaacatggttgtttgcccgataaggttttgtactctgttcttcttcatgggatctgtaaattcgggaatatggagaaagcccttgagttgctagatgaaatggagaaagaaggcgggagttgcagtcctaatgtagtaacgtatacgtctgttattcaaaggttttgtgagaaaggtcagacattggaagcactggaggttcttaatcgaatggaagctcgtaactgctctccaaatcgtgtaacagctagttgtttgattgagcgcttttgtttggagggtcgacttaatgaggcctataaattgatcgataaggttgttaagggaggcggtgtttcttatgaagaatgctatagttctctcgtggtgtctttgaaacgaaatgaacggacagaggaggccgagaagctgtttaggaaaatgctcgatggtgggttgaaaccagacggtttggcttgcagcattatgataaaggagcttgcttcgggtggtcgagttgtagatggatatgagttgtgtgatgaaattgagaagatgggatacttgacttccattgattctgatttatattctctccttttggtgggactttgtgaaagaaatcactcagtggaggctgtgaaactggtaaaactaatgctcatgaaaaaaattaagcttaaatctccttacattgacagtatagttgaaatccttaagaagtctagagatgaggagctagttaaccatttaactgaaaatttgaaaagttttatacctaaagtaattattgattcttcaaattgaatcactagttaaaaagactatggtagttgagctgagtgtttagtatttgtttgtttattcaagcaaaatataaaaaggacaagttcttgtttcattgaatcagatctatttctcatcatcatatcattggaatttggaagctcttcttaagaaaaaataatgaaaataatgtattgtgagttttaattgagctttaataattaatacttgctaggtgatgatgatgtattttctattttattcatttgtttaacaataggttttatatcttatctttgtatcaaatacaatgaaattttttgtaattggaactattctctttaaatagaaaatcaaaataaattagaaaagtgaaaatattttataaaattatgttgtaaaatttatttactttttaattttttaattaagaatttaatttttttttaaaaaaaattacttttaaaatttttttaattaatattttagactttgacctcaaattagactttggaaactgaatctaaactcggctccagacttggacccgccctcgttcctaacctcggacctggcctcagacccgatttaagtaaaatcaactaataaaaatgaaatttacagaatacaattttatttttttgttcttaaaattaaataacaaaaatggttacattttttgtttttcaaaaacaaaattttatttttatttttgcgattaaaaaatttaaaaacataatttttgaaaatgactgaaaactaaccagttaagcataaaaaagactatgaaaactaatctcataaaaatataatatatattgatatttttatgtaaaatatattaggggtgttcgcggtgcggntggtgcggtttttaactattttttcaaactaacccgcacatgcggtttttccaattttctaaa

SEQ ID NO: 112542 - DNA, 8481 bp, Cannabis sativa
  modified_base (28)..(31): a, c, t, g, unknown or other
  modified_base (345)..(356): a, c, t, g, unknown or other
  modified_base (3865)..(3874): a, c, t, g, unknown or other
  modified_base (4077)..(4078): a, c, t, g, unknown or other
aataaaaataaaaagtcacccataaatnnnncataaaccaagaatttcagttatataagcacactttatatagaatagatacatgagtatacttcccttaactattttagtatttaactatttataagaatttttcagtttaaatttttttcataattgtgtaatttatagtcttttaagacattctgtaaatttttgaaaaatttgaaataatttacagtatagaaatcaatattttaaattatctatttcacacgtatataaaataaaaaaagtcacgcgtgcaacagattttttgaatactgtttttgacgtgttaaatttttctgaatttcttaaaatttnnnnnnnnnnnntaaataactataacgtatacgactgtaaaacaatttagactaaaaaattattatagatactgaaacagttagaggttgcatcagtatacttattttaacgggtttattgtagaatttcccctttctattttttccttaggtgatgtcatctttaaaattaaattaaacttttttttatgaaaagaaaattactaatatttttgccagaaattttttttagtagaagccacaaaaaaatatattaaattcacttattataattatttttgagtaaaaatataccttactgattgattaagttttttttttttttttttgagagaatagtgaaattcttattaaaaatggcaaataaccaaacaacagtctaagatttataaaaaattcagaagactcgaccaccaaatcataacatgattcaaagatggagcaaatttcgcaaaatcatgagctatagtattgtcaagtcaattacaatgcttaaaaccaacaacatcgacataattacaaatgaaaaaagtatccataaaaattatgtctattagacaatattatttcacatggattaaatataaaaatatttagccatatataagaatgttactccactcattactaattactttactaattgagtcagattccactaaagcattcaaaaattcaagctcaaagtagaacattaatctttgaagcatagctaaggcttctacaattggcggtgaaggagaactaacaaaatgagaggcagaagatacaatactcactgacaacacccataaatcctctcgaccccactcaaaccagtgtccacgttcaatttgtagctagtagttgcaggaagtcccttatctaccttcatcgtcgaaggaagagaccctgatcggaccttcaactttcccaccatgaaatcaacttccgtgtaccaaacatggaagtcacaagtccagccaatgactccctcatcatccaacaactcctggccatgaacccattaattctgacgatacctcaaaactccaaagaaaaatcaacaacaaacacaactcatccttatgcaaaatgtttcttgcaaatgaaaatataaaattcgtatcagatcgatacttcagtagatatataaaagaaacacaagatatgatagatttaatactaaaacagccttaaaggccatgaaaattgtttcttcacccaagccacatatcaaatacccttgacccgtaggaactttacgtgaggtcaaattaggcacaatatgaatccaattcaaatgcgctttccacataaatatattgattttagaaattattttaagagcctaaataatcttcacgaagacaaggatcattttgaggaagcaaatcgccccatttcttataagaaaatagtattttaatagccacttttaattatataagtactagaagcattgtaatgccaaatgaatttatcctcaaaatacatcgaacaaggaatacacaagatttggttcgctttttcaatagaaaacaccatatcaatcaaattacaattccaattatcacaatgattgatactatttattgtttacaaactaactggcttaagtttattttgtgactcattgtctaaattttaaatgaactttttatactctttaagtagataccatttgctaaatggtaggaaatagtttctctacttcttattccttatagtgaaaaaataaaattttgaaaagttattattgattgagccggaattaattattactattaagtacttaatatagagatactcacagctaaatttgaccaaatagaataaattatttaaaagaattccaagctagttaataaattaaaaaatatttgtaattggtagaaagtttttaaatatgtttttcttttttaaattttcaaattatttatttattgacttttgctgtaaaaaaaaaaaaaagaaaaagaaaagaaatattgctgagtgatctaaatgcaatcaaaactacttattagatttcccttcaaattatcttcaacaaaaaaaaatattaataaaaataaaaactttcgctgcaaattttattttatataaaaaaaaatatttttcagtttaaattttcaaaagttttaaaaataatattactatatttttttgtaagatattaatatgctatttatttttgaaaatacaattagcctcttaaaaaatcaagactctaacactacaatgagctacaaattaaattttagtttttgtgcagaaaaacttattcaaagtcaaataaaagacgagagcgctacatgtctagcaaaaaactcacacaatctcactagaaaataaataaactgtcggccaactacaccgataaagaaaagaacaataagctccaagctcattcaagagcatctagaggaacaacctccccaaaaaaagcataatgccaacgccactaaggacataaggtgcataatactaaatttttttaaaaaaactaactaaataaaaacataaaatagaacaacttcaaaggtcatcccctaacgcaaaggaggcaatacgtaagcccaaaacaagcagaccaaaagcagaaaagcgctaccatcttctgatgagaaaagttcacactcaacctctcattgtggttttgaacggtgaatgtgatgagacaagggaaacatgtttggttattaaaaaaaaaagggaaacatatttgggtaaaacccaagggcacacgccgaaaatggaagagcaaccactccacagtccaactcacgcctgaaaagggccttcgtaaaacaccatccccaaaaatgagagaaggagagccacaagaagcctaatgttgttgttgtctcgcgacccaagaggacaattccaaccgcaactactccacaacccaactcacgcctgaaaagggccttcgcaaacaccatcccaaaaatgaaagaagtagagccacaagaagcccagtgtcgtttttgtctcccagcctaaaaggacaactccaaccgcaacccccagcaaaaggtgtgagagatcccaccagagacgcttagccaccaagatccataaccactcgcttgaaaagctagttacgatggagctgaccccgaggaacgaggcccaacacttacgcaagccaatcatcaccaaaacccacctgcgagaacctttgcctttgctcggatagagccagagacaaggcttccaggtgccaacccatatctggtcaacggcgcccatgggagattcaaaaaccctagaagaaacaatgaggaggataggagaaaccctatcaaagagagcttggcctcctttttgttttaaaaaccaattaaaatcttaagtttaatccaaagaaaatgggaaaaaatatctatttatgatcgaaatacttgaaaagaaaaggctaattataatttttacctcccgaattttgacaagtaccaaatgatgccccttgaacttttctaatcgttaaaaattttccctaaactattgaaattattagatttaaagacttnnnnnnnnnntcattcaattttactattttagtggttatatgtactaaaccatactttaatatctaccaaatcatgcctactactgctccctgaactttcctccatattaggcttttttttactaaaattaaataaaaatccttaaattaaacaatcttaataattcagtaagcatttttaacaacctttaaaaattcaagagacatgatttnntacatgtcaaagtttaaggaataaaaattctaattagccaaaaaaaaaattacataataaaatgaaaagttacaatgaaatatttttatcaagaattattgtccttagaccttagtcattgctaattataacacaaagttaataattccgaacaaagaagttaagttgtactagatataagaattgtgttctaaataatttgaatgagttttttttttaaaaaaagaaaaaaatcgaagagctcttagattccaccttaaaattaattagtataagcggaatagttaaatattttaccatatatttcttagcattattaaaataaaaatagaatcatacaagaatttaatgagaaaaatatatggtagtattttcttaattaaaaaaaatgggagaactgcacgtgcagtggtagcgcgttgacgcctttccagcggacctagtcgccgcacaaaaagacaagcagagttattaaagttgtaaccacaaacaactctaaattaaataaaaattatttaatatttaaatagtggtccccaagagacccactgccacgactacttaacattacgaaacacgtgggctcaagcagagatatcgcaacgatcaatgcacactcccgataccaccgtccatcacacataccacaatatgttactaatataaagaaaagaatgcgatgcagaggataattatcacaaaaaaacactaattatatataaattttaagaaaaaaagctgaaaaacattaactactaacactcacccccacaactgctaaaatgcgcggcaagctcacctcacacaattccataaataaaataaattaaattaaatcaacataactaagttttatctcaaaaacataaaaccaataaaaaaaaatgccaaaggcgtggaaattacgattttaggacaagaagattgagaaggtgacagtggcagagatagtgaaaagtgcagtcagcaatgcaggcgcgtgcatgtgaccagctccttttgcggtactgttttcagcatcagcttcgggagagttcgccggtgctcctccaggagtttccattggcggtgccggtggggaagcgccgagaggggttggggcttcggtcgctggtcccggagtcggagcaagtgccggtgacggagaaggagaactcactggttctggagctggtgcaggcgatggcgatttaccgaacaactctgctggaagtaggacattgtcgacagtgaatatgacaagtggggttgagtcagttaccgtgtcggcaagtctggaagagtcgactcctgtgtggagagtaacggcgtcaccggcagttgatacagtcagttcgtatttgccggcaccgttggtagccagggttttgatcgggctgctcgtggtcttcaacgttcccttgggagagtaaccagccagggaatgatatagtaagaccgaaactagctcagcgttggtgagtttgctcagatccggaactccagcagccttgaaagcctcatcgttcggtgcaaagagagtcaaacctttctcgaccgccgtcatataagtcttaatcacaccgcttgaaacgatcaacgaagcaaatgtcttacacccagctttctcaagcaatgccgttatattagcatctgaagccgatggagccggagccgtcaagatccctggcgcaatgattggcgcgctgatctcaaggatcgaaatgttgtacggaatctgcttgactggcttaacgtaggtggagtcgagcttggagccgggagctgcagaaccgaagccaactttgccgcccttaaggtcggtgatgttgacgaagccaagatttccaggggcatttccggaagtctggtaaagagtagtggataaggtgcttccctgagagatctggtggagctttttcgggtcgaagtagtccagaacgacgtgaaggctaagggctttcttgataacggagagagggtgtttggctgtaagggaggaaagagctccgttactcaggacaaggacggttagtgtttggcggctattgatttcatcgctgagctttgtttgggataaaaagttattgtaatcactgtactctgggaatccggagaggatttctgtgatgttgtgggctgaaacgacggcgtttagggcgaatagaagacagaagatgagataatggtttagtgcgaccattttggggtgtggaactgaaattgttgatcgaacggtgttttgtatactcgaataatggcagctaaagctttgcataaggcaaagagataaataaatagagagagagggagtgggtgtcagagctggaaaaggagttatatgctgttggctttctttatagttttttttcttttggatgaaatgacagaaatgtcctcgactttttgaattattgcaaaaaagatggaaatgactcttttgtaatgtaacggttctaaaccattggggttgagggtgaaagagatgaatggaccagttagttaccacgacaaagggtcacatactcacatgtatggttaagttagtttttatccaaaataagaactattattataataatttttaataagaattagttaaacttagttttttttttttttttgaaggaatagttgaacttagtttgaagttcaaaaaccaaaattttctttctcaagaaaaagtactaactagtcgtttatccgtttggttggggccgtgcattggacgccattaggcattagcctccacttatcaatgcataatgagtgttaaattttatttttattaacaataaataaagaaaggaggaaggtttgttttaagtttttattttgagtacaaatttgcagcagtactaaattctatctaagagagtttgaaattgataaaatgttatttggggaccccattcttaacatgcccttcaatgttgtcgataaaagatataatgaactgggatgagatgcgatactctttaatatgttttatttaaagcatgttaagattttttggttggtagcatatatgattttaatcacatattatcctgatatcattttgctttttctagattcgaaaacttcataatggggtagtatagtctctcatgaaaaccagctgggatacatatatatccatatatgcatataagtacatttgtatttcgaaatatacatatacatgcacactgcaatcatataagtgagtatgcagagccacctgtaatgcactatgagtaataaggccatactgccagaatgtacaagttcatatatattctattattatttatttctattttaagagaggaaaaataaaaagaaactaataatgagtccatttatacgatcaaagatatacttacatgaataaagatttattaccctaatattattttatatttttgttctgtaataaggaaaatatgtaaatgctgttcacaatctcaatattatgaaaattggagtattctcttgcaaataagaaaatcattcacttgcttaaatttgatgaacttttattttttttttaagaattaatacataaatactatatcttagcgataaataaataaattatagtacataatataattataaaatagtattttataaataattattaaataaaatatgtgaaactaaataactaatgatactaataacaataaaaattgttatatgacatatcttttcacatttctttcttctcaattttagtcgttttgttaataatacaatgaagaccattacgtggcatataacttgtattgcatatacaccttgggtgcttcaatggtccatgagtatgaagattattatagatgatagttagtggtgaagatcatgatggaatacatatagccattatatcaaaatagtagcatcaaaaagttaacaagaagagttgtcaatttctttctcttttaatttgttttcttttcctttgagaaccaatctcccttgcctgaacctgaagtaataagaggcctttcatcaattaaactaaggcattaattccatcttttgcttttttttttttttttgccttttggttttgtgaaagaaaaccaaatattaaaattagggaagcagggcaatctttataattaagcttcatcgcacaataataattaaattcaaggcctttcggacaagttgtcaaatactcaaaataattaattctatgaagaaaaaaaaacaaatttatatataacataagaggaaaaaaactataaaaccgtaccaagtaaattgtaaattgttaagtaatggtggaactttcatttataccaaataatattatttgtaatgacagaatctaatttttttatatttaatataatatgctgattattcgaagaaaaaaaaaaggtttttttatttttacattttaaaacagttttttttttttttgtatt

SEQ ID NO: 112543 - DNA, 2934 bp, Cannabis sativa
agagagagagagagagagagagaatagggttgaaaaatctaattatattttttctctactatttctggtattctctggctttttcaactgttgttatttatcatactatatatccctatatatagtattataaataaagcccttaatcctttatttaaaataaaaaataaatatctaatttgatttgaaacagaattcaaatttaatatgaatatctaataatcgaatattaaaatatcagtatatcttttattttaataattatctttttaattaaataatttatctaattaataattaaaagataattaatttaatttaatttaaattattttaagttaataaaataattaaaaaaattaattacgggcttttatatgtcaacgtacacgtgtagagtgggcttacatgtgtaggccatattttaaggtccaaaattaatttctcaattttttcacaaataagatttattatttattctaccaataaataataattgatcgattctcattaatatcttatttcacaagaattaaaataatttatttctttctttagtaatatttaagaataatattatatttaactaattaataaagttttatccaataaaactaaatagttaaatactattaattatacacggagtcatgactcttccagatgttgactatgcttggcgaaaccttacctgggcgagttatactaatgttatcctagaaggaagaatgaatcttaggcttggccccgtttacgttatttggacccactgatgggccataaacttttatttggaatccacgtgtccctttccgaaaacacaaataataaataccaatgtaattgaactaccttcactttccttcttggatttcaggacccaatatctaagacaaaacaataaacacctcagctacaaactaaaacagatatcaaaactacacaaattctctattaaaactacttctagacgcacattcaccagcttaagggcttcaaacacatcgttatcaagagaacctagatttcaatcccgaattaacttaaaagtaaaatcaaaatgtgcaccaaagaaaaaaaaatacacgcattatattaaactttttagaaattttagatagaaacagaaaattgaatcctctcggcatatcaaattaaaacatatatcaaaaaataacttaaaaaatattatgatatatatatagattagagatatgagagagagagagagatagatttatacctagatctagaaatagaacttaccggaactcgtcggagggaccactggttgtgtgctcgatcggagggtggaggtgctagttggagatgagagggaatcgtggcttgaaatgggttttgtgttttggtttttttatctacataagtatcaggtgagacagtatttggaacgaatgaattgtgccagatgttagggagggaaaaattccactctcttcaaatggtaaaatttctaaaataaaaaaatcaagaacgacaattttgccccagatgagagtatattcattctagataatcatttaattatttttaaaataaaatatattctatctagaacgacattgataatttgtgcctaataccatcaatatcaggaataattttatcgttcctgatattgtcacgcctgaaactgttatttattgtagtgatacgtggcataattttattagcacacgtagttacattattttaaataaataatattttaaaataaataaatcatattaaaaataattcaaaaaatcaaaaattaaattaaaaaatttacataaaattgaagaaaagaaaaaatgaaaaagaagaagatggatagatcaaaacagtcggaggagagatcgttggtggttgtgggacctcttggttccatcgtagatctgaaggcacagtggctggttgtttcgaatctctaggtttaggatctgaactcaaagtggcctgtcgatttaggatctgaagctgattgcgagagatggagaaggaggaaggtgcttgcaggtcggcaaacgatcgtcgtctggggttgcagaggtcagcgtctcgagaatagttaatggttaaagagagagaaacgggggtaaatgatggtctaggttatatgtttacaaaattaatgtatttttagttttatttctttttcttttatatttatttaataatttttggttttgtttaaatgatttagttttttttttttttttaaataatataattacatgtactaataaaactatgccacatatatattgtgttcacatgtaaatccaacccatcatttaacagtataaatttgattaaagtaccaaatagctaacagaacacgagttcaagtgttttactatcaaaaagtatgtttaggagttaattgctagcaaagtaaaacttttaggagttttacctcaatttactcaatttatcgtggtaggttcaaccacataatatttgtccagataaccacataggatggcggtaacaaataagacaaatttatttgtcgtcacgtggcggagccagcagtaaatgttaggggggcaaaagaatttcttttatccaaaaatggcctgttaatgaaaaaatatatattttataaagaagaaaaatataaattttttgggacataaataaatatatggtaataaaaatgattttttttttatagaataaatatgaatatatgtaaaataaaaagaacatataattttacaaaaataaaaataaaaataaaaatatatgatggtaaaaataaaaaaaatcttattttatggggtcaaatataaaaatatatataaaaaaaattatacaaaaattactttattaaaagttgaggaggaaattacactctatactctttttatattgtcctcttttattcttaccttcttttttaaaatctatcatttttacctgtttttt

SEQ ID NO: 112544 - DNA, 748 bp, Cannabis sativa
tttttaagtatattctgttaaatttaaacaagaaatgccgttagatagccacttttaatatataaagatatatatttatatatatatatatggtgttattttacatttacttgtttatttgttcaagttcttatcaatacttatcaaatttacaactatttgctgtggttgccgaggctcaataccctttaatattaattataattaatataagacaccagctatatattaattactagccaatccagaataaaaactaatacaattagagtcatcattagaaaatacgcaataataataataaattgactaaacaacgtacgtggagttctaactcaataaattgacacactgaacttttggctgtcggaacttgggttgacggcctgaggatagtggccgctgatcggcgagaccatgggagactatcgaaggtaacatctgtaatatttgaaattgaagaaggcaatttgaaatctgatcatttgggttcatagtcctcaatatgagaatatatacaaaaatatattacaaatatgtggcagaaataaaattaccaaaatgtaaacattgtttaatgtccatagcataaattacaaatgaatggcataaatttgaaaacacttaaaattttcctattgtatatgtaatttctagtgtattatagttaatatattatagctaaaattaaggaactgttataaatagtattaattatgtggatgtccaaatcttttatttattacca

SEQ ID NO: 112545 - DNA, 1984 bp, Cannabis sativa
agaacatcagaggccggcgggtttgcttcagcctctaaagattcccaagtggaaatgggacggcatcaccatggattttatggtggaatcgccaagaacattaagatttaaactcatcaatactacccttagaggctaatagttgactcgtggactaagatttattaacacctgaaccatgtaaaaaatcttcctctcttaacttctgcaaattattatttctttagctcataaatatctagttttcaaaaatctcggtaagcattagtcatcacaattattctaagagttacattaacatgttttatcttctacgaacactatcatggttctcacatatctcttaaaaataattaatataccttgttaccaaataaggtaacccattacaagcttgttacttaataaggtaatccattacaacgaatttatcccataaatttagggataatgccatattttgcaagaatgaagatatatgagccgtatgaaattgtccaactcgcatcctttagtcggtgcatgcgaaccatttgattgatgaaagctggtcggatgtcttcaggtactctacttgatgtcacaactcttgtttttgaccttgagtgtcaaatcttcctatacgactcactaggagaagaaatatctatcctagttatgcaatgtgctccacgtgtcatccagatggatgccacgtcaccttgtgtaaaatttggataacaataaccatctccccagtttccttttcttaaggaatgcattttcttgttttatttcttttctctttaatgatacattggtctcattttggttcaatgttgtttggttcttctccaagcttatttaggaacaatggtgatgatttatacttgtgttggttcatcttctttccaaatgatggtaattttcctattgttctataaaagggggagaagattcgtcttaatcttttcaatgttttcatagttcctttggcttttttaatagacacaaagggggagaatttggcacaaaactcttgctggtttgttgtttttcgttccttcttattttgagggggagttttgtggttttagtttcaaaatttttatattttatacttattagtgcttatatttaggtagagtgtttttcatgtatcactaacatgtttgtgtttagtaattaatttagtcagtcaaatttttaaaaggggagattgtaaagcccttagttggtatatttagtaaatatgataaaattcattttgtgtgatatttttaaaataaaattgagatcttactttagtgtgaaaaggtttataaaatcaaaatattctatttatgcttataaatatttaaatttctatataagtacataatatcttgatatttatatttatggcgttttatttgtttaatttgaatcttttgatctaatttattggctaaaaaaatgtgtatatcttgcatattaaattagaatgttgttttcttatttattttaggaaactttgttgaaaaattatctagattcgtctcaacctactccaacagattgacaggctatgtgaacatattctgacttttctttcgcgaatatttttcatttattgtttgattgtttccttgtttgtgaaacacaacctgaggtgtattagtagagtatacattcttaattaggttatgattttatatgaaaaaaataaaatggtttattatgaaataaatactatatttatatatggtatttttttgcatttgatatattttattatatttctgatatgatctacattaatctctccagctaggatatttggtgtccaagaagaatttatgggatgaatttaactttgatggagtctagattcataatgctgactaggcaaatcagaatttcgtctacacttttttcatatatattcagatagaattttgttttttatgagtttttgtaaggaaactatttaatgttggatattattttaccaggatcttaaatc

SEQ ID NO: 112546 - DNA, 5410 bp, Cannabis sativa
tctctctctctctctcttttgtggagttggtgtgtttactatggattggtttaagtgaggtcattacgctgtttggttagtcttttgtggcttttttcattttccaccattatatttcatttccatggagttgttcaatctggtataagctttcactgttgttctcttcttttagctttatttagtatttgcttactttgtgtaagtttgtttcaacattcgttgctagttcgagattaagatgttagtttctttttccctttccttatcttgtatgttcagtgttatgatcattcttctaatgttgttaggtgttttgaggggcaataagtttgctatgatccctaagatgttttaaaagctcttccattgattacaaaaatagacgtttaatttgattattttcattttaatttgttaaagagagacgagcagtaagtcatttggaaggggttccattttatggtccaagaagtgatatgtctgggccagagataataagtaacaacaagatagtggggagtaagagaagtaattcagactctaccttcatggggtcatccagagatggaaatcctcaaatgggacctgattctcttgagggatcacatttgatgaaggtaagatatagtcaccaaatcttatttctcttttagttttgttcaacccaattcttcccttagtgggttcttatctctttaatgcagtttttttttgttctttttttctcctcactttcggaatttcagtggcttagaaatggagctgggggagacagaccgagaagaatgaatgatgatgacatggtctttagtttacaacaaatgaggcctagttctgcttctcttatatttcagcatccttcggggatttctaaattagaccgatccattcccctcaatgcgattccagcggtacaatatccaccccgtggaggtcattttgtgcctatggtgcctcaaataccttctaacagattcagagacaccaatcccggtccttcaaatatctctcagtcagctgctgacgagggatctagaactggaataaagggccctggaatattgagttccattaatgccagtgctggtgtttctgagaagaatgcgccggggccactaccaagtggtagcaggcaaaagtgccccactgtaattacagagccagagtcttctactccactgaagtaatatctttctttcagtctattctcttctggtaaatatattgttgatgctatgtattcttaatttgcttctatggcagtcggcaaggatttgcaggtaatcggcagatgactatattttatggtgggcaagctcatgtttttgatgatgttcatccaaacaaggtctgctttctcttctgattcttctagagacagctcggttattgtggtatgatagctattctggtgagaactgagaagcatatttcatggatattaatgaaatggtgtgttgctctttaagacaagagagtgatcagtgccgattttctaggcttattgttcaaatacttcaaatggggtaattctttaataagataaaattatatagaaagacatgaagttggacagagtcgaaaaatattaaaattattcacaaatatgttcattcatgtagggaccaaaggttgagttcgatccgcgatctctgcacttgtaatgtctcctggataagggacgctaatgagcggcccttagtgtagataggttaagataccttatgaaatattctaatataaggcaatgcttcccggcattggtaatcttagattaagaagagaaaaaaaattcatctattcctcattgttttaagtgaaaaacagttaacacaactatgcctatttataggaaacaattgatcacaaatggaaagttaacacaattgagaaaatattagtaaattacccaaataataataataataataataaattctctgtattcagtaagaaatataaattcctaattgtggtattccttctttgcatcacaaagataactggtcagagtcttgcatataattcttgtaacttgtaaggtcaatgcaagtaggagtgttttcctgtcccatacctttataacatattattgaattttgattacttttaggagtgtcatacatcgaatgaatgcgaggatattaaatcgttgaattactttactagttttgagatgtaacctcaaatatatttctggtttacctgcaagcaccataaaagttgaatctgaatgcttttttaggcttacccaaagtcatcttttgtcatctggttccctgcacgtttgactgatttctttcaatacatccaccagtatactttcaatacactgcggtggcacgaagcgtgtcttctctgtaaatagctgcagtagctcacttctcttcttcagtaataatattctttctctaaatccacgtttgaaaaagaattgtaagcactactcttgtctggtgaaatgactcgtatcgtgcattaggatgttcaggaatagccatgtgtatctgctttgaaagaccttggtgaactttgacagttctatcaaagatttttagttcacacaataggattttttttcttctttatgtttagtagttgattatattaggtaattgtttattattatcattattgctgttgttgttcctctttggaattagaatcatatttgttttaaatgtctctctttgtagttgttgttgttgctggtctgtctcctgtgcctcatatgaaactttgatcactgttcttgatacaaacaatatttcaggcagatgttataatgtccttagctggatcaaatggaggatcttggtcaaccaactactctccaaaatctaatgcgaggccggctggtgaaggtcaaattcccattggagatgttgaaactggtaatgccaaggccatggcacttcttcgagaatatcgtgggaggataagcgtccctggcagttctagtagtcaaggtattgggttcagtgaccgagttttgtcgacaccatctgcaggtgggctttaaatttgttcttcttgttgcagcatgctcttatttttattcttttgagttgaacttgatgagtatgcacactcataaataagctaatgtgattaagaagtacatttacatttacaacttatagattagagagacaatcagttgacgatggagatcatctaagtgaccaagatttgttaaatgtgtcaatagcatttgattattttacattaatggttgtcttgattgtaggtggccatcagctcatcagcacggtagctaaagacgtgagaagctcggttcatgccggagaatccatcaccaaagagaaaaatgagatgtgatgatgttgttgttgttgttggggaagaggcttgaaaagtgattgaattgttctaaatgttatcaacaaccctctgagagggagaaaaaagataaaaagaaaaagagaatatttccccttctcttctcttctattttgattcatatttctgttattttatatttaatttgtctcctaattgtatgatgacttgatgagttaggagtagatgggttgattttcttgtttatagaaacccacaatgcttagttgtattcccattatggatataatgaaaattgagcactcttcggtttgttaaaggattacacttttctttaaaacaaaatgaaaaggccataatttagtaacgattgagccattttaactcacaaatggttctattttgtgatatacagtatttagtatcttgtatacataatttaaagtgtcaatatattatcacttacctttataactttttttttttattgtattttaatatatatattgggttaaatttttattacaccctttaaatggacgttttaatagaccttttatcgtttcgggatatgagaaagttttaattcaatttttgtcataattgtgtagttatttagattatctttaaatttttagaaaattctgaatagtttcctatattaaaaataaagtttaaatattttgttgcacgaataattgttcttatacacgtggaaactgtttgaattttatttttgatattgtaaactatttaaatttttttaaaatatacaagtggttctaaataactataacgtacatgatatgaagaaaaaaatagactaaaaaactattttagatgctgaaataaatagaatgtctaccaaaacatttctttaaaagttgtgttacagatttctctatattttgtgtagagtatatttacttgaattttttttgtatatatcgttttatttatttatatttacattttgaataataatatgttcataaaatatatataaaaatattatactttaactcgtcatgatatgaaagcatctaaggtttgtccgatttattttcagaataatgagactacgattcatgctctttaactttgtcctttttttaagtctatccgttgattggattttgcaaggactcaaatcttcgaaggatgcctcttgttattatgaattattgctatgatgtgtggatattttgagtaggcaagaacttgaggagttcattgcccttggctagcgcatttggcataggcaaaatacctttgtttatgatcgtaagctcctccctgacaatatgatcagtccttgaggcttgagccattaactatctttagaggtaccaagatgctaatattggttctctcaaaaaaaatgctaatattggtgggccatcatctatggatcagccttcttgtaatgtgggcaatgaagagtcttctaccgaagtagatctggctttaggcgtggtcaacttatttgtagatgttggggtttgttatgaagaccataaagtagggatgagggctttggcttacaatcctaatggtcatgtcttcttttctggtgcgtctccgtgcatgggattttttgagcctcttgttgttgaagctaaagctttacttcaagggctttcccgttgcttgtagttggggtatacatctgtctgtctgattgtcaacggttagttcttgttgttaatagcaaagatcctcgtctcaataagtttggtattgttcttaatgacattgatcatgtttggaaatcttttaataatatattcctcacttattgtaaaatgtctaagaacattgttgctcattctttagcaaaacgggcacttgatttagatgagccacgtttttgtggtggggcctacttatggatttagttgtctaaatttacaattttttgtaccttaaatcttttcaaacttagtgtcctttaatggaattactctattttctttaaaaaatatatattatactttaacaatatatatatatatatatatatatatatcaaaatattatactcaactgcgtgaattatctttagagtttttttttttttttt

SEQ ID NO: 112547 - DNA, 2069 bp, Cannabis sativa
actatcaaactggattaaagttatggtgtgatcaagttgggagtaaataataaacttggctttatgatttcatctactggcaatattgttcaccttcttccctgttcaggaaagggaagaaatggaagcaaggcgtgagcgcgtgcgtctgaatgttgctcgtacgtgttcctttttatttacttgttaatattagttctttcctaatgagacttctgatctaatgaccatacttctatttatttcttaattcgttgtctcttttattaagcttatctttaactgtctgttctcttttggagttgtattttcaacatcagacgtgtttctaccttctcttcagctatgttgtggcttaacattattctttttatttcatgaagttatgaagaaagaagaagaggaaaggaaactaaaagaaggcagtacacagaaaggtgccagcattggtcaactactaagtagaatatcttactactgttatctctgctattctggttatgcaattactgaattttatgttctgcttttataggtaaagcagcgggtccagacctgagtagtttcattcggcagtttccaggtttttcagaaggtatctttttctctttgtttcttcttcccactcattccaccaagtttctggttatagccatgaacataatttattattttaaatatacccatatctccacaagtctagttacatataatatgtagttcatcaatcctaatagtttttaacaagttttaatcaaattattatttaagtattttgactagtaaagatttgattctgcatttttttccttgttcgctcaaaaaggtgtcaaagttgaggaacaaactgatggggaaggagtaaggtgggccttgtatattccaattgtactttgcttagttgctgagctttatctatgtgtacttttaccagtgtttaaacttaaaattccacacatgtatgtaagtcctctcatgccaaccttaattcatatttttgttcacttttattaataggaatggcaacaagagtgagaaaaatacttcaagaccaatcccagagtaggttcactcataaagttttctaatttgcaagcacgcaataatcaatccaaaatatgagaaaaaattctttttgatgctctattatttcgtccattcttttgtttttgtttcattcttcaggtcttcggagccaacaggatcggggcaaacatacaagccagggacatggcagccaccaacatgaactttggagtagctgcctgctgttttggcacaaatacaaacccaattttctgcttttatttgacatccgaaagaaagtcaagaggtgaatccatttaaaacacattattagagtttaaaattaaagagtttattaataaaacaatattagagtattgtttgcgaaacgacaaataaatatttatattaattaagtaattttaaataatagaataacttgaaattgatgtggattagaatcactgattttaacatctgacatgattaaaagaaagtgatatcccagttatggaagttaaacatctcggcaaatttattgatttcataatatatccaaatttgcattgaagaggacttgagttgttaggtgcactttttcattccaaagattgtagggttcatcacatacaaataaaaaaattaaaaattgaaaaaaaaagaacatatacatgtatgtctgttatttttcggttattagtagttatactcttattttatacaatttgaacaactaattccaatctaaaattttaaagtagagtcgacaagaacggtctatgtgtacacaaatatacatgtgatacattaccatctccatgaccaaaatagcagtccattcttgttggaagataccatctccagagtacgccacttcctcacaccatagataagttctttaaagaaaacaacgcactcatccatttcggtaaaatgaggaatacatattaagagttagtcccacattgttaatgtgtagaaataaattgtgatatatatgatgaatgagctactcctcccattgccaattggttttgagatgg

SEQ ID NO: 112548 - DNA, 4109 bp, Cannabis sativa
  modified_base (26)..(27): a, c, t, g, unknown or other
aatcactgaaacagtaaaattgaatnnaattagacaaaagtccttaaatgtaacaatctcaatagttcagggggaacttttaacggccaaaaaaattcagggagcagatttcgatacatgtcaaagtttgggggaaaaaattactaattagccttttttaattttttttaataaaattttgtataattttttatttatttatcttaatatttaaagtatattttttattagatagatataattttttaaaatataaaaatattaaaaaaagagaaaaaaattatataaatattatattttatataaaataaaaattattacgacgaagtggttttataaatttttaaactacaaataaaacttacatatccttcatcatgttggatatatctgatatacacctttataccctacatcaacaatcacattaagattatttccattatccaaatttttacacaaggtgacgtgcattcatttgggtgacacgtgacaaatttcatcacctggacggaagattctacccttgatgaacattgcagggagattaagcactcaaagttagcagaaattggggcatctgaacaaagcatacacgaacacccgactagcttccagcatgtgagcagttcgcatgtaccgaccagtaaatgtgagttagacaatttaagagatacatctaatatatcctcaagcttgcaagtcacagaaatatttctaaattcatgggatagtttcgtggtaattaagaaaaaagaaaacatacctagtttttcattctgcttattgtaattatagaaagcaaagagattttccattttattccttattgattttggaaaactaatttgaaataattaatctctatcaatactggactcatctcactattcagagacataaatttcattctaagaaaacatacgagagaaatctagatttaagagtaaattactcagagatcattgtaagagctttagagagagatcaaggttttcttattcatctactcacaagtcaatacaactaaagggtagtacgctattaccatcatcaagggatcgaacctctataattttggtattttctttactctatattattcatacttgttattttaattatttttaatcactttaatttgactcactgtcgttggctaaatgcgaggttaacattttgatatttttattgagagaaaagaaacacaagtctttgttttgagtctttttcaggagacaagatggttgtgcaaacacggagaagaaatcaaactgaaacaacggatccaatggctacatatccaaacatgtagacacctacaaaccccagagatccagccaagacggaccctgctctgactaatcctcagccagtaacaagtccacaaacagtagggcaaggagtaactacccctctggctgggttcacttcatgcatccaagaaactagaactactagcattcggactgagaaaactgccccccagtactagaatcccatctactacaaattctcaaaggctaatcggtaatgacaccgaaccacagaacttgcgagctgtactagggaaaatataaggccacaataacactcttcattacgatcaacaagatactagagcagctataaatttttcatttttagagaaaagatgtcagttcgaagaatggagggatcgagagatggaaatcatgagagcccaacaagaattaattgacaatcattctagacaagtcgttgtattgatcaggaaagcctaccaagccaccgaccaacaaccaatagcagatacttacattccttttgggccacaacacgggccagaacaatgtcttgttgaacacacccagtaaacccaagttaatggaccgtccaatccaaggccaaaaaatcaaactatgggctacacggtatacgagcaagttttgccaccccgttacttgggaggaaattgattcatgggtgtaaagtagaaaatagtgctcctattttgtctcatgtgttctttgcggacgatatcttttttttattatagagctatggagaatgaggtttcaaacataataaagatgttggatgtttttgccaaagcttctggacaacaagtcaatttttacaagtcatctgtattttttaatactaatacttctagacaaatgagacagaccatctgtcttaggatgggtattcaagaggtagatgagaagagtaagtatctaggcctcctgagtgctattggaagaaataaaaatgtggtttttagctatttgactaacaaaattcaaaattggatatagagttgggagaataagtttctaaggaagttcttattaagtcagtgattcaagcactccctacctacactgtgaatgtgtttcttatccctgttagtatttatcaagaggttgaacgatctataagcaagttttagtggagatcgaataacaacaaaggtattcattggttgagttgagaaaagctctctttgcataagaatagaggaggaatggggtttcatgactttagagattttaatttagcttattggctaagcaagggtggaggcttcttacttgtggggaaaaattttcaaagcaagatattttgacttaggaaattttctttctgcatcactgggaagcaacccaagctacatctggcgaagtgtttttgaatcttaggggttagtttgggctggtgcaagaagattggttggaaatggttctcaaataggtatccttacagagacttggcttgttgatgatgtgaacccttactttgaatcttctcacccagttctagttggcaaaatggtgaatacctcgatgaaaggggataaattggaataggatggagatgattttctcagatgtattaagggaaagaaatcaggagttaatttggaaaattcctctttctaattgttgtgagggagatacttggtattggatgaatgacagtgataatcaaccaggtaattctggtttttggaggaaactgtggcaacttaagcttcctccaaaggtttaaaaaaaaattagggacagtatgcataaacagtcttccaaccaagtttcaactgtcaaccaaacatgtaccaacactactacaaatatttgaattcgcgacgatcttgaaaacagtttttttcggggaccgtcactaaaaaaaaattaagcaactatttaaaatcgtcgggaaaaatgagtattcccgacggttttgaacagtagctacaacaataggtgacgattattaataaaacacgaaaattaaaaaaaaataggtatacccgatggtttaaagtatagccgacagttttaaacatcgagaaaacccatatttgtagtagtgcaattaattcctcttgcccgatctgtttagctgctctagaaactgctcttcatgtgctggttcgttgcgatttcgctcaagactgttagagacgatctcgtgtgcctactgtagctgctgttgcaatgtctttcaccaactgatttgaggagtgcttggagacttggaacatgactgatagcttggaagttatcatggttttatggtcaatttgaaaggtcagaaatgacctggtgttgaattcaaaactgcctacaatagaggaggtgcttacattagcaaaactcaactacgttgattggtataatgctcaaaaacaggaatcaattactcatactgaacctaatatggtttgggttgagcattgctccctttcccccccccccccgaatttcctatcatcaaagttaatgttgatggagcattttttttttctaatgagagacgttttggtgttggttttgtgacacattcagcagctggtatggtctcacaagcttacaagctaagactgtgaacaagttaggagtgtttcagcctcatgaggtagaagtcattggtgtgaaagaagctttgagttggattaaagctaatggatggatgagtgtgattgttgagtcggactgtcttagagtcattacaaatttataaaataataaacatatggcttctacttatggtcatattatttcagagtgtaaggctttgattactgtgttagacttttatttgggcttacattaaattttatt

SEQ ID NO: 112549 - DNA, 3428 bp, Cannabis sativa
  modified_base (2932)..(2943): a, c, t, g, unknown or other
tatataataatataattcctcaaataatacataattatctaattaggattttgctaatccatttcataaatctagggtattacatttaaggatccagctcctttgtgcgttgtatagctaatgtggaggatgtaggaagcaaattaaataaatagaataaagaggttcacaagagacactgcaaagctatcaaccaaaaaattaaggatttctccattttggatgcattcttgataattttagttgtggggagattcgaaaaattgaaaaagaattagatgtgcttcatgagaaagaagaaaagtattgggtgtcttgagctaaaaatgattggttgaaacttggtgatcaaaattctgcttacttccacaagtgcgcctcttacaggaaagctacgaatacgatctctagccttctgaatggggcaagagttgagatcatgggtcagacaaaattgggggctctctttgagctttatttttcttctttgttcacttcggatcgaccctcaatggatgctcttaacaaggtgattgcttcggtacctaggaaaaatcctgatgtgaataaccaattaactcaggaattttttgaggatgatgttcgtatggctttctttcaaattgaccatgctaagaatctcaggaggatggcattaatgttggattctatcaaaaaatctggaacacaatgggtcctaatgttacaaaggttgcttcgtattttttaaatggcgactatagtttgcgaggtattaacaaaacttttctttgtcgtattcctagagttgatgatcctactagattttttttggcctattagtcatttataagatcattactaagaccatgactcatcagatgcgtgaaattttgtgccactttatttctgatgaacaaagtacttttctttcgagacgtcttatcaccgataatgctcttattggctttgagtgcattaattctttgaaaaaaaaaacaaaaaggagatggtttttatgtccttaaacttgatatgttaaaagcgtattattgttagagaaaaattgacaacaccaaaattatgcgagtattcgatacacacatatacagaactgtgagtattcacctaaagtggtgaataatcaaatataggttgtaaataaatgaataaaaatagtaaaatataaataagacaagaggttatagtggttcagtcagagctcggtctgcttagtccacttttggcagtagtttttgcttcgtttattttattcagatcactcctttacataaaaattaagtgtctgtttagatttacataattagttagacatgactattattacattaattatacaatttaataagaaaaaaacactcaaataataaattaaagaatatttttaaccattctttaattaattatttgaacgtatgtgaattgctaagtcgcacattgactatccatatttcgaacacataagctcgtagagtttttggtgttttacttgcacattgggccttcgggcctacaatattggccttatggttgacaacttagaacttgcgagttcctaacaggttgttgaatacatttagtctttcggactagacatgcgtaaagatgtggtctttatgtatcgcaatagagatatacttgctcatcgcatataatcggtataggcgcaactaatactaacttcttttggtcatgcttttttatcaactatgttggacataatgtgtgattataccctatctcggtcgcacattctcgcaagtttaagtcatgcgaggttagctcttctagaactatctgttgatacgtcatccttttccatcgagaactgagtccatgtgtcaactttttacaagattgtactcatatttctaggcgaaaaattggcactataacacatgcccctagtttcgtgatgacaattatttgtcaagcgacaaaattatctcaagggataggcgagttggcttgtcacatcgtggtgacgtttgggtgtcttatcgaggatttttgaaatgaaggttgtgattatggttttatcttcccaagatgccacgtcatcgaacccttcggggtctgtgcaagctcaactttacataatcattggatcaagcgtctcttcgttttctactgccatgtgtcacgatctcaatgagtgactgtgacaactataaaaaaccctcatggtacgaaaatgagatttttcattttccctttcattctcaaaaccctctcaagttttctcttcaaaaaacatttgattccagaaaccttcatctcatattttccccaaacattcaaaatttgttcgaaaatttttcactattttttagatttttcaatttcaagtccctacatatcaatataaaatattacttataatatttaaacgtaaagatcaatttttgaaattaataatatttaattatttaatagatcattactaattttttatattttgatgtttaaattttaaaaattggttattttatattttaaattatggttaaattttaaaaatttattaatttcttaaaatctactaattatttaaaaataagattagatattttaatataagctatatttaaaattaaaaggttgttattatccttctaattttaattattatattaaaattatcttatatgataaattaaataactttaaatttgaaattaacttagatatttttatagatatcataaccataatattttcaaattcataaattggttagtttgtcatatattttattatttataaattataagttaaaaatataatatttatgatattatcgtaccagtttacttatcatctaattaaaatagtttatttgattttttaattttattaaattataagatcataaaatgatatgataaatatctagttggttatttcatatcatttatcttattagatattnnnnnnnnnnnnataaaataattcaaataaaacttagatattttaaaattagtttaaattttgaaattttaaaaagacatgttgagttgtttcaacaaccctaaattttcaaaatagttgattctttaaatgataatttaattgtataattaataaatatctaaattaacatttgttacatgttttgtttgtttagttaaattatttattcaatttatttaacaaacatattatttatttgattcatattgctatgattaacttgttgacagatccaaagatctgattttaatcatagtctaattgtcaatagatcaaataaataatttataacaggtgaattttgtaattttttttatctgtgataaacctaataacatgataggatccatccaaatcagtttgtataaatgagactatatgtttgctattgggcttagatgcatacaggaagcccatttattttttgatatataaatgaactaggttgctaaaat

SEQ ID NO: 112550 - DNA, 3916 bp, Cannabis sativa
ataaaagataacaagcgtagaaatgctccaaacacgattaaaactcaattaaaaatatactaaaattaatctaaaattaatactaaaaataacttaacagaggcaaagttaactaatagcctatctagcctactcactctagtatctcaaaaggaatgataaatctagaattcaactttctttttatttttttttctaaatctatgtatccctttcataggcaatagttagagaaatacatagtctcgcacttggaactcaatatccctacgcttcggatcaacatagcttttttgttaactttgtgaggtaagcgtacgagattgaatcttttcaatggcttcactggtcctctacaccaatttaggtccattgtatcatctctcaccagtttcatcctagtgaaaaggtgatcgaccttttataccgtagaacatctcataaggtgacataccaatggtactctggtaagtgttattatatgagaactcaaataagggtagaaatttattctcggaaccctcaaaatctatcacgcatgccagcaaaaggtctttcaatatctgaatagttctctcaaactgaccattcatctgaggatgaaaagctgtattgaatttcaacttggttcccatgtctttttgtaaaatttcccagaatttagaagtaaatttggaatcacaatctgaagcaatcaaattcggggcaccatggagtcaaactatttttttgatgtacaaatcgacatattgatccacaatataggttacccacataggcagaaagtgtgctgacttggtgaatacatccactatcaccgatatagaatcatatagttcggtggtcttaggtaaccctactacaaagtccatgattatgtcttgttgcttccattcaggcactctcaaaggctgaagctaacctgttggtctttggtgttctacttttacctgcggacaggtcaagcacttcgaaacatactcaacaatgtcacttttcattctcgtgcaccagtatagtgccttaacattatgatacatcttcgttgttctcaagtgtaaggaatatggggtggtataaaactcatcaaggattattcctctggatcagatcatctattagaacacaaaccctatctttataccttaataatccattcagtattatagtgaaatcctttataatacctacctcaactttcttcccgaggtcaatcaattctggatcactctggttggcaacctttatcctttttagcaaatcaaattgtaatgtattattagtcagtttcccgaccccaaactcaattcttgctctggttatatcttcaactaacttcggagagatttccttcagccataaacatgccgtggaccttttcgactaattgcatctgccaccacatttaccttgccgggatggtagaggattttatagtcatattctttggcaacctctaaccatcgttgatgcctcatgttcaggtccttctgagtgaagaagcatttcaaactcttatgattagtctaaatctcacactttttcgccatatagatagtgacaccaaactttcagggcaaaaactaccactaccaattctatatcatgattgaaatagcgtttttcatattccttcaattccctagaggcataggcaataaccttccctaactgcattaacacacagcccaatccattcttcgaggcatcagagtatatcatacacttcttatcactggttgtcaaactcaaaatcgatgcagtaattaatctctcttttaactcttggaagctgttttcacatttgtcaatccacacaaactaaaaatattttgggtcagctcagtaaaaggagtagaaatcttggcaaaaccttctacaaatctcctgtagtacccaaccaaccctaagaaacttttgacctcggctgctaatttaggtcgtggccaatcctaaacagcttcaatcttggctggatctaccagaatttcgtatttcgtaaacttagtgtaaagtttatgctcttagagatgttgtaataccatgcagatgtgttgtccatgggcttcctctaactctgaataaactaggatatcattaataaacacactcacaaaattgtcaagaaagtccttgaacactcaatacatcaagtccatgaattctgctggtgtattagtcataccgaaggacatcactagaaaatcattttgatcatatcgacagtgaaaagcagtcttgggaatattcttttcccaaatcctcaattggtggtaactagattgaagatcaatcttggagaagatgatgtttctgtgcaactgatcaaacaaattatctatccttagcaaaggatatttgttctttactgtcaagttgtttaagtcttgataatcaatgcatattcacagtgacccgcccttcctcttaacaaaaaaactagtgctccccaagaataagtactaggtctcgtaaactacagattgagcatatattgtaactggattttcaattcctttaattctatcaatgcccctagtatcagctcaattttgaaatcaacctatctctttggttgcaactttggtaactctttcggaaacacatctgggaattcacacactactcaaactttcttcggtcgcattagtatatccttcgtgctatttattacactagacaggtattacttacatctttcccaacaattcactagtcttgagtatagatataattggaatctaggatccctgaatcttttccataacaaagcagggtttcacgctctgattcaaatgtcagcatctttctcttacaaaccagcccatctttagaatcgcattgaagtcctctaagtctagttcaatcagatccactaacattcttttccttctaccattactggaagagatctaacccgcctcctggagattactacttctctagtaggcaacaaggtatcgaatcaactagatataacatcacacggtctacttaaattctcaatgactatactcaaaatatacagatgtgtagcatccaaatcaatcaatatggcaaacataataccaccaatagaaatctcacctgtaacagtagaatgaaaagcctctacatctgcctaggttaaagtaaatacccaagtaggaaccataggcctctctttcttgatttcagtcttttgtaactgcgggttgctatttcttaaatggcctactactccgcattagaagcaggctctagcccaatattcgcccaaatggtgtctcttacattttggacatttagggtaggatggccaactcttgtttctgcctcgacggaaaccctagttaccctaaaatatttttttaaacccataactagtggttcatttggcttcctctttcgatcattggggttagggcccctaatcattctagtaccgagtggcttcttccacacatctcttctctgattgctccttttacaaatcaaaccttcaaccacctcagtagcgagagctaagtttacaatcttaggatacgtccttataaccgatggttgtttggctgccataataacatttctagaaatatattcttccaaacctctaatgaatttggcttttcgtgcagcttttgtggccacttcatcagaagcaaacttggccaacctgtcaaacttggtattataattagtcacagtcatgctaactaaccttacaaactcctctgctggggaggcactgatggactcattattatacttctcataaaatattgtttagaatatatcccaagtcatggtatttagatcatgagcctgggatacaatctccaaccatattcgggcatcatcacgcaacatgtatacaacagatcaaaccctgttactgttgggttttatgccctcaataaaactcatttcaatataa

SEQ ID NO: 112551 - DNA, 2913 bp, Cannabis sativa
ggtccaggtctagtcctgggttcgggtacgagtcccgaaatctaggtctaggtttgtgtctcgattccgagcctgagttttaggttcatgttcaggtctgggtctttcaagcctgggctctagttgcggtattttgaataaaaattggtattttgaataaaaatttaaaaatataagatggagccagccaaaatttacaaatcagagtttttagtgcataataaattttttgactttaataaattttaagacaagtaattaatcatgtatttatgtgtaaagtggtgctaataatgatgaaaaaaacgaaagtaaaatgtaataatgaagtgggtcagaggatcagaccactcgctatcaatcctatcacaattacatcggaaccaacgtcaccttaaccaggaaatcacacacaaaattatgtacccaaaaacatattattatcaatatcttttcacttcccatccttacgtgtccttttcctattcgtccaaaggatctcgtatcaaaatctatacactactaccctacgggagggaccaccgaactatccgtgtcaccatcgccggacgtcacccacatcggatcatgtccaacttcaacttcaacctccacaagtaactccaatccaacaaagccctatttgacaggtcccacgttctagatgttgacgtgtccatacatgattggattagttgatctcaccgttggattttaatcctacggttattaaccgcttgctttagtcagttgagtaaggtgatttgattggctaggccatgaaatttaggcaactcaaccccatcgtatgttcccgagaatctgtgggggtccacgtgttgatttttgtactatatgatggtgatccaacggttgatatttaaagtgatggtacactgtagtctgtactacacctaactcttttctctgtgttttgaccatttgactatttgacgtgcgcgtgggagataaacgtcgtcttgagtgagtgcgggtggaagttgggtttctattttctatattcattattattttcttattaatcatttttttttttgctaatttcgattttagtcccaaattttgatatgtaatcaaattatattttttaattttttaagttgttatttttttttttcaaattatccaatattattaaattttactaatatattgattgttttagtattaaattatactctcaaatagtgtcttataaacttttattcacatcatattttcataaacttttttttgtaaaattatttcataatttttttacattgctattagaaaaacataatgctgtaaatacaaaccgaactttttgacatagtacaaaatcggcacgagcctaaaaggcacgagtacgactagtacgaaaaaatatgagtttgagcacggcgacagaaaaaatatatccttaagcacaacacgatacgagaagcacaaaagacacgatacataagcacaaatagactagtccgaaaaatatgacagacgtcaaattcgaaaagcacgacacgacatattaaaaaatttataatttattattaataataataagataataatttatcaattataaataagttaaaataataataaaacttaaattaataataaattttataattttataattaaatctattaaaacatgaaaaattaagattatatattaatttattagggaattgtcatatataatgcattttctattttttttttagatttttttttttatttttataaaaactgctaccattttgagattatgttatttctattttgaggttttgctgttttcattttataaaaattttattcattttgaggttatgcttttcattttataaaagtttttttttttttttttttttcattttgaggttatgttgtttctatttttataagtgaataaaaagtcaattataaaagtataaatgaaaaactcctaatttatttatagtgtgtaatataaaaatttgagtatttaataatttttttaataattagcatttttaaatacgtgaactttcgacactacctgatcttgtctcctaaaatatacgcttgttaaaaattctccctaaaatataacagttacataattatgcccattctattaggttttgtttcttttaccattaaaagttagtatttttaccccctaaactttgaccaatacaaaattttgttcacttttattaaaaagaataatttttaaaattataatattctattaattttgaaaaaaaataataaaaacttattaaaaatattaaattaattaaaatattaagtttacttaaaaaaacctaaattattcttcaaaaaaatatttttaaacttcattttatttataaagacgtatcataaaaaattaaactaaaactatggaaaattcaataaataatttaaaataactaaaaattcaataaaaatataaaattattttgaaagaaagttagaaattaaactagattttgggaaaaaaaaaataaattcgagcttattcccgtaaaatttaatttttacaaaaactaaaattttgatatatatatatatatattatatctaaatgaattctttcataaaaaataaataattttttaaatcgcttaattagttttaaaattttaattttatttttaattttctttatcattcaaaatatttttttaaagatttaaattaattttttaagatttagtaaaacaaatgttggctatttctcatttttattttgagggggtacgatttgacagttgtcaaagttaggaggcaaagttactaattaacgaagatacgtcaatatttaaatagaataattggacgaaacctaatagaatggctaaatttctgtaaatgtaaaagttcaggaaatttgataactctaggaattagagtt

SEQ ID NO: 112552 - DNA, 4181 bp, Cannabis sativa
tggtcatatatgaccaattttaattatgcatttaaggataaaattttaaggtattgtaagtatggaaattcaaatttcccatatttaaacttaccatattcctttgtactagtatgaggtactagtatagcatgccataataaaagatatctattttatcatttggtcattagaaaaattaaaataagagatatatacaacaaaagcattagattattacctttataatacttacttaagtatttaaattattccatttaaaaagaaaaagaaaaaaaaagcattcaaattatattttcaatttgtggcaaaatattcaaattctactatttgtagcacttaattatccgtatatataatgtcaaatttgcttgtcacttaagtagttttgcttaaaaataataatttaagtacttcagcttataaatataatttatatatatttcttataaaaataaatataatatattttgtgagaagataaatataataatttgatttttttttttatttatacaacaactaaattcttttttgtacaaattcagtaagtgatttttattgcattaatatgaatataagtttttattttgcaaaactaggattgaagccatgcaccatctccaaaggatgtgatttcaacaaagaagaaagaaagaagaaaaaaagtagtctaaagcttcatatacggaattgtctcctttgactctggcaagtttttgacaattattgccagagctactaacctttggctcagggagaatgattgagaggaagaagaagaaaggttacgatttaggttgcaatttaagttgcgaagggagcactgttaagattgtgatatgggttaatggttattcagggttgcgatttgggttgcaatttaggttgcgactgagcatgactaagataacgatatggcttaatgatgatttaaaattacaatttaggttgcaactgagcatgaccgagattgcaatatggctttatggtgatttagggttgcaatttgggttggaatatctgttgcaatttgtgttgcaatatcagttgcaagtattcaattttgtttagaaaattaatggaagctttatgttgtgtcttgcgatttaggttgtgactaggcatggttgagattaaaatataatttaatggtaatttagggttacgctatcggttgcgacttcggttctgcttttgaaattaatgaaagtttcacatggtgttcttgaacgatcacagagaagagagaataattcagaggatgaagaaaaatgggctaaaaattgagatatatatttgatcatggtttagggttgtaaaatatgttgcgaattttgtttcgattttggaagaaaccaagcttcattttctgtggtagagagcaactataagtctaggaagaagaagaaagataattattttaggccacaccttcaagttggggagatttaaatgcaagaaagaacaagaattcattgcacaagaaaataaaaaagaaaggaaaagtaatttatgaagaaatcataaaataaaaataagtttatgcttaaaagtaaaagtgattaaaaaaattatatataaatagaatagtaaaataaataaagtataaatagaaaaaaaattaataaaaagacatacatgtggtaactttcttatttgttttatgtagtaattagaattactcgtgaattcacaatacagatatccataatcgccacaggaacttcctcaaactaagatagctcatcgtctaaccgaaaggcatgccttgctgaatgatgagctactaaaataagcgagccacatgagataaaacttctcccaaaaatttaaacaataaagctataacgtaatcaaacatcacatcagaagagctagagttttagcattgtagccctaaaatactacctgagacatcaaataaaaacaaaaaaataaataaattgtatttgaatggctacctacaaaaaacaataaatcaataaaatactaaattctcataaaacctacaaaatatataaaaaaaaaatagaaggagagtgcattgaacgtccaggaattcctaatccttggaagttccaacataatattttcatttttctttcgatgaccttgaatatcaaggctcgtcgcttccacaacaaaattgggagaagataaatcaatagaatcagaaatatcattctccaccaatctctcccctattagactaagcaaaagaaaactcacccgaaatcacataatcatcaataccagtacctttttccaatcgagacatcccctcactgatactcattattcccaaacgttgagctttaatcttgaacgattctttctgtatctgcaatttagcagcgacattaccaatgaaattcctagaattacagctgtcaacaataatagccgcctctatgtcgaaagcaaaatcatcctttgagctatcagaaccccccacaaccccttctccattgtttttttaattgtctcccttcacttctaaaaatttcctcccctacctctccatttcttttctattgaattgcatcggtcctagttacactcttcttctctgacaatttcaccaatcttttctttgagcttctcttccattttgacaaggatttaatttcactatcaactactttaccctcattaattcttctgtttgaagttaaaccatttctcaaatccaacccagagtccattcctagaagtccagtccaaattacaattaataatagtagccccactactagaagccaagcccataaccaacttatccataactttgatatgctgacccaaagttttactatagacccctatttcagtcgtattacccaatgtcaagttttgttgtgtcatctcacaactttgacccatcatcacgtgtacttgccctattggtccatctgacatttccaaatctacctcatcagccaagttatgcataattttatctttcccacattgcttattcagtttcagattgaatgattagcagttacatatccctcacctccacgatcacctattccttcccaccataattgtttcgaacctccaatcccaccacccatcctaacactttgctgctcaccattggaaaccactacccgattagcgaagtgatgagaatcagctactaccctcacatttaggtacttcctgccaccttcatcaaaacaacccttccttggattatccgtctttagccaatccccatataacggaactatcttccccttcacctccttaacaaccaccatttcctgctcacaaccaccttcttcatgaccccaccacccacatcgataacatatcattggcaagaaattgaacttgaatttgacccaacacttctttccatccaccgaaaggtgtttcttaacgaacactagtttcataattggtataaagagattgactttgacttccctcttcatcaacattctggtaggactagcccaattcaagacttgtatttgccttactaaacttgtgagacgtcgagcattattctcagtgagcactttaggatgaaattttgtcaatcaaacccaacatgaaataccattcagttgtgcttcatctcaaagaccagaagttggctactcttcgccaataaggataccaactttaaatgtccaaggcattctcttaagcacttgctgaaacaagatctcatcgttaaaagagaaccctgcaaaaattgcacatcccacctttctttccttttccaaatcctactaaacacatttttaataaacttatcattacatttgcgtggagctaacatcctaccaacaaaggacaattttcccacagtcaccctaggctcagtacactcccatttctccttatcagattccacaaccattgtcaacatatttttactattcacagtctcctctaaattcttttttgagttatccgaaatcactatgacaatactataaaaccactccaaaccacaaacaattcacgcaagcaatagtcctaagaccaccatgtaacaccaatgtctacgacacacaaagagaaaaaaacgttttcaaacatttaatggatttaacttttttttttgaaagaagtgttctttattaagtcgagcaatcgctctcaagaatagacatcaaatccataggaacactattaatagaaaacatgcgttcagc

SEQ ID NO: 112553 - DNA, 2283 bp, Cannabis sativa
gaaaataaattattatgcacatttttttttttttggaagaaaggaaaaattttatttattatgcacatatattgtaataaaattatataatgtatacattagtataaattgcccttaaaataaactaggttattattttatttttctaataaatgtgattatgaaaaaagataccttcttagacaacaattgccatgcataaatcataattacagaatactcgcttataattaaatttaatgaccatgtgatttattaagaaatacatatatatcgatcacacagtcacgcgggtttggttgggcgccagcccagtgtttgataaaaaatttccacgtgacttaaaaaaataatccaagcaataatttatagttacttgtacttttccttacgaaaaaaacaaaaaaaaatcaaaaacacaattattttatttctgacctgtattattattataatggtactataattattaactgataactgtggcttttcacttcttgcgaaaattctaggttagagcaaaatgaataagaaaaatgtttcaattgtgaaactgaaagacatgcatggaaaatttagacgatttggaataatgcaatcgattaacatagctaggtacgagacctaaatctctatgatatttaaaaagtctcaattggtgtgctttctattttttattttaatttttattttaaggaaatagtgcccctattattagtaagtgaaaactatcgttacatcttctacaatgatgatatattcttaaccaatgcaataatacaaatatattttaaaaaagactaactaaaaacatgtccatatattttatatttttcctttaccattatttatttatacaactaatatatatcacaatgtgtgttttttttgcttccccttttttctggttggtgcagatcaatctgaatatgctgaatgtgattgttagtgaatcatatataaacccactagcaagatgcaagtctctctctctttctttctttctttcttttatttatttattattatttatttttttgatgaattattattttatattatttatagttaaatgatgggtcgtacgtacatctttcatcatcaatctataagtgcgtaaattattcaattaatttcacaaaatctcaccatattagtctgggccccttaaatatctctaggttgttctttgcctggaatctgtattagcttctttatgtcctcgtgctctgaaccaatttaataaggaattatttttcattttgtcaatatatatatagaaatataaatataaatttatatattgtatcaatttattcccaagcagaaaaaatattgtatccatttataaagaatatgtactcctagtcctagcaaatatagctgtctttcttcgtttcgtcaatattctatttagttgatatcaaataattctgggaaaaaaatatatacaaataatacaatgttttgtttggtccatatacaatgtttttttttttttgaaaggtaaacgaaaaatatcaaatgtaatatcgctcaatgttaacttatattaatgtactaaataaaagtttctttattaatgtcactttactatttcttgtaatattaattccttttattttaacttttattattctaatttactataactaagaatggctaagtttgaggaatattttttctttttgtatttattaataaaaaatatttttatattttattttattaaaatatacacacttttataagagagttgtcaaatatactcaatgagtataatagaggcatcacctataaaagtggccaatatctaaataatatagaaagaaaaggtaaatattaaaataaataaagtaaattggatatacaatgtaattttctcaactaagaatgtgctacttaagggtaatatttctcttttaaattttcttctctttaaattaagagaaaatttaaaagagaaacttacaaaaatattgtaaaatgaagaaaagtttacaaaaatagtatgatatagaattttttacatttttactgtaccaattttataaatatattgtgtttaaagttttaaaattataaaaaatatcgtgtttcagtaaaataactaaaaaataacctaagaacaacttagcgaacaatatgaaaacatctataaaacaacaaatataactacaaaacaatagaaaaatatcaaaatattgacctaattacaataagcaaaataatatcaactcctcaatatttaatatatttttgtattacgattcttttacttag

SEQ ID NO: 112554 - DNA, 2124 bp, Cannabis sativa
tctaatagcagcagagagaaagaagaatttggagcatttatctccatccttaagccactcaattctcgccctttgtttccagtaaacagctttcctggtccttacttcactcaggttccgtctgacgtcacactctaagctccaatctctagagccagcaggcaacatacaagaagaagataaacatggagaaagatgataggaaataggatgatcatggagagagaacgtgtatgttttgggtctcatctttatcatcatcatcatcatcatcaattttaagtaaaaataaataaataaaaaaacttgtgacaaagcataatcaaattaaaattgtatatacataaattaaataaaaagcatgtaagtttatatatatctgtatcaatacttttatttaaaaaacttttatatcaacatcaaactttttgtcatttctcaaaacatgaccaaaaaatatttaataaaagacagtatactaccatataaaacttaaagaaatacacagtaaaaaaattaaaaaatactgtttgacagtatttttgtaataaataggaaaaagtcagtatattgtgtaatttttccttctttaattaactaaaaatttacatacggtatttaaattattttaagtataataattaaaatatatttaattatgagtataataaataaaaactttaaagaataatcaaatatataataatattaaattccattatctaattacttattaataatattatttgaatttattataaaataaaattctattaggaggattattgaaaagtttattaagaaatttaaaatttatatatttattaaaaaatttaaattttatacgattaatgtatatattaaattttgaatttttctattaaaaatattattaatataaaaatacataaatagggcggtgtagacaaaaattagaatgttattatatttaagtaaacacttttttttcatgatgtattttctttatatttcgatcattcaaagtcattattattgtatatcactcgttgttattactgtatgtcacttgtataatggctacgattgttctccctgataggtttaaacactcctcataatgtatcactttcatatctcaatcattcaaaattattgtcattattgtatattactcgttgtcattaccgtatctcacttgtatagtggccacgattattctccctgatagttttaaacactactcctcataacatatcacctttatatatctcgattattttaaaattattgtcattattatatcttgctcgttatcatcaccgtatctcacttatagagtagtcacaattatttttcctgataagtttactctataataaaataaattaagcaatttattaactatgtatttttatacataattattaaattatttagttataataatagatctaacgaaattgagaaatttatagaaaacgcactatacaatttcaaatctagaaatcaaaaaatcgttatacagtgtacttataattatacttgtgcttaatttatttggactattgattctccttcttagtgaaaaattaatgatcactgaaaggactgagatatagcatacgactaatcagagagaagcaaatgtgtaattctgatttttataataagagatctaaaaaatgaggaatacatattattatgttgcgtggttattataatagctttataacatcatattatcgtcttatgcaacatcctaaaatacaattagtttatatatatatatatacatatattaggttgatattacatgcaatacacgtataattaattttttttaattaggttcaataaggtgttgttaatacaatatatgtatatttaattttttaattagataatgtatttttttttttaatttttgaaatggagtttgagattttgatctttaataattttttttagctattgctattgttgacctcgcttttagccaacaacaatgagtctattttataagcgataaataagatatgataacagatatatcataaagcaataataagacacagggattttatagaggttcagccccgagcagtccggtaatagcctaatcctcgttacttgtattgactt

SEQ ID NO: 112555 - DNA, 947 bp, Cannabis sativa
atattatcgtccatagaagtcgcagaagccgaaactgaaggtccttgagacccaccggaagtaaccggaacttccgccaccggtatagtcttgccgaagagcttgatcgccgggtctttaggctccgacatttgtgctctcatttttacccttttgcgttgtttttagagagagaaagttagagagagagagatctgagtgacacgttggtatgtatgagtttggtcgtcgtcctcgtctggtttgaaaactcttttgttgatccgtctaagcaggtgggggttgccacgtcagctcgaggcacaattctcagccacaaaattcttttgtggccttaaaaagatatctctctttccactttttgattctcttttctttttctttcttttttaaattaaattaaaaaaatgcttggcatatttttgggtttcgatctgagtttttattaatttaaggttatttgacatgttttgtttttttaatttttaattacaatattttattattattttttaattaattttattcttaaaattatatgttgaatttttctttaattttttatagcgatatttattatagttataatattatttttgtaaatttttaaaaaatttcgagtaatttattacgaataccaccatgtaaaaaaaattgaaaaaaatattatagacatgtatttttgggcatagatattaactaaaatattataataggagattgactgtagcactattttttttggcaattctcttttattttatatttttttcttataaatttgaggtgtcctttaaattttattgttcaatactgtgtaaattatcactgtataaatttatgtacatgtaacatgtttttattgatttcgaaattttactatcatgtgtgtatacatgtgcacatagtgataattttaagggaaattacttcatacactatttttt

SEQ ID NO: 112556 - DNA, 1481 bp, Cannabis sativa
  modified_base (34)..(35): a, c, t, g, unknown or other
aaatctgattatatattgaaatgagttttatttnnggcataaaacccaacagaagcttgaaaaggttttggagctactacgacatatgcgagaagtggtttcgtggaggatgaagacgatatttctttttaatgaaatccattagcgatggttttaaagtgtcggctatactgtaggcgacgatttaaaactgtcaactatagtatagtcgacaatttaaaccgtcgcctatagtatcgactatagccgacggttttaaatagtaaaaaatgcttgattggtgacggtttcaaactgtcgcctattccacccgttttgcgacaatcaaataggtggcgattatagaaaccgagaggaatactttacttgactgtttaaaaatgttaggaaaaactagtttttttaatagtgggcagaagatcttacaaagatttagaaaaaaagaactcttggaaacaaccacaagattcattatcttcaatctttcagattcaaacattcgattggtaaataggtaagaaacactagctaaaatgtggaagagagtggaagaaattttccaatagaaatcactcaccaataagatctatatgaagaaaatgatctttggcttcaagatgagtccttccatgtccttaaaatagaatcttgatgagtttttgagaattaacatcgagcttgcaaactcgagagaaaatgaagctttgagaaatgagaattaggccatcatcatattgaattcctcgtcaaaaacatacaaagaagtcaagactgctatcaaacatggaagaacatcaatcaccttgtaagaggtaattttagctctcaaatctaaggatcttgaaatgaagaatgaaagaacaagctcctcaaatggtgaatcaaattacagtcaacgaaagaacaaatacaagaagcattacagaagtacaagccatatttgagaaccaaataaaggccctggtaatggaagaagaaggtctccaacaaagggacctaaagatccaaatggttgttaccattgtagaaagctggtgtaaagtcctaatgattaggcacgctacagtgatcttttaattaatttgcaccccttcgctaatcaaaggattttctcgaaagtcgtgataaattacaaattttgattaacattaaacttttataaatataattttaaaaaaaaggtcaggatcccacttttaaacttatttacatgatcaaataaaccttacaaccttgtcgcacaatgactacaaaataagcctaagtcatcccgagaccgaactctctagttcgtaccatcttgacatgtacaatcatccttgagctccaaactcattgttgtttagccttggcctttcctttacttacacatgcaagtaataactgtgagtcgacaaactcagtaagaaaagcatatagcatacaatatatccccaacttgtatctaggcgctcacacacctatacacaaggcttaacaga

SEQ ID NO: 112557 - DNA, 4597 bp, Cannabis sativa
ttttttgttgttattttaatgttatttagatgttatttttatattacttttatataattttcttgttgttttcgagttgttttcgagttgtttttatggaaaaccgtaaaaatgtaaagggaccattggtgatgagaggtggcagcatcaattgcaaaggacaacattaacgtgtgtgatgacaatattgccctcgtgcggaggcagtgccatgaatgaaggtacagctaaaagtaagtgaaataaaaaagttgattatgaaaaagagagttaatcataaggggtagtatagtcaaacccttacaaagtggtacaaaaaataataaaaaaatctacatagacagtggagaatacaaaacaaaacaaagtgttatgcttttccgaatattccatagcttaccttccttgtgaggtattaatcacaaaaaatgaccacttcttttttttttttgttctttctcattcataaagactaggtaaggattgcacacgtgccacctaccaaatattagtttaatttcttttaaaattattatgactacctttactttttttaagagatagttaaatttttttttagatagtgataaagattattattggaatttatcattgtgacatcggtcattgaattaagatagtttcttaaataaatactattaaactataaactgcaaaattaagaaagcaacatgagacaaaattatttttaaaaatttagacaataaacatataacgtcttcaaacagcacaacaaaaaaattaaaacttcagcttataatattaaaaaactacatcaaacatcacaaaacaaataccaaaaaataaattatattagaatagtaatatacaaacaaagtaatatatcaataaaaaactaaattctcatattctatcacttgatgaaatataatatatcaataaaataccaattaatgaaaacaattaaaaatctttggctagtaacaacgtattatcacctaactatttctaattctaacccaccaaaattcaataatcataccacattaattcataaaacaagataatttttaaattattattaaggagtatattgtttccaaaaacataaagtgatttttcaatattcctatcttaaagactaatcaatttaatatttaatccaatacatcataccctcccattaaaaaaatatatattgcatttataaaatcaaaaagtagcttaaataggcttctagagttttctattggtatgtgtaccaaacctcctgtactgttcatggcgtctctagtccacccaaaaatgtattgtggtggttatcttcctccactaatctctaatcgatccctcttcccttttcattataatctttctcacaattatttcagcattaattgctctgaggatcttactgttcctctatatcatctcaatatattttggcaggactttccattttcttaagccaaattgttccatctggcctttctctctccttttttcatcttctgaacattattacccccgtccgtcgctttgatcttggcaaaatggaggcaaagatccagaaactcgaggctaaccatgctcctttcatcatttctcctacttcccctacgatattggatgggactcgaagatccttcaagagaataaatagggctttctggtttttcctatttaaagaatgtctaatgcatcaaactcttcatcctcatcttttctttgcttctatggttgagttgtttccgttcttctcaaatttaactatggatgactttctaactaatgttttgaattctttagctttaaccactgaggaaaatacagtttatacttatgatgtgggttctactgagtctcatgttgctattagtctccttcttaggttacacactattagacactttaaccgttcctctctcatgaaaactctatctaaaatctggtcatcgcaatgttgattccctgttattgtctctgaacatgctaatggcttgtttcttattacctttgggtatgagggtgataagggtaggatcttagagggctagccttggtattttgctcaaactataactatttttgctgctcctgacagttctttccccattacccctaatcaacttcattatgttccattttggattcagatttatgggatcccttttatgtgtaagtcttatgaattagccaaatttattgcttcaaaagtaggggatcttattgaagtagatcagtctactattaaggagggtattgggccctatttgaggattagaatgttgttggatattaatttgcctattaggagagggatgaatgttaggtttataaagatggggagggaaatcattaaatggatcgattttaagtatgagagattgcctaatttctgttatttttttttttttggaaagcttgatcatacaaggaaatattgacatgcctatttacaaaagtatgatgagtgccttgcccctccaccttgtccctttactattcttcttcgaggaaagggaaaaatcactaataaacctattccctttcaatatccccacctccctactatctctgttgcccacatgaactatagtggtcttaaccttgcttcttcgatgatcaatcctcaagctatccagtttccttctttgttccacaatagaatgcatgctgaaaatcagctcaatgtccctccttcatccaatgaagttatgattcccacacccgttaaccctaatacccagaatttgcttccttctgctggtaatactggttctgttactaacaggtcctccccagtttatgtctcttatccgacgaattctgtcattattgctgaccagtctagcaagactatttctgggggtatattatatactcaatctgttgctgatgttgctctagaatctgctcaagagatgattcttcgaggttcttctatttctggtactattgttgaccatcaggttggtcaacctgattcttctgtgcgaggtaaaggccttgattttgcttcaggagtgaagcgtgcttcttttcaatcccaccaagcttctcttggtggctctcttcgttctatgctcaaacaagctcatgccaatgatcgtgatgatggaccttattttgcttccctttctttggaataggcgggtgatgctgagcacacctacctagaaaaataactcttattagctggaatgcacagggattaggtagtaagcgtgcattcagaagactctccctcatggtgaagaagcacaaaccttcagttctttttttttatggagactcgtttgccaccttgtgcaatggatcgatttaggctttctttgagtttgaagtccctaggaaacattatgtattagttagttaagtgtgttcttatgcttttattccaaattaatttaacatcttacaaacaacatgtcccatcattcaaaattaacaaatatactagaattcaaaactcaccattgttgagtgagctttgagttttaaaactccaaactcactcaactcaactacagcaacaaataactaactaaaatcaatcacaaccatcttaaacaaagattaaaaataccattaacacataataatctatacagaataaaaaatcatcaattttaaacttaagaactaagcttttcttccaaaactttaaagagaaagataaagctagggttaccttaattctttccatcaactcctagttgtattccttggtgaattgatggaaaaaaatgagaacccaacttggttcttggtctcttctaaggtcaaaggtagatagagaaagagatgatgttgtttcttaatttttcttttatctaaggataagaacacacttaactaactaatacattggtttaattcaacttaaaagaaatggaataaaagataaggactgagtaattaacctaaaggttatttcactaaagacaaaattctcaaaatacaaaactatcctttatcaaaacttaaaaagatctctaacctaggggtaaattagtcataaccaattatcccaaaaaaaaccctgatacataacacatcaagcccaataaaataatcggtaccataaactaataccattgtggcatttctagccaccgatcgggtctccacagttttcggacctaaaaatattttattttaagaataatatatataatacccatatattcaaataaattctccgtaattaataaattatgcttatatactcatttttactaaatttcttattataatataattagcttaataagattataatcttattcattatactacaattactcccatattctcatatcttaataaaatatgcaattatatattattatatttttgagatattacataatctatatatattattttgagattcttgggcttatggtttatattagataaaaacttttttaacaaattccacctccatttttataactctaatatgaaccataaaaaccaacatttataacactatatatataggatatatagtatcataaattaaaagagaaataacttgagttacacggtaataaagtttgagaaaatagaattggttttcactccttattctctctctctctctctc

SEQ ID NO: 112558 - DNA, 1458 bp, Cannabis sativa
  modified_base (1336)..(1338): a, c, t, g, unknown or other
acaataaaaatgtaaccattgaaacatcttccatatatatatatatttggaaagttagaaacatatgtattttcttaggataaaactgtattgggccaatagctatactcttcgtaattaaaaaaaaggtgtctataacaggagttactaattaaacagggattaatggggaaaagcaaaagaacttggtctggttctttcaaatattatttgattgtaatggtgtttagaagctgctgatttagcaattgtgtatcttcttgttagttctatatatatacttcttattcataaaaaaaaaagtacatttcaaattaatctattgtctatttttatttcacattattggttaagtaaataatgttgttttacgttatatatatacataaatacagttgatttctgagatgtgagaactcagactgagagatgaggtttggccaaacaccaaccaacaacgtactggaaaagaaagtaggcgcccacacaccacactgctcattactcactcatcacatactacatacaaattattacattctataatattgagaaggctgtccccaccaacctcaacttcaactacaataacaaactatatatatagtgccattactcacatcatcactagctaaactagctactatatatataaaaaaaaaaagaaagagatctatgtgtgggtaagtagtgctaagtacaataaatgctgttactctactcccaactttcgattctttattaacttattgcttttgattgacaccacttattaatttatatattgatcaaatctgaattataaatatttaccattttactatacatataaacacacaaacacacaattttattattttaattgaagcaattgtgacttgtttgtgatattttatcatgaactgttcatgacgtacaacataaattaattaataacaatgataatataattttttatgtatacgtcaaatataaattttatagtacggaatgcgtttattaaatttaaaatattaaatgtttatcttgaattataaaatttacagaattgcattctattaatttttttttgtacggtaaaagtctttcttaaactatagcaattatagcaaatatgtctttttattacactttctttatttttaaacgatttattgatacaacactgatgtgttgctaatatggtatgattgaggagtctttgcaaaaaatacaaacatagattgtgctataaagaaaaaatttaagaatattttaagagttcattttttttatatttagcatcaataaattaaaggctaattaggatttttacctcctaaactttaacatgtannnaatcatgccccctaaacttttctggccgttacaaattccccttgaacattgagattgttagatttaagaactttagtataatttcatttaattttactatttcagtgattgtttatgtac

SEQ ID NO: 112559 - DNA, 3115 bp, Cannabis sativa
  modified_base (2843)..(2843): a, c, t, g, unknown or other
ttcgatccttaaattatagtgcatatatgtttgattaattccgcactttatacttaaacatatatatttcagtttgtacatataaatgtctaacaataacctccactaaatccaaaaggttcgtattacaatctctagttcacgtacaattaggaattgaatacaatctttacaataattagtaatgtattaccaacaataaccaagattcttggttgtacacacaagatttcttgtgtagcagttaagttcttcttcgacatttttcttcaatctgaaatcccttcagatttgatgacgaagatgacactgaactcccttcagtctgaactcagcaccaccaggctctgatctttctgctatggatatccatcaccaaggtatacaatcaaacttgaaatacaacgacaaactatacaagataccacaatacagctcgataaatctaaactaaccaagattatcaattagctagctaacccactatagaatgaaactagctatttatactgtagttcaaccgacctaagagcaatttaggccaactgttaaaatataacagactcatgtggacattaacagaatactgatatgcagttataacagattaatgccacagataagactggactcactattaaaataatctgtcaaaacaatgaaccttacaatataatatgtataaaaattataaataaatttggtggagcattctctcaaacgccctgtcaattcgttccattttggctgaaggattacacattgaggaagtttcttgtcctatttgtaataagggagagaaaacaatagaacatcttttcctatattgcaactttacttttcacctttggaggtcttcaccctagggtgttttttctattttagaatctggaacctgtgtttggaattgggttaagttcttgtgggatcttaaagctagagttgtggatgtacaagggttgttcctttatgctttatggcagatacgatatggaaagcccgtaacgacaaagtacacaataattctatatgtaataccaaacattatattgactatatcgatatgtgtaacgctgattatggttcttgtctattgacttctccaaaaataactacgtcccctgcttggtcccctcctctggaagactgggtcaaaatcaactgtgatgttaaagttagttggggctcaatgtgcgtggtagctttagctagggatcacacggagtctatcctgtgggtggctataccaatcattactcaacttctctgaccctctaattggcttgtttgttagctttaaattggtggtatctttgaagaatacttttgtgttgattgagagtgactctaagatggttatcaatgcgctgaaggaaaattattctaattgggatattgataactgtgtgattcaatgtaaaaatatctcgaagattttgttaagttgtaatttctcttttatttctagacagtataattatgtggctcataatttggctaagtggattttcgccgaaaatataactggtatggtagatctctccaatatactagataacattttatgtaatgacggtaattttgtgatattaatctaaaaactctttttattaaaaaaacaattagtataataaacaaaagattattttgtgtgtaacttaagagatatttaaagtttaatagttgattatagtaattaaaattttggtattttaatttatattatagtgtaatttcgcatacaaaatatacttttctgaaaaatattattttttcaatttttaaaaatattgaaaaagcattttcaatttcattgattctgagaaagttccaaggaaaccatctgatacaaatggtctcaagatggcaacattgatgctgccaaaaatcgtgcttcgagtttgattgggataggcactgttgttcttgattccagaattcgtgtgtatacttcatggttgttttgtttcaagccacaacaaatagaagctaaagcattattagccttaaataggccacaattgcagcttcctatcacacatattgaattagattttttaatggtctccactgatatcaactcagtgaagttagcagttcacatacaagaaggacattcaatttgagtgctaatggtcttaccaatcatggtttagagtttgatgaatattgtcaatggttagaggatattctaaaaaaataactttgaaagatatctcaaatttaaaatgataagattttaattagcatatacatgtgtaatcgtatggtttaatttttttagtatgttttgtatcagccataggttcaagatgatgtgtccttttttactttagacgcccaatatttaatgagtcatatgatgagctcgttgatttatactgataagagggaatgagatttagatattattaaagatctttttaacaagtgcgattaacaacatattttgatgtttctattgagtctgaatgtagctgaggatcattttatctggtctaaggtgcatcatgatttctactcggtgcgtagtgcatacaagttgatgcaaactcaaaaagaaaatttgattgcagttaattctactaggttctggaacaagttctggaatttgaaggtaccactaaaagccctcaatttggtacgacgggctgcttcaaattgtttgcccaccttaactcaattaagtgttaagagggtcctagttcaaatcatatgtctggattgtcaaagaggtgagaaaactatttttcatgcgcttatttcctgttcattcgctgctcaatgctggttagaggtgttcgcggtgcgggtggtgcgatttttgactattttttcaaacnaacccgcacatgcggttttttcaatttctcaaaccgcacctgcaccgcgaaactaaaaaactgcaaaaaccgcaccgcaaaaaatagtgtcgtgcggtttttgtaatttggactatcactaaataattaaactatcacaaatacaaaaaaaaattggagcaacacttgtcaaaaatatcatagtgcttaaaaataaatatgaaaaaaaagtttcaagtttcaacaatataataattagtgggcttaggttgggccttcacatattggaccta

SEQ ID NO: 112560 - DNA, 1873 bp, Cannabis sativa
tagacgaaaagatttaagttgataataacaaaagttaattaaatgacaaaactttaatatctgtaggaggatcgatttaataatctactgtcttcaaatcaaacatccaaactaaacgaaaaaaaaagttccacttaacatattactagagcagatatcaaaaggaaaactaccgaattgcaaacaaacaatcttcaagtacactttaaaaatgcaaacaaaaaactcaaataccatttcagtatttccttccagggccgccaccaccacctcggccaaaaccttgggtgggaatgacaacctgtggctcaacttcagtaagcccaggaaggtctgacataccaagagcggcaagcatatcaatggtctctttgtcaaccttgatttcatcagtcttgatagctgactcgtcggggacaaagtccatacgcctctcacgctcctcttcttgaagcttcagtgagatgcccctgactggacccttctggatcctcttcattaagtgagtggagaacccggcaatcttattcctcagcctctttgtggggataagggcaacctcttccaagatctttttatttgtgtgaaaatccaaggtcatgcgagagtagtatctctcgatcacctggcgagaggacttcttcacagtcttagtacgaacacgacccattttagagaattacaagcaacctctgcagctaaattacaatggaaaaaaaaaagtgaataaggaattatgttacataggatcgatcaacagaaaaaaaaaaaaaggcaagagtttaaacaaaactgagaaacaagtgtccttttctatattcaaacaacttatttcaaaaataagatcatgatctcaaaatactacaactaatgaagtaatgtattatatataccaaaattttcgataagtatttagcgatgaaacaagaggatatcagcatacaacattatcagtgagcaatattcccaaaactacagagataatttgaagccaaggaaaaacaactctcacaggatgcaatatgtattataagtacagttcttaacaacataattaggaaaaaaaaattcacatagtgacttcatcaaaaagcatatatatatatgaactcagaaaacattattctacaaactatatagaaccactaattacaagatacacattttattcacaacttcaattctttttcaacttatttcagaatggacaaattaaacaaaaccaaacatttaacaatagatccaagcaaaaatctgaaacatctacaaaatcaaaaagaacaacctgaaaccctaaaaagcacaagtgaaagtgttcagcaaacgaagacgaacatgccaaataataaaacgcataaatgagtcgcttcacgagatgaaaacatataaaataagatgcaacctattcgactagtttgattaccgagagaatgtattgtgaaagaaaagaaaagtgtggagcgtcaacaggtaaggaaggaagagagcttacaagcaaacgagggaagagatgaaatcgcagaatgggagcgccggactgaaggtgaagaattgggagagagggatgcgttaaatatgaagacttattagggtttccgtaaggagggctccacgaacacacactatcatcacttttcggtagcccgctcaccaccactttgggccaagtctctgggctggatccaatgtgaaagcccacacaatcaaaatgaaaagcttacttttttttatcttttttttaactaatttgtgtaattgtgttataattttttttgataaattaaagggataattcattacatgttatttttctattagggtccgtttggtacacaggattgaattggattggattagaaaggattggattgga

SEQ ID NO: 112561 - DNA, 2740 bp, Cannabis sativa
  modified_base (2679)..(2715): a, c, t, g, unknown or other
tatgtcttcaagagcacactgttcaatacaatcaatggtatttgactctttggccaactctttcttctttagccgaaatcttattaaaatcccccattatcacccatttttcatttgttttatacccctgcaaagatttccataaggccttcctaccatatctatcattaaaagcatagatcatggtaataaaacaagtgaagtgattccccacagtttggacatataaaggcattgtttgacttgtacaattaaggatgttcacctgaaacacattaggattccatgccaatatgattctacctcctccatgccaaggaagatttgatgaaaagcaccagcctgcaaaattgtttgagtacaaagcccccaaattgcgagctttgacccttgtctcgagaagccctactagccctacactattagacaaaataaaatgctttatttgtccctgcttgtgtataccattggctcctcgaacattccaacaaaggatcctatccatttgcaaaggagggtcctcccctctcctttgtgctaccattctgttgcaatacatcctgtgtctccaatatgtcacctattgcatcatgttcactgtcttccaaggtctgaaaagtgttatcagtttgtgttacctgactcttctcggcttgtgcaacttttttccctttcaccacttgctgaaatccttcatgatcaacttttggagcctgctgcctcttgtcctccttaactacccattgtttctttgtttcccccttctttctacattcctctgctacatgccccaaaccgaagcaatgactgcattttgttggtttctactcaaagtgaatcccaacatgagtattgcagccattctcatcttcaaattcaagcgtatcaggtaaatctatgtccatagcaacttcaatcaacaccctaggatagcttagtctttccctattcttggtcactacatccaccatgattggccttccaacttggccaataatcttgaagagagatctctgcccccagtatttcagatccaactcttgcaattgtacccaaattggcaccatccgtgtgtcctctttcctgaagttagtacggggtcccatgatttcataacaacaagccgtttattaaagaagatatatcctccattgaggatctcatctctaatggcaatactatgaaatctgattatgaatattcaatgagataaagcttttaccttgtctattttgtccttccagatcctgtgtgcaaagccttcaaggatgtgtaagggagggttcgagcctaacacatatcagacgatcgaaggtgtccagaaatctatctcctcctcaatgacttccatcgtgattttcactctgttcgaatgctcatttttagccagatgaaaataattatccaagctcctaatcacagagcccgatcgcagcacaggtggtgtcgagtgaatcccctgcctaaggttactattacgttgaatattagcttccaagaacattccaaaatcctttcgaacctcctcctgcttcataatacttctcagtgatgcatcaggggacagaggaggctgaaatacatcaactagtaacggatccgaagcttgttcttctctaagttcatcctctttttctgaaaactcaattggttcgattccacttaccgcatctccatctgtaactttcctagcgattccaaagttctgcatccctttcttcctcagatttttagtgccagattttttctttccaatccccttcgatctagtttttgccatggctacagctgcaagagctgaaaacctagagagaaaaagcgagaaagctaaaattctatattttaacatttttaatatatataatacatattaaacagaggatgagatgctgttttggaaaccgtccattgtctgctatgtgcttggcaagaacccgccattgcacatcttggaaggttttgcaaaaagagtatggaaggacaagattgatcgtgtgaaaatgttatcttatggtatctttatcatccgtttcaattctatgatgggtagggatcaagttcttaatgggggatatatattcttcaatagaagaccagtgacattgaagccgtgggatcctaatgtgaatttcaagatagaagatgtgaagtgtgttccaatatggatccagcttgaagacttaaaccttaaatattggggacaaagatcattgttcaaaattgtggggcaactgggtaacccggttatggttgactcagttacaaaggaaagagatatgttgaactaccttagaattctaattgaagtaaggatggatcaacattttcctgacttgctagaatttgagaatgaacatggatgtaatgtccatgttggggtaaaatatgagtggaagcctatcgtttgcaaccattgttctggtttagggcatctaacagaggattgcaagaaagatgctaaaggcaaacaagagtggattgttaaggaagatcataggaagaagaagatagtagatgaagatggttgcatggaagtaactaaggggagcaaaccagtagagaaaacaaagacaacagaagccctaaaggttaacaatgcttttcagatcctagatgaggattctgggcagcaggatatggaagttaatgcaacagaagactgttgggttttgtgccctnnnnnnnnnnnnnnnnnnnnnnnnnnnnnnnnnnnnntaataaagatcagaaatcattttat

SEQ ID NO: 112562 - DNA, 2073 bp, Cannabis sativa
aaaaaaaaaaaaaaaaaaacaattatcaaaaaaaaaaaaaaaaagaaaaagaaaactgttatatataacaactaaagttgtgatataacagtacgtaattgagggagagtatcattcatccgaaaacaatttgtgtacgtagattgtctctactaaaagagtatactgctaatttataaatattaacattatgcatttgaaagttatttatttatttttttttttaaaaataaagtgatagattaatcggaaaattagacctcacggtcattacaaatgatagtctttggtatcgaggaaacctccacgaaacctgaaatgttttggggcagcgtccatttagccacattatggggagcaaagttacaacatctaaaaataaaagaaaaattacaagataaaaaacacttagagagttgattacaaacagagacataattatcaatattccaaaaatatgtttattaattattatatgtatagtgatatcatcaatttaattatatatacatttatgggacaatatatgttttttacgagacaaaatattagccttatagtattttcttttaagccttatagtctctttttggttctatccagattaggaaattgatgatgtgtagtaagttcatgcacacaaatatattgtaaaaaggaaaaatagacaaaagagaaaaaggaaaaagataggaaaggtgtgtatcataatcatgaatcatgactacatatatgtatagttttttttttcttagatatatatatatttatatatatatatgtatagttagttgaatgaatcacaatgggaatatataagataaaaacaagattacaactatatatagtggaatatctactcactatacatatcttctttcggtttatcattttgattccacttttttgttttgtttatttgtttattttaaatgatctaccggtttatcatagtttcatgcattttctatttcctttttctgatcgacagaaaaagattaggaaaaaagttcaaacacttatcactctgtcggtttatgggtcagttattattccaaccaatttatatatttatatatggatatcaaaaaaattgccccgaaactatgatgcactatttttttttttagagaaaaatgttattatattaaaaccatagtcaaaatacaataagcattagcggaggagacatttcctccaaccaaatacaaatagagtccatcgaaagagcatacttagctaaaacatgagcaacagtattcgcagatctgttgacatgattgatctgcactctagagaaattagacgctaaatgagtaatattagttaacaagctatgaaagtcaaaaatggaggcttgaaaagattgtagccccttaaccacaagcaaaaagtctgtttcaatgtagtgcattggtaggtggtgatccttaagccattgtagagcgtacatttggctttgtaccatgaagttccttgtttctctcagtccaaatacaccaaaaagttgtgataaattgctccaattgtaggtcattccatgtattagcatcagtgattagtaattctttgagactcatatggtgtgacagtaggttactttgagagagtgtggaattttgccaaactttctcgggccttttgcagagaaaaagtgcatgaatggtagttcctttgtgacaatgacataaggaacagttaggcagatcaacaatgtgtcgatggtgaaggattgcagccacgggtagataatcatgaatcactctccatatgaaaatttgcaccttggaggggacagaagtccccataatttttttccgaaagtgagtagtgtgagagccactaaccgttggattttgttcttccaagtgtgttgctaaaaagtaacccgatttgaaagtgtacatgacatttgattcattattccaaatgtgatgatcagggcggggatacaaagtcaagggtatgctctgctttccacaatggctaattttgacgaatcatcaagctcgcttagtactctttccgcccctcttgcacttacaccccctcctacttgtcgcaaatcaactt

SEQ ID NO: 112563 - DNA, 1219 bp, Cannabis sativa
tatatatataattaaagcagaggctgactctgatgagctacctaccatattctgattatattaatgtatgatgaacagtgataatattggaggagaaggggcatcgtcgtcatcggatgatcttggaaaagacacaaataaaacatttggaatagtaattggtgtggtggctggagtaatagggcttgtgttgataatttggctatgccgtaaatacataaagaaatcttgcacatgtacttgttgtggcttattctcttgtaccatttgtggtgatcgtgattgaaatgtaatatttggcctctatatatatatatatatgttgattcaaggtaaaatcttaatttggaagattttgtattgataattctcttcaacgggtttcacctaatattgaaagagagagagagagttcaatctagttttcctctgcttttccaatgataaccaataaatatcatttaattttaatgtttaaagttctcaacacataggctgtttattcacaacacaaataattaaaaaaagttgtttattttatgatcaaagaccatatgtgtgagcaattgataggctttctcagagggatggtaactgtcccaaaataggtatgtggaagcatcattgcaactctgtttagtgaaagggttgcatagaatgctcacctctatattccctgtcccacaacaccccttattcgccacttcaagtcctgaaattaattaaacactttaagtaattaataatgtcataattactgttaatattctaacaatacatacattaatattagcaaagggcgtaccataagtagcagggttttggatgagagtaagcaatggattataaatatcaaggtagagaagtgttgcttgtggaagtttgttattgagtgaagtcaataaggaagagagcttggagttgaagagaattgctgcttggttgccttgctcattacatcctcttgatatgtctccactcagtgttctctgggatggcacacacccgattggaggtatactcactactcctattcttcttgctccttccttgtacagatcctatacatataattaaagtcttactttcaatattgttatttatttttttttaaaaaaaaaacaaacaaaattaactctataatctgtattagtacttaattatagatagttgttgctgttataatattttttaaaaaaataatgcaatagcgaatttg

SEQ ID NO: 112564 - DNA, 2131 bp, Cannabis sativa
ggacagtaaaaatgtaaagtttgccgtgtcccagtatttttgaaaacatttggtaaaaaaacagtatttttgtaagtttccctttaataaaatcttctttctccaacaaaaaaacaaagggtagacatttagtaatttttactgcacatcatgatgcagaagaaaaagaaatggtttgcataatcaaagcctatgaacaatgaaggagactaaaacatagaaattggttttaatcgaataagcattcttaatatagagaacagaaccaaaaaaaaaaggaagagtggttaaaacaacccacaacctccgaacaaacagaaggagaaaaaaagaccataatgaagggactcgggaataggttaatgcacatacagacatacctaaatgcatactcaactcgagtaacttggccatataatttaaattcgtaactacatggagtcgtctatatgcaatctgaaactcataacaataaactcacaaattctgctttaccactacaaaactacaaatatattaatcaaatcacctcaagatcaatcttggctccatcaatatgttctcttgaattctcccaattttttttttacccttaattattttgcatcaattcatttttactttctgagaagcaagtaactctagcaaattgctatgtaggttttctcacataaccgtggtggggaatattttactataacaaaatcatcatcttaccctctatttaatgattatgctataatacaacaaatgtaccattcattatcttattcctacttcattgaatcataattctcatctctgctataccaggaattgaaccccaaaaaaaaaaaattaactttgccaatttattatgaacaaaatcacaagcaaaaaaagatagaagagataatgttctagaaaaattattcacactccttccaccatacaaatatagattgtcataatgatttcaacatcattatctaacagaccagaaaacccattaatataataaaaaaatatataatattgacgtatattgaaaaggactaaccaataagagaagaattgagagggtcgagaaactcagagaattcaatctcttccaatgctttcaatacatcatccccacttatagtctgcctctttgactccttgcatatatcatttgccctaaatcagaaccaaaaaaaaaaaaatcatatttagaaaatggaataatttaagtcaaaaaacgattaaatctttcttttccttaaaataaactgaaattaggtgaagaagaagattacgttgcggaaaggtagtggatgaagatgcgagcgctttcggagaaagcaaggagagcatctttgtggacattaaagtcggtatcatcggcgcagtgagacaacttatccttcaccactcggcgcacgatagctttcggcagctcctccgtctccgccactgctttctccatctctctctctctctcttctttctctctctagattctaacaaaattctcaagggactctcttctttggtttagcttcccgccatttctacggcttgggcctttaaaggtccagtgggcctcacacctcggctctatctttatagtttttacaaggattttgggttaaacttttcaattttaccgtcacacggcagaaattacatttatactgtctttcttttttcttttcttttatactgtaagaacccaaaaaaaaaaatgagatctccatcttccacagccatagatagaaccaacacagcaataccaggatagtcggaaaacaactattaatttcggagagattaagcaaaaatagtaaaattaacatcaaataaataatcatggcaaaacaattgtaatataacactaaaacaaatcaaaaaataaaataaaaggaaaaaaggattaaaaattctaacaatcttctgcacagctatatttgcaagtcaagtcttgaaaaatcagaataaaaaaacaaaactaaaacaacacaaaaataaatgtaaaacaattaagcagatgtaaccacttagaaaaacataaacgaaccacacaccacaaaatcattttgtcagtgagctcatcaaatgtatttataggagaaaaaaaaaaaaaaaaaaaaaaccccacaaaaaaaaaaaa

SEQ ID NO: 112565 - DNA, 6810 bp, Cannabis sativa
  modified_base (6725)..(6732): a, c, t, g, unknown or other
tttttagttgttttgttttgtattttactattgttttataaaaatacagtatttttgaaaaaatttatgtatgacagtatttttgtaaaaattaattcattctagtattttgtaagttttttaaaaaaaaagtataagagacgccaaaatggaaaacaaattatttttctttctgcatctgggcttcagaactggcccagcaacatttaagaatgggccctataaatttgtagcgggccaagtcgggttgacccgacccatccgaattgacaagcatgtcttcacagtaagtcatagtatatattcaagaaaaaccctagttgttgtctgcctccaagagctaactccatttttagtttagggttttcttcgcacaagatctcaaccatcatcaaccatggtaatctcatttctctctcacagacttctgtaaatgtatttgcattttcatttattaattattttgattttaccatgatgcagcctccgaagaagaccggaaaggcctcggcactatcgaagaagaaacctgtaattttcagtattccatttttgttttcattcctttacctttttgtatttgagcgtttagttagctctaaatttagtgctgaacagtgtgtgattgcgaatcttaattatgtgtgttgttgtgaaacaggagaaggttgtgaacccactgtttgagaagcgtcctaaacagttcggtattggaggtgctttgccaccgaagagggatttgcacagatttgtcaaatggcctaaggctgttcaacttcagaggaagaagagaatccttaagcagaggttgaaggttccacctcagttgaaccagttcaccaagactttggacaaaaaccttggtatgaaccggaacaacaacccttttttgttaattttcttcgttatggtctggataagctttgttttttcttttatgagttgggaatgagtataatgataaatatgcagtaaatgtgttactttgttttgtttagaactggaagtgagttattgatattgtatgatggtggaattagtgtgggtattaatgatgactacttggatggtaatcccatgtaaaacaataagactagtgtgtttgatgttgcatattaagtttagggaaattgttgatgttatgttcgtacataacttatatgactctaagtattaattacacaaccttgattatctactgccttttgattgaaattgaaacgatttaagttgaaagacagtatttacggtgttgaaccaactacaggcaaatctgccaagaagtgtaaaacacaaaaattgttcgtatcggatgataaacattgctctataatgctgttgtgtacgttcaacatgaggaactaaaatccttgttctaaatagtgtttttcctagtattagctgtattatgctcaaaatagctatctatatgttgattgtctttccagtgctagagaaaatgaaatgttcaagttattacctttggttcctttgctgaagtgtttaattttcttatttgtactttcaggactgaaatctcacttgcctgttatttttttttggtggcaaaatttcacttgcctgtttactctgaatctctgaccataatattttgctgtactctgtaatggtctccatttttcataatattgtgcagccacaagtctcttcaagttgcttcttaagtacaggcctgaggacaaagccgaaaagaaggaacgtcttgtgaaacgtgctcaagctgaggctgaaggaaaaactgccgagaccaagaagcccattgttgtgaaatacgggctcaaccacgtcacttaccttattgagcaggttgataatctagatattctagtgtattaactgctatctgaaataaactttgttgtggatgcttcattagtaaaatctcacattacataatcccttttatgcttttttcagaacaaagcacaattggtagtgattgcccatgatgtagacccaattgagttggttgtctggctccctgccttgtgcagaaagatggagatcccttactgcatcgtgaagggaaaatcccgtttgggatcggtaatgatctgcttcatctgtatgcttgatgatataaggctttgctttttgatggcatcatctaatcacttctggttttgacagattgttcaccagaagacagctgctgcattgtgtttgaccaccgtgaagaatgaagataagatggagttcagcaaaatcctcgaggctattaaggtaaatcccgaaacacattctatgcttgtaagtttctatcttatttgttaaatcataatgacaattctaattgctttttcaggccaactttaatgacaagtttgacgagttccgaaagaagtggggtggtggcatcatgggaagtaaatcacaagcaaaaacaaaagccaaggaaagagttttggccaaggaagccgcacagagaatgaattaagaagattgagcattttgtgttattgtgagttagtagtttttcttttttcttaaaaaagaccaaggaagagctgtttgaagcacattttgttatgggctgttatagaatatcctgataatctttatttttttttcttatttaccatttgaggaaggaaccttagctctctatgcttttaatctagatatgaattttggtttaatgattcttttctcaaagccataaccaatcgtattttattggtcaagttcttacatctacttttatatagatattgcttttaatagtcaatacattacattccctggaaaatgaaattacacacacaaaagatgtaattaagaaccatttaaaaccaagagaacgtaattgaaccatcctctaggcacagacgcttacaataatattcctggaattattgattttgaagctatgtttcaaactgatatttcgtacgatgcttctccaagtaaggatggcaaaaaaaaaaaaactgggggtctggagcaggttggggatgggccgccgtttttctttttcaaatttagagtttgagttactctggtaatttttatgtgagttgtaatatagattttagttgtgatttaagttactgggttggtatagtgtttttatgtgcatttttgtaaaaataaaataaaaaattgtttgattgaaactgtaatagtaatatatatttttttttaattattataaggatttaaatttttgagttcttgaataattcatattcaatcatgctacttctatcatgactgttatcaagctccttttagtcagattcaagtatttttgtagtatttgtaacaatattgagtattctattattctattatataatatatttaggatatatataattatatttttaaaagtaaatatacaatttttattaatttgttaaattagtcaaaagaaaagattgtatattaatagaaatattgttttggttgaacgtttgatttgaaaaagaacaagatgctataacaaaactattaggacccatgttagcaaattatttaataaaaaagaagaaaacattgtttaaagatacaaaaagtttacgagaatcttttataataaccccaaaagaagaaagcataagtaattaatttcgaataacttatactgctaccaaactatctgactctggctacatttttctgctatggttaagttttaatttagcgtagcgcttcttttatatcaattgattcagccaaattcggagcgcttataccaacaaaactgcacgacttagccatcacgaattccccttgagagtctcgagcgactatgccataaccaaacacaactcgatcacggaaaatggcggcttcaacagttaccttgattgtattctcttgcggcttaacccaaaatttagctccatcaccagcttcaaaaactgaaaaaagaagcctttgaacctttattttgggtcgacttccattgaacaagataagtcataaatgagataagaacaccatccaccgtagtatacttttggttctaaatcaaatcgtttcgagcctcccataacccccaacacaacataacaacttctccacacttgtccatactacacctttgcaaaatttaatcaaatcagctgcaaaaatcagtagcaacaatcggcctatcccccgccaaaagtctctgccagcattgagcaatgaatgaacaggaaataagcgcatgaaaaatagtttcctcacctctttgacaaattgaacacgatttgaactgggaccatcttaccacttaattgagttaaggtgggcaaacaatttgaagcttctcgccataccaaattgagagcttttggtggtaccttcaaattccagagcttgcgccataacccaaaataatcagctgcaatccaatttcatattcaagcttgtatcagcttgtatgcagtacccaccgagtagaaaccatgatgcttcttagacaaaaaaaaaaaaatctttaaaaagattgttaataatatctaaatctcattccctcttatcagtacacatcaacgagctcaccgtatgacccaccaaatattaggcatctaaagtaataaaagaacacacatcatccagaaactatgactgatgtaaaatatcaaccttcacaccaaaatttattgcccaacaaaccccagacttaagaagctcctacgattcgaagacgctcttccacacaaaacttgaattattcacaagggatgctgaaagaaaattacccctggaaaaataacgagccttatataacctattgaccaaagagtttggttttgtcagtaactgccacccttgcattctcaacattgtcaaattaaagtcacaaagattacgaaagctcatttcccccatagttttatgtatactaattctttcctaactcatgtaatgaataccgccaccataagaagaatttaaatgctaccaaaacttactcatagttctctcaaaaacttactcataaaatcaataattaatttactaataagagactttttgctaaaaatatttcttcataaaacttatttgtacaataatatatatttatttttgacaaataatatatcaattaatttaataattagtgactttttgctaaaaaaattcttcataaaatttatttgtagaataatatattgggtaaatactattttagatcctatgttttgtaaaagttaccaatcgaaccctctgttttgttaaatgacaaaatggatcatgtattttttaaaatattacaaataggaccttgaattgattttttgtcaaaataaaacttaataataattcgatctagaggtgttatgacaaaattagttacattatctatatctgttcgtattaagaattatctttaagttggttatattaaaaaattgttaaaaattgagctcagagtcctatttttaccgttttagaaaatacagggtctattttgttagttaacaaaacagatggtccaaacagtaacttttgtaaaatacacgatccaaaatagtatttaccataatatatatagcaattggtggcgaagcccatttttcgtttttatttttagacaatttaccttgttcttttaagagttaactgtttaaaaatgaaaacaaaaagggatttcactgataattatcctaatatatattattaattgtacaatgatatatatttgtgggtgcttttacaatacaccctataaaaatatgtgcaccactggtgcaacccctaactgttttgacatctagaagaatttcttacttcaatttttttatagtcgtatacgttatagttatttgagacatcttgtaaaattttgacaaattcaaaataatttaccatatagaatttaatattcaaaccgtctattttacacgtgtataaaataaaatagttacgtgtgtaacataatgtttgaaccctatttcaaaatgttaatttttttaaaattttttaaaattttgcaggatgtcttaaataactataatgtacgtgaccatgagaaaaaaattgactaaaaaattatttcagataccaaaatagatagagatgtgcattctttttaaaggggtgcatcgtagaactgtctatcataattatttagttttgtaaaaagaaaacaagtatactattgagtgcttctacaatgcacacctctaaaaagatgcaccgatgtactccttatttgtttcggcattcaaaaaaattatctagtctaatttttttccataaccgtgtacgttatagttatttaaaatattatacaaaattctaaaaaattcagaataatttataatatagaaagtagagtttaaacaatctattttatatgtagggctgtaaaaaaaatgatttaatccaataacaaaccgaccgatccaatgtaaaccgttcactaaaaattagatatccagtcataataaaattgaattggatgatatttttaaaaatctaaaattggatcgatatattcttggatgacatataaatccaatagaccaaaccaagtgattcaatctaacaatcgtccaatactatttgatattaaaatagaaaatatatattataaatttataatattaaatatattatattttaaaaactaaaataaagaaaaaaaacaaaaaataaagctgaccaatcaaaaatatattatattttaatacatatataaaaaacatttaaaaaaaaaacaaaacccaatctcatcagatcccccccctctctctctctctctnnnnnnnnctctctctctctctctctcgcgttctcacgcaaaccagacagccctaaccccactcaccggaccacccctcactcacc

SEQ ID NO: 112566 - DNA, 4213 bp, Cannabis sativa
atccaattaaaaaccgatccaatccaattacatttatatatattaaagaattaaaaaaaataaaaaaaaatatacatattaaatattaattatatatttagcgactttttttctgaaatttgtaacacttggttgttctatgtatttattttcatgatgtcttgttatattttacttagaaatattgttgttttaattattttaaacgtttagttacattacgcttgtaaaaatattatttttatagagtattaaacttaaaaattaatggtgatatttatttttttacgtatttatcttcatatttctaagttaatattaaaaattagatgtgtaattggatattcaattaaaaaactaatccagtctaattagtaattggatcggattggattagattttaaggtctaattggattggatcgaatgatatttttcaaatctaattactaattagattgaatcggatgaagaaaaaaatattggattggatcggatatccacccctaactctatatataaatgctaaaatgttgttgttccaagtttcaacccttgaccaccactttgcccaaagttttggttatttatatgaacttaaaaaacgtaaaaagacaaattaattcagaataatgaactataaaaataggtattttgtttagtgttaatttacatattgaagtttcaaactcaattggggatgtagctcagatggtagagcgctcgcttagcatgcgagaggtacggggatcgataccccgcatctccataattgttttacaattttgccttgaattttaaataataggatttggaaaaaaaaaaaaaagtccattaccatgatggattaaattttaaattaatctaatctgtacaaaatacctttttttcatttcttttcactacacttgcaaatgcaatcattgttctataatttcttcttcctctttttacatactacaagataaaataaaaagaatgataaagctagtattatttctctactccgaaaagctcaaacaccttactcgcgtcccattcttagctgcaaagctaaatctggcagttggtgtggaccaacctgagcaactaaactcgatgaacttggcacgccaaaaccaaaatttggctcagttggaaatggatgagaattctgattgtggtgccttgttaacccctggaaagatgcatatcttgcaaaccccatttcagctgatctaaaattggcttcatttgaattggtaccagttataaacacaggactgatagcagtgttgctagctgaggcaccaccaatataagaagcttctgaaatttttgccggagttaaattcaacattgcagtggggggtcttaccatccctgtttggggagtgtacgagatggccctgttatttggaccgttgatgcaaaattgacttgaggaattttgctcaatttggaaatgtgtggttgctggactcatcctgccacagtttgaattcagtgaagtcaattcactttgggtgtttatagtcaaatcatcttgtggaaaccacccttttgcaacaattgaatttgagccagacatactttgaggtagaggaggcctacttgcaaggtcaccatctgcatggtttaccaaccacttcttacaaaataaatatctttcgttatctgatgccgtgttccatccaggactgaacttgacttcaagaggaatgatagcttcaattttctttaaaacaatcttccaaacaacaggcccaagatccgctgcaaattgagctatgcttcttgcataactacgctctaagtaagcatcctctacctattaatattttaggattaaaaaaagagtaaaatgtcacactgtagacataccataattttttctatttcaagtaacaatgacacccaacctttatacaaagtaataaaccaccatttcaccatgagttgttgacaaaaaaagcaaagacatttagcctaaagactaagaaatttcaatcatttctatatcgttccttctctcagcccaacattaaattaagttgtttaccattccaacggtagacaattggaagaaatgtggaagtttagccatttacgtacctcaactaattgcttttgttctccttcaagagcagccaaggcaaacgtcccgcaagcagaagtcaaaggaaaagtataagtatctcgcttattctcatcaatagaaaaatgtttctttccatactttgccacacttctcaataccgaagctgaaaatcaagataaaacaatgcactgtgaatagaagaatagaactaaccaattacaatgtaaaacttagcagaagatatggaataagaacacaaagctattgcaaaagttacctggaaattcgttctcccagtcatacaccaagctattaccggtctcaccactcaaagacgcgtggaaaacctcagcagaatataatttgttgaaatgtgggcctttccttagattgtaagcactgaaaccattgctattctctcctactgaaggatttgttgaatctaaaatcaatttgggaccaacattttcaacagaaatgtcgattgactttttaagttttttgcccggtggcctgcctctccttgcaatttttggctgtggttcagtttcatcgctatcttgcttcagattctcaaagtcctttcgtgcaagctcttggatggatcttgcctggaaaaacaaaaagaaaaagtagaagaaaaaggtccaccttcaggtatatgatcaaataccccaaataagaatcaaaacataagatgaaccaggagaaaacctgtcgaaagtatattgtatcggatgaattatactccattgcatttgaacatattagaaagacgtctttctgcaaaaatttaaatggtaaacctttcaaatttcagtcacgcagcctaaacatatctagttgtacataaagaaccaacacagacctatactaattttgtttttgtttttcattgatattactaacgtgatgagcaaaatcaaatgagcccatacttagattgcagttcattctgtttcttgccccgctttctttccatacacattcaattagtactccaaacattagagagaaggagagaaacaaaacgagctaccaagattattagtgttctagtccattctattatctagtgatgaaatattgttaccatgttctacaccaaaaaaagaaaaaagtgatatagaaattgagtgaattgcaaacacttcactacagaagctaaacaaataatatttgatagaggcaatagaaaaagacagtttgatggaatccaatcagatcagataatttgatagaaataccaataaaagacagattatgccaacaaacaataaccaaatggttaccaacctcaaatagttccaaattagcataaagtccagcatcaagtttctgcctcacagttgcaaagtccattgggttatcaattatttcatgataatcaggaagctgtacaatagataatatagcgatcacgtcaaccaaaaattcaggacaatttttatgatacacaaatacaaagattgaactaaaagcacctcttccggatccacaggctcagagaataccccatgagtgtcctttctgcataacaattcaactaagcaatcaaaattcaaaccccagttaaattcttatatcaaaagatagaaaagagttggaacttaaaaaaacacacttttgaagcctgtcaaggatgaacaccaacaactttttgtctggcaacggtgtcgtgggaccggtctccacctgcaaccctgtccatgtccacatataattgcaattccttatacaaaaaattccccacgagattggttaatagtgaaaattcaatatatacataaataaatatatatatatatatatataccatgtatgctattgtctgtcgctttcaaaacatcatcactctgcaaaattaagattaaatcaatatcagtgaagaaaaaagagcactttacaaatataatcaaacataaatactgttgtttatggccaagagaagaaatttataattaaaaaaaacactaattcaaagtggaaacaggaaaagtaaccagtaaaagagccaccagacgcagaggaggaagtacatacatgtttattaaaaaaaaaataaacaattttatcaaattaattaaatatttagaataatcatgattatatatgtattgattttgaaaaatat

SEQ ID NO: 112567 - DNA, 3824 bp, Cannabis sativa
tctctctctctctctctcagtttgctagagttttctcaaaaaaacctaggcactgccagtcttatttcttcctccagccaagcccgccaactcgagcttgggtgtggctctagtcgggatccttatttggcacgttaggggtaagtgaatggttcaccttaatcttgtatctattttatttctcttagtttcaatctatttatctgatagtcgttgtgtattttttggcctcgtgtgctatggaaaggtgatgatcgacccatatctgatagagcctaccaaaggcagtttggtggttctgggttgggtcgattcttagttttggtagggaaggagattgcgtttggtttatgggatgtgggaggagggtgcggccaggattgtgcttaggttgagaccatgggtatctttgtggcttgttcggatttggtgtgtgggggcttcggggtgtggaaagatccttaggagattgaagttgattggtagatttgtgtctttggtttgccctctttggtgtctttttttagttttttgttgttatttcttgttttaattttttaatagtggtgttttttcaccatcctactagattagtaaggattgttattagcctggtgcaagatgtaagtattgtctactattggtttatgggtgtctcatcgataattccaaattattttggagaggatatcttggtctctctccttggtcgtcagatctaggagatctccagatctttattggccctttgatatatactctaatattttatgattaagcattacaacatggttggtcgtgttatcttccttagttatgatttaaataatggggttgttatgtttcagtttttattggaagatcattggctgatattctttgataggtggattctttcagatatttatttggtttggaagcctagtatactttacacttttttgatgattgaccgttggtgacttattggttccctaattgaggatgttgttagggttttcttccatgttattgtaaacggcttggtatgcctaattttaatgattctgctctttgagctatattttcatgcaatggactttgtccgatttatctattaatggatatttttgtttcgtctaaaaaaaaaattgaacaaggtttgtacacctttgtccaaaagtttactttcccatacaaccaaatacttagggatttatggaaatgattatgggaataaacaagcctcaaaaaatttctagcttagtgtttgaagataaaaaagtaacgtgtcaaatgagtgaaacttagtcctctatttatagtgtaggaagagccaaattttgaaaatcaaatcccatacaccaaatgaaatgtccgtgtaagagagatttgtagagcataaaaatattggctaagaagttggaaatgtcccccattgaatgcacaatattttgtaatgtttatctcaaaaatggctaaggcaacatgttgcttggagcaaaaccttttgaaccctttgagatatgacgtttaacgttgaaaaccatgttatgcactatttaggagacatgtcgcctgaaacatttctttagctcaaatctggagatttgaatctcttcaatgagacaactccaattccaacgttcacatgtgaaatacaatgatgtcatcaatttctaaaaggtaggaactttctccacatgctttcataacctccaaatataattatgcttttaattacttatcatcaggtttgattcatttcttagaaacctatttcagattgtaactccccaaatgttacaactttgtatttattacaccatatataatgtaacttataattttgtagcatctattgtgttataaaatatgtaatttacaataaatattattctcttaataatatataatatattaaaatttaatctcaatattatattatttaattaatttataaataatactatattccttccactagattaaaacttgtggtactttattgtaacacttatttaatcaattaaatattttatatatcccccactttaattgaataaaccaagactttttataaagttcttgtgcataaggtaaagtgtcttttaacttgaacttacatgtgtgagcactcgtccacttatctggagatttgtgggttaacagtgtttaactcactaaaaaaatagatgtagttacctcaagactaactctacaagttttgttcagtgcttgaaagcgtcgtcaggttcgtgagctgcaatcgattaataacaatgaaataccaaaaaactttactcaacactcttattcattagatattaaattcagttacatcactgtgagctaagttgaaagaaaaagaagagtagttgtagacttccattttttatcaaaccttagctgaagtgatccccactacactattgtcttgtttgaataatagtgtaggggtcataccttagcaatggacctccctacctaaagatgacttcatcgcatcttgtcagttcgagaggcaatcgattcacttgcacaagataaagtgaatctcattgtgaagtgaactatctagggaacagttactttgtcgataatatcgtctcaaatgctctcttttccagtaccttaatactggcactggattcaagtggcagtcatagcaaactccaacctatttatctcgggttcaaatgcttttgtgatgatataaggtccctccctctctcattgggagtcttcaatgtcactttctttgtcactatcttcagaagactcataagatacattttccctgttgttcccatgttcctgatcattattggaaacaaaagaagaattttcgtcacttcccccctctcccgagtcatcttgggaagtagggggagagtcttcatcgctactttcttgttcgagatcttcttgagaaatagttatgggaattgtcatcactatatccctgcttgagttcatattgagaaacataagaggagtctgttgtagtgcagatattagttgtttactcacttaaattacacatttatgtttgtgatccataagttacaaaatagttacttttttgaattcttatttatgttacaaaatttagtttataataaattatatgctatacaatttattcaccaaacagtataatatatattattctcttattaacatatatttgtaacattttaatttatattatattgttaaataatataataatgtatataatatacaatactatatatgagagaataatattatatatactagcgtctatatattgagaagaagagaagtgggtatagtgtgcaaaatctttttttggtaatttagatgccaaaatattttttatttatggtgtgatttctttgtgttaataaatcgattttctcaccttaataatatatttttaatgctcttttctatcttaggaaagaattatttttcaactgtcctttttctaagtttggaaacttcttgtaagagaagaaattctcttatgagaagttatctttacatagaaacttagactattgttatttcttcttaatgagttcgattgtgtcttgataagatcagatcaatcacactgtttttggcaggtatcaagtccatatacatgatcggacaccattttggcaagtttcctttcctggtctggtttgctgctacagaacctgtctctaatgctgcaaaataggattttcatttaggaaagtttgtacaactgtgaaatcgactttgtggttgtctctagggttcctatgctctataaatagaatctagagagcagctaatcaattcaactcttctagctttctttttttttt

SEQ ID NO: 112568 - DNA, 3327 bp, Cannabis sativa
atcaacaccaatctgattaataaaaacaggtatttttatcatcagaattttacataacccttctctttttcctctataatgggtaccaagagggaaaaaggaagaagaagttaatagcaaaagttcttctgcaacgggtgtcgaagaatcatattctcacatggttttacgaatttaaaccaaaagattatacatttttttttgggtgttttcttatagcattaagaaatggggttgctatacattttcagtttcaatgaaagttataatctgggaactgaaatcgtgtggtttaccgtttaccgcgttgagtttttgtccctcttttttctctattgtttgttcaaatcgtgtgttgtaacctgtaagaatgatgcttgtaaatggtcatataatgggtttggcttactagccatgaaacaacaggtaacttgggaatatgcttaagttgcatttctcacaaacgaatgtagagtgtaattggagaatcctgtttctgagattttaaaaaagaataaacttataatggcttttgctttcttgcatatgaatggatacttgtcctactttagcttttggggtaagaaaagaggctcttttcaattgagttactaaattagctatcttattaatttgaaggttaacaaatacttattttttcctgttttggttgttatcaaatttcatttgaacttttgttgtattccaacactaatatgtggcattttgttaagaaatggagctggcttttgctccccccatgtacctttctactgggaagagaactcttggaaaggttaagcctcataaccccatgctttctgcaagccaaaagtcttttcctcggcgattatcaacatgtttggcaactttatcttcccaaccaactcaggtttctcttacttttaattgcctgttaaattattttaccttcacatgtgctgactgttttggttccaggcagtggaatttgaggtagagaacaaaaaacatgatctgttgagagctgttcaggacacccaacggggtctcataacaacggctgatcagcgctctttgatagaggaggccttggtttgtttccttttttaaatagtgttagttatcttatttaggatcacttgtgtataatcatggaaattaaagtgtgattgttgccacaggttagtaatagattgaagtttttctataataaagtgataaaagaaactggcaggtgagtgtggaagggtacaacaggggtaccccaattgacttggtgaaattggatggaacgtggcgattgcagtatacctctgcctctgatgttctcattcttctggaggctgctgctagacttcctttcttccaggtttacaccgttagtctatgtttatttaagatgcccgttcatctttattcagaggtttagccttttaatctatgaagtataagtttacatttcctagactgtgggagctcttgttttgcaattattaattttttttttgttgaagcttttgataatgattcatcaaaaaggaaacatagagaaataaaataagaaaccaaactcttatatagtgaagaagagttatgcaatacattatgaatcatacttcaatagttcagatcagaactgcaatcttttatttttctttctcttgttcggtcttgtattctaaccataaactgtacagttttctttacattatgttagtgacgttctttgacatgggcttttttttttgttcctctgtcttgtttacaattattggggttataggttgggcagatctatcaaaaatttgaatgtcgggatcaatccaggggaggtataatccgcaatgttgtccgatggagtatcccaaatttgttagaggtatagtcgtgataaacatgctaattctgatttaaagctgcatatttggtttagagatatattacctgggcaagtttcagatttgtacatttaaagcaaatctggtggataatgtaaaaggaaatttgaaatacattgtaactccagtctgtgaaactcacattttacattgacatgtaatgctctttgttttcatacttgaaggaacaagaaggtgcgactttgcttgtatctgcaaaatttgatgtagtttctgtccgtaatatctaccttcagtttgaagaggtatgtttttcttcttttgtgaagcatgactttcaaaaatttcaagtttaaatgtgtgtggttgttccctctacatggttctctgtttgatgtaccattacttaatctggcctgctctattgagtcatattttctcttcttattcttaaacttcaaattgattcagacccatttatcattttgctttctctcatttacctttcttttggagttacatgatatgctaccctacatgtaacatccaagtgaaggcggcaaagtccatactaagtactaacctaaccctatgctctacttttctttccaaattatgcattgtctatgtagatgagtttttattccttgtataaacacacatatatatttatgtatatatgtaattatctggtagctttttatttatttatttattttttattttagctaatagccggaaagatgggaggagtgtgttcatacaattttttttaatttgattttctgttaagtacttttgcaaacttcctgtatcttttctttagttcacaatctgctgtaaactcagacttcatccaattccacaaatgccaaatctttgtgaaatgattttgatgtagactcaattatgctgaataagcgagtctgtcgattcgtcaatctgtatcaatgttcttattataaaaggaaatctgcattgtggatgccatcgatttagcttgtcttgtattgtccatgctatgacatgccatgctttacatattttctttacgccctaattgattgacacttaaaacccttttcacgagagctgtaaataaattggtccatatacgttgcaaaaggcagctataatggctcattttctttcgagcatcactactttatttcatttgttttctttctttctcccaatacaagttctgaatattcagcttctaaaccttatctgaagcccttaagttttttatggcagataactgttcaaaatataaaaatcagtgaagaactgcagtctctaattgccccagcaatactaccccgttcatttataagtctgcaggtaaataacattaaacgacattgttctgttcatttcctttcacatatggtgatattacatcttcaatccactggattgtatttaaagttctaatgccaactgaagtttagttcataattaccaatatgcaaataaagttcta

SEQ ID NO: 112569 - DNA, 2050 bp, Cannabis sativa
ctcaatctagttatagtacgggcacggtaggtaagggccaattaagaaatactttgtacggaaactcaagttcaattaaagtaacaaacctggaaagcttagtagttatatattatataataaaaataaataaaaatcgaaatgcagtatgtgtgtttgttagtgcaataattttataaaataaaaacaaaaactcagaatatgtaatattatgtattgtggatgatatgaatatgagatagctagtgtcatgtgacaacatagattgacaaaacatggtgccggtggaacttaaagaccaaagattttgcacttgttggtttcgattcgccaggcctcgtgcccaccacctacccataaccccaactattattaaagaaaatcttccactttaattaattggttcaatacattattgcgtatggtttatgcataataaccgacaaatttatcactagaatctctacattattatattacaaaaaagttcagagtttacgaaatatatacatacttatatatagaaaaaaataagttatagtatagtgactttatatctctctttatagttatttgcttgtttctttttattcgcagctggaagtaccatttgctcgtttgcaattgattaactatcaaataggtgtggatcgaaagtctaattgggatatggctaataccatattgagaatcatggaattctatctcaaaatcaattagtggtgagtagaatagctcatcttcttatatatgactcaataattttacatttgatctacatgtaagataatgttgtccaatagctccaataaataattataaataaatatgattcaaatttaatgtttttattaaaaaaaatatgtatttatcattaattttattaatattttattatgtaaaataattaaaaaaatatatagattgctcataatttaatgttataaataaatatatttataaaataatataaatgatgtaaaagtaaataaaaaaattaataaatttatggtgatataaattttatataataattaatattgtattaaatttaatataaaatttattatggctcaaatctgtattaatttttaacacattggagctgtttttctttttgtggtcaatactgaggaactaaatttttttttagtaatttaaaagttccaacaacctttattatactaatgataatatatccaaaaagctattaacatgtcaaatttcaacttaaaaaaagacgtgagtttaaaaatttccccaaaatactctatgagactgatatttaggcaagaccgacaagttaacaataaacttactaaaataatattccttaatttgaacattgataccacacaaatagcttttattgtatttgtttatataaacaacaaaaatgaaaaaagaaaaaaggacataatcttcatgagtaacgtggataagctgatattttaagaattggctacgaacagaaaggacaacaaaaaaactgaaatgatacctttttatgtattttataaactaaagttctctaaaaaaaatatataataataaagaaaacactaaagtattgtatttaagattctcttaatacatgagattaatacagttgcaatttatgaatactcgctagtttttctgataccacacgagttcaaaagatacgagcacgattaaagataaaaaaaatatatgtttaggtatagtactgtacgacactataaattgacatgataccgcacgaaaagcacaacacggcatgagaagcacgaaaaactaaacacgtaaacacaaatagactagcctgaaaagtacgacacacgacaagcccaaaaaacacgtcacaacatattaaacaaccctaaaatttattttttaataataaatatgtatttatcaattataaataaattaaaataataataaaacttaaatttaatagtaaatattataattctataatattttttttgaacaaatttaattcattaaacagcaatattcgctatcacaatagactgaagagcgtgtggaacattgctctcagtaa

SEQ ID NO: 112570 - DNA, 6749 bp, Cannabis sativa
  modified_base (268)..(273): a, c, t, g, unknown or other
actttaaaataaaaccaaacaaatgaatgaaattaaaattatttcctttccattccattctattttataacctccaaccaaacgccactttagggttaatgcatattaatccccaacctcaaaaattgacggtaatagttttcaaggtaacattttctgtaagtctgttgatccctctttctaactgatatgttaaactcaaataaaataacacatgtcaattttttattggtcttaataatagttttaattaaaaaaaaattaaaannnnnnaaaaaaaataaataaaaaatatattttaaaatcataaatttatttcttttttaaaaaaaagaaaaacaaataaattattttaaaattaattaattaatttttatttttatttttattttttttcttttttattttttcattcacagccgatccttgctcttctctctcccttttgtcttcttcattctgtgcaaaaacctccatagtcaccatggtttgaagcgtcgaccagtttttacccttttcactcaccgtcctatctctcttgaacctcaatctcaccagccccacaccatcacatcaccccaaaatccaagtttttgttctcgggtttccccaacctttcccttcaacccagtgtcaccatcatcacctccctatgtgctctgattctctcaaatccattcgagctacactaccccaagattaattgtcgtccccatgcttccctttcatactttgtccttctcactgtccagaactgaaattttttgagcaaaataggtttctagcaagaggtctaaaaatgccttgttgtcgaagtcttaccctgcaatggctctgatctgggagtccgacgagccaatctccaattttgaattttgaatcgattgtggtgaaaggcggagaaggagagaagttgctgaacaaagagcttgcaaataaacaaaggtggcgtggcggttaagcatattaggatgggcagtgaggttgttccttagcatctccatcaatggagtttccatggctatggatgggtctatccatgtagaagaagaagaagaataaggagatagaaaacaaataaaaaagaaaaaaaaaaaattattgttttttttaaagaaaatattaatgtttttatttatttatttttagtaatttttattatttaaattattttaactaaatttattatttggaccaataaatttttaatatgtggcctttctatcagcactttacatcagttaacttggtgactaatagacttacacgaccttaaagactattactaccaattttggaaattgggactaattacatcaagcctaaatttttagactttttttacaattctgtatgccttaattatggtggacatgatttgaaaatcccgtaacgacatggttcataataattcgaattgtaatattaagcattgcataggttctatttctttgtgttacacagattatagttcttgaatttttccttcacgggtgacggttgagcctcctattcggcctttttccttaaaagattgggtcaaaatcaattatgacattaaaattggttgtgattcaatgtgtgtagtagcgctagctagagacttgagtcaattttgtggttacttaccagattgctcaacttctttgatccacttattggggaagcaacgacctatcagttggctatggaatcagcagtctcctggaagtattcctttgtgttgatcgagagtaactcaaagacggttattaacgtgctaaaagaaacttttttcgtttggggtattagtaactatgttcttcaatgcaaataactttctaatttgtttatgagttgtaatctaatggtgcaactagtatggtggatcgttctactatactatgtaatgacattctttctccatttatttcctttacaaacaaacaactacaatacaactaaggacattctttctccatttatttccttttcattcatattagggtttattttctttgctgtaacagtcctcaagtcaaatttttatggctgaaaatggcgtggaagaaaacagtcttcgtcccgcggagaagaaaaggctaaaaacgacatcatcatcatcatcatcatcatctgctgaggacgatgaggacagaatttcgaaactacctgatgcactcattctacacatcctctcgtttcttcccaccgtggatgccgtttccacaagccttctttcaaatcgttggaaacgcatgtggtatttagtccccaatctctctttcttcattactgcttctcgttataaatctttacaggaccgggaaaagttgtgcaattatgtagacagttgtctggaacaccgaaagaaagctatgttttataattgcaattcagtcttaactagttttaagcttcaaatggattgctatgaaagaaccaagaatcattatctagataaatggttagcttttgcggttgagaaaaaagtaactgaagtaaatctttgcttgagcgaagaggtaggcggagatgaagacggttccatttattacttctactgcatacctgaaacattactcgtaaaagcaatatatttgactattttggagttgaatacagtgttgttggattctgattactcatatagttttccatcattaaaatccctgtcattgactaatgttgactttttagatacatctgtggtagataagctcttgttgggttccccttcccttgaaaaattgtcgttgactgattttgatatttatactaatgaccgtcgtccatatcagcttgacatacgtagttcaagccttaagttcttggtaattaggttctttatgattgaatcactgtgtacagtgaggcaaattgaagtcataaatcttgagtcattggaactacttggtgttccctttgacaatttaaatctctctgtatgcaaggcaattaaaaatctctcattaatttgtgattggaatattgaagagccttcatcgttagaatatctcatttcgagccttcctctccttgagaatttgactttgggcaactgggaaaagaagaacttggaccacattaaaatctcgagtcaacacttgaaaagttttaatgtgaataattatgctgatgcaatgactgttattattgaatgggctccacaattagcatcattttattatacaggtgatctcctttttcgtatatcaatggtgtcatcaaattctttgaatggaacattcgaaattgcgaagtatgaggactacgatggagattggtttatcaacatgatgaattttcttatgagtctcaattgttcttggaatatggtaacactacacgttgacagagccaaggtatgtttattacttttcttatttcattatgtggtgttatttccttaactctttatcgtgcattcgatattttattcaattcctaaactctttacatgaaggctctcatctttccaaaaaacttgaagaggatgtttgaaaactggcagtgtacgtgtcgttttcctatggttaattgggagcatcttagagtatttactgaatgtaaaggagaggaagaatcagaattgagagatgctttgatgtggatttttccttctttgaagacattatctataggagaaaggagatcttgttaaaaccttgccacaggcgacctataagtatgtttcaactatgtatgactaaattgtgtttgtttacttgctaccttagttatcttgagattgtatatactttatggttagtttaagaatatgactttgcatgccaactttgcttaaaaatggggttttgtttttcttatatttggttgtaaattagtagatatgatatgctctattaattatagcagatttatttttctggtttgatgcaatttttcacaaatctacaaactttacttcatactgatagaactgttacaaaggtttgtaggttacttccgcatgtaatggagtcacctaatttgttctaggtttctctattgattatcttgtatgcctagaacttcggaaaagtacttcattctttactgctttggttgaaacttctcaaatattaaggttttgaaaacttgagagataccttgtgttttattttttcatttacaatattcttggtgcttgctaagtttgcaaaaagtgttgattgaaattttaaaaagttcaaatctaatgaattaatacatttatgatgtgaatgttttaatttaatgggatatgattgctttggagtggtgaatactgaatattagcgactcaaaaattaatatttggactcattcaagataacctctgcttcaataaaaggtcttgaatattactcaactactattgcgtagtggtatgttgatgaattaagctttggactactaaattggctgcaatttgttgtaaagggctctgtttttgagagcttttttcaacttggtatgctagctggcccaattcttaatctttacattaatgtgtttacttcatttatatgttgtaaatggacttaagtagtcaagtgaacgaaaagcttataaaaaatcagtgacttggtgtgtttagcagctccaatggtgatttctacagaagacttgaattttgttgtatttcttcttttgccgtgttactaaaggagaagattaatggaagataaattgtgttgtcaaatttttatggctgaaaatggcgttgaagaaaacggtcttcttccggcggagaagaaaagactgaaaacgagatcatcatcatcatctgaggatgttgtggacagaatttcgaaactatctgatgagctcattgtacacatcctcttggttcttcccactgtggatgccgtttccacaagctttctttcagatcgttggaaacgcatgtggtatttagtccccaacctctctttctccattactgcttctcgttataattcttcacaggaccaggaaaagttctgcaattatatacacaattgtttggaacaccgaaagaaagctatgttttataatcgcagttcagtcataactagttttaagcttcaaatggattgctatgaaagaaccaagaatctttacctagataaatggttaacttttgctgttgagaaaaaagttaaggaattaaacctttgcttgagcgaagaggaagaggaagtggaaggtgaggtcggtttcatttacctctactgcatacctaaaatattagcactaaacgcaatacatttgaccattttggagttgagcatggtgatgttgcattctggttactcatatagtttcccatcattaaaatccttgtcattgactaatgttgactttttagatacatctgtgatagataagctcttgttgggttcccccatgatttggagttcaagaaaattgaagccataaatcttgagtcattggaactacatggtgtttcctttgacctattaaatctctctgtatgcaaggcaattacaaatctctcattaacttggagtatgaatgagtcttcatctttggaatatctcatttcaaaccttcctctccttgagaatttgactttgggcaactataaaggggtgaagttgaaccacattaaaatcttgagtcagaacttgaaaagtttcaatgtgaataatccttgtgatggggaaatgactgttattgttgagtcggctccaaaattagaatcattttcttataggggtaatatcaaattcagtatatcaattgagtcatctaatttgttgagtggaacatttataattcttaatcggcctggaaattatgatagagattggtttatggatatgttgtattttcttttgcatctcaatcattcttggaataggataaggttggtttttgactcagttaaggtatgttaattattacatgttttatttacttttgtttcaagttcatattattattgttattacttacatttgatattgtatacacttacttgattctatacatgtaggctctcatcgtccctgagaatttgaagaggatatgtcgttctcttttggttgattgggagcatcttagggttttcacaaaatctaaaccagagagtgaagcagacttaaaagatgctcttttgtggatttttccttccataaagaaattatctataatagaaaggaggctttttttaaatatttctcaatgtgatgattatgtagagatatatagagatgacactgtagtagtttaatcaattatttgatgaattgaaactttgaacttcatgacaaattttgagacttattactcttggatattctaaagctggctgtttaggttattgcatcgatttgttgttgttgtttttgttgtttttcactgcttatggcttaagattctcaaattgtttcaaggttttttatgcattggtagagatactttagctgattatggttccacatagttctagttaatattacatttcacttaaatttgtcattacaatgacttctatttatttcacttcagcaactattttcccccatagaatctagttctgcattgtaattgaatgaactagattttggtgaaatttgtggtgtgttgtgtggtttgattgattcagttcaatcaattggaaatgtggtgagaagcttatacaagatttttttaatgattcatcatgatcatattggaccaacctgaagacatgcaactgttaggctatttttagcctatgttttggatccaatttatgtgcatttttagctgtgttgggacggaattacgcttgtttt

SEQ ID NO: 112571 - DNA, 1727 bp, Cannabis sativa
acaattttgcccttgcttggtgaaaaattcataaactagacatagtctatatttagaattataattgattaattaaaattaattaactgagtgttacaagactatgggcctatataactgttgggaaaagttagtttacatgacagtttacaactgttgtaaaaaattactttaaatgactgtttacaattgtggccaaaagtattatatagattaaattcaattattttttaatatatattttatttgtttttttttatattctaattattttttttgagctatttcttttttatacgtctgttgggctgattttttttaatattataattttttatatttatatttatttttataattataatttttatttattttatttataattattttacaaaatctctacaatgtcgtcttcatcatcatcaacagatcttgcaacatctattactaatatggcagcccaaatcaattggttcgcttgatcatcatcagatcttccaaactttttctctcttcttcaaacaaaaatctctgcaaatcccgtcttcatcatcatcagatttctgtctctctctctgaagaagaagaagacgcagaggcattatcagatcttggaaatgcctcgcatgactttgaaccctaatcgccttttacctaggttcgtcttcggctagtcttggtccctctctttgtctttggcgttaagttcaggccatgaagttctgttcctgccatggcgatcctgtccttgttgttcacataccgcccttgccccgtcgaaccaagtagtggtggcgatggtggaaaaatctcattccctagacgtccttgtcccgtcgaaccatgcctcctgcgattgagagaaagagagagaagaagtttgagatttgtagaggagaaagaggcggctgtggtatatgaatattctaattagggttttcacttattattatttttggtgtggtgtggtgtgttggtgggacttacctaacttaattattttatttatttattctttaatttggatttatttttgtgttttattgtacgcagaaaaatggtattgtgtttagaattttaaccaacataatttatcatatatatcatcatagattaataattattttttaagtaaatatatattgatctattcagtatatattgtatttattaatatattatgttatgagagcaacttttagataaataataatattttaatcttacgagatatatgttggcttctaatatgtttgtagttgagtgaatctattactataaaaattaatttgatcaaatggtgaaaaaactgttaaggtttataactgaacatttggctcacaaatttaataaagaagaaagatgattagaagaaatatggtgtgttatggtttttgtacctttttaattttttcttacctcaatttttatttatttttttttaaaaaagtgatatttcaaaaataaaataaaaaatattttagttaaagggtttattcccatgtttccctccatcatttgtaatctcatcgaacggacaaggtttcgatactaatcccattattaataaataaacaaataaaattgtaattttaataagagcagttctatttgcattcataaaataataaatacaccccattattaaaaaaatataaaatttaataatttttaaaaattactcttaagattttttttttaaaaaaaaatttcacattatttta

SEQ ID NO: 112572 - DNA, 6851 bp, Cannabis sativa
aaccgacgagaatactctttaaacgaatgtttaaaaacgttgagaaaaattatttttatagtagtgaaagtttagttaatacaaagttcaagtttttgctataatttttgtttacttttttttgtgttctgccttattctacaaaaattacttttttgaaaataaaaattgattcttttgttactttgatgatttttaaattatttaatatttttaaaaattcttaagcattgtaaattgaacgacctagtttatcaaaatatattatattattatccctctcatttatacatgcaagagaaatgaaaaagtatagccaattggtcagtgctcaaaacgaatcatgcatgaaagggaaaaaaaagtgccatacatattattattattattataggagtgtgaagtacagtggagatattaattaaaatattaaaaagaaaagagatagatgctcactaaattggggattgaatagtaatgaaatcatggagaaagcttcgatcgaaagtagaatttattgcagtatccccatgtttgtcacattaatatgtagtatggtagccaatactagcagactatatagttataaatatagcccttaaaatttgaattatatatctatataaattcgagtataacattagtccctttatgtatttggcaaaatcttcatcatgtgcaagaagacatatataatccgaaacatgcacgtatatgtccatgagtatttgtggctgcaaaaatcttttcgttttcaaatcacagtctagtagactagtagtactaataaagcaagcatcttattactttcgattaacttttttctcttggattttataggaaagaaagaaaaataaagctgtttaattaccggctaggggctacccatacacgtcgatatggcccaacactgctttgtttgtttctccacaccatcgtaatactcttttatgatgtaaaagaatgttaaagtatcccattatttaataatttcctacgttctctctctttgagtcatctctttttcaatttaatttttgtacctcatgtaacaaaatatgtttatgaacttttaatccctcaaacaattttcctctaacttttgagtttttttttttttgagtgtagtctaatagtatttataatttttttttttgaaaagagtatttataattaattaattgcttaatagtttaatagtgtttggttcgaatttatgacctttttttttttccatctatctctcaccactaaactagcgttagtaagtcttgtcttctgacatgtatgttttacggtgttttttgcggtaactaagttcgtgggtatcaaaacatcagttacgttaaagattggttctgatggcttctagcagtcgagacagcgaggaggtgggaaggaggtggacaaatttgcagttggaagatagagaagaaactggtgtatggttcgatcaatccgaggatttgggggatgagttcgactcgcgttagtgtttggtggggagattgttaactgataggccgggtgattctgatgctctaaaaaatgttatggcttcactgtggagatcgggtaaggggatgtacgttaatgagttagaaacaaatcgatttttgtttcaattttttcatgaggttgatattagtagagttttggaggggacgtcgtggacttttaatcggtcaccttttattatacaacgactgcatgagggagataaccctcgaaccataccattaaacacgatggaaatctgggttcaagtgtatgatttacaggtgggtttccgttcggatatagtcctgaaagcagcagggggatatattggaaaatatgtgacatcgtgcccaaagaatttcaatgggatctagagggattactatcatgtacgagtattgattaacattgaaaagcctctcacaagacgaatgcgagtttataagagcaaggaggaatggttctaggctaacttcaagtatgagagggtgccgaccttttgttttatttgtggcttgatcggacattcaaaaagattctgccatcgcttatttgatgaacctctggaaacaattgtaaaaccgtatggtttgttcatgaaggctcaggatcgtcgtccaaatcggcaaattggtgcacgatggcttcgggatagcatggggcagtcggttgaggaaacaatgggtagatctccgacggatcaagaagattctcaaggagaaaatcatggagctaaaatcaaggaggtttctaatggagaaaatcgtggaggtataactataggtaataattccattacaaagtcaaatgttgggctaggtaatattttgggaaggaatgtaggacatgttgtcaatcctgaattggaggaaaatgagggagagggtaatattgaagatttggttataattgataataaaagaaggaggactcacgtgggagttgacggtgggcctttaggtgatagtggaaatatgggtcaggattttattgatttaaatgggggccaggtggatatgaaagtaaatgggcctgaggtatatgggccacataaggacaaagtagcagttggtgttgagagtagaagtttaatgccacaagaggttggaaagggcactgttgaggggaaaaaaggaggtatggttcaagtttgtatcattcaaaaaaacgactttttggcgagtactcatgctgggtcccgccaatcattatgagtttgttaagttggaattgtcgggggcttgagaacccgcgggtgatgcaattccttaaggaaattactttccaaaagagacccgatcttattttcttatgtgagactatttgtaaaagagataaaattgagattttgaaaaaggtgttgggatttgaaggaagcttcagtgtggaggctcgggggcacagtggggggttagctatgttatggcgtcaggaaaatgatgggaagttattgagttttagccaaaatcacattgatattgagctaaaacttagtggttcgatagtggttcgtgtgacgggttgttacggggagcctagtagaaatctaagaagcaacacatggagattgataagagagctagttcgacattcaatgctcccatggtgtctcattggagacttgaacaatgtccttaatcaaagtgataagagaggagggaggccttacccgaattccttgttgaaggggtttcaagatgtggtgtcggactgtaggcttattgatatggctctttttgttcatccgtatacttgggagcgtggaagaggaactagtaattgggtggagatacggcttgatagggtgttggtgtcccatgcttggaatgatctttttccatctacaagactttttaacatggagatttcggtctctgatcatagtcctctatggctgcagcttgttccaactccgattgtgattactccgcccaggtttcggttcgaaaatgcatgggcaagggaacctatgtgccaccaaattgtcaaggatcattgggcaaccttcgaaggccattccctgcagcagtaaatcaagtgttgcagtacagctcttgtcgaatgggggaaaaatattacaggggatttcaaagaaaggttgaataagtgcaataaagtgttgaaatgcctaaagaatagaagatatgaggagtctataaagaagtacaaggagacacaaactcaactgtatgagattcttactcagaaagaagtgttttggcgataacgttctaagcagttatggctccaagcgggcgatcagaatacaaagtatttccatgcttgtgctacttcccgaaaacggaacaatcatattgtgtgcttgaagaacagagcaggagtttgggctggttgggataatggtttaaaagaggtaatggcagattactaccgcgaattgttcacagcttctacctcgaattgggaaagggtcattgcttgtgttgacaatgttgtctctgaggatcaaaatgtggggttgacggctcctgtggatgcggcagaggtgcggaaagcagtgttccaaatgcatcctgacaagtcgccaggcccagatgggcttaattcggggttctgtcaaaaattctgggaggtggttgggacggacgtggttcggttagttcaacattttttttttatgtttggtgagttccctgattttctcaaagatacgaatattattttgatccctaagaagtctactcctgaaactatgagcgacttaaggctgatagctttgtgtaatgtcatttacaaaattgtttccaaagttatggctaataggttaaaaggggggcttccaaatgttatttcagagacacaaagtgcttttctgcctggtcgcttaataactgataatatattaatctcttttgaggttatgcattatttgaagaggaaggggtcgagaaaggatggctttatggcagtgaaaatggatatgagtaaggcatacgaccgtgttgaatggggttttctacaagccatgttgaggaagctggggtttagtgatcactagattatgttggtaatgaggtgtatctcctcgttctcgtataatattatactttgatcccattatcccttcgagaggtttgagacaaggtgatcatttgtctccttacctttttattttgtgtgcggaaggactctcacttttgattaaagattatgagaggttggggaaggttcgtggttgtaaggtagcaaggggagctcttataatttcacacatgttctttgcggatgacacttctgttttttgcaaagcaaatgaggaggctgcatgtaatgttatggaattattgagttattttcagcaagcttcaaggcagcaggttaatgtgcttaaatcttctatattttttttatctctaatactagagctgaggatcgaacaagggtgtgctcaagaatggggatttctgaagcaggggataatagtacttacttggggctgcctaatattgtggggagaaataagacgactttgttgggatttcttaaggaaagattaaggaagaagattcaaggatgggagggtcgtttcttatccaaagcgggtaaggaactccttattaaaactgttgctcaatctctctctagttatgcaatgaatgttttcttgctaactaagaaaatttataatgaaatggaacagatgatgtgcaacttttggtggaaatcttcatctaaggatagcaaaggaattcattggaagagatgggaccgtctgactttacataaatcgaaaggaggcatggagtttagaaacctgggagatttcaatgtaagtctacttagtaaacaaggttggaggcttctttctcggcctgattccctcgtggctcggttattcaaagcacgatactactccagaggtgatttcttatctgctgaattgggtcataatccgagtttcgtatggcgtagcatctttgaggctaaagatctagtaaaggcatgggcaagggttcgaattggaaatggagcaaagactagaatcttagatgatccgtggctgcctgatgaggataatccgagaataatttccacacatcctgctcttgttgatcaaagagttcaagcattaatggtgactagacattatgaatgggatgttgagttgataaatgatgtgatgagtgctcgagatgctgcaattattcttagtatcccattaaacccaagtagacaaagtgatgcgtggttttagaggatggaaaactcgggttttcattctgttaaaagctcctacaggtttctgcaacaagatcgaaagggtgaattgcaggctctctcttctggtttctggaacaaactgtggaaaatttgggtacccccgaaagtgaaggattttatatggcgtgcatcaaccaactgtctgcctattacaacacaattaaggacgaaacatgttaatgtgagtgattgctgcccattgtgcaaattagaccaagagacttctttccattatttagttgattgtcagtttgccaaactgtgttggttgcagaccggcattaatactatcgatatgcaggtggttacatttcctggatggctagacagcatgctgcaaaaattagatggggagcagaagaaagtgttggttatgacatgttgggctttgttgagggataaggaatgatgtagtttggaataacaaagttcctatggtggcaggggtttcaattttagctcaatattgtctggagcaatgggagaaggcacaagataaacaacttgttcctcgggctgcttttctgattgatgcagatgctgctgaaatttggcacaaaccagcagcagggtttttgaaagttaatgttgatgcagccctctttgcaactcctaatgtgcatagctttttctgtgtggcccgtgactcgacagggactttggtggaggctatttcttgttgccggcctggtttagatgcaccagaaatggctgaggtgatgggagttagagaggcgttaagttggataaaaaagaaactttggcaaagtgttattgttgaaactgatagtctcattgttgtgcaagcaattcggagtcctcttgaaatggtttcttattttgggagtgttatttctgattgtaaaactctgttagaagagttaagtggtgtttcggttctttttgttaaacggtctgcgaatagtgttgctcatttcttagctaaagcttcctattctgttgctgatcgtgtcattagaagttatgatgtttcttctgagttccaaaatgtaatcttatatgattgcagttaataaattgataatttcttttcaaaaaaaaaaaaaaaaaaaaactagcgttagtgacttaacttttaaaattattgg

SEQ ID NO: 112573 - DNA, 5033 bp, Cannabis sativa
gagagagagagagagagagtaccgtttgaataacaagagtggtattattatagagatcaacaaagacaaccaaaagaagtactatagtttcgtaactgaaaacaatattgtggaaacatcaatataaacaaaaacataaaaactaatgttcatctgaaactgaaacgaggcttcggaagctaggctagtcgtctcttcttttaacagaaatcaaactctggacatagtagttggatatacaggtgctcacattaagcctaggaatgagaagagatctaaatgtttggtaattgaggttgtaagacactactccgtgacgatagtttaccatgagaagctcatctgtgttccaaaatattagaggggagtaataggtttcaaagttcccaatggttggatgttgagtccaagaatattcaccatcattgttgtcatccaatacccacatttcaatagtacaaggaagattcacttcaaattcctctacctttaccataagcaaggcaactgattgattccattctacaaggcacttttcatattcaacaatgagaaactcctcatcattgtcattggctgccccttgtattggacctactggtggtggcctggtgtgaaactcctcagtagacatgtcaaaagtaagaattgtttcatacccagtgtttaataacatcaaccaataaaaaactcctttgcacaatactcctctgcctcggcaaaaaggagcttcttcaagttcttcatcaattacaatctctttccaagaatcggaattcatgctgtacaactcggctgaacatgtaaatcgatgaccaaaaatcctgaccaacttaaaatcattagcctgcaaatcgtatccaaatccctctccatgagtcctcacaataccacgatcattaatggatgttgcaggaagaatcctggtttctctaataacaggatttatgagaacagattgacctttatccatgaagtactgagctatacaaatgattccattacaatgataggtacgataaaaatcatacatctcatcccaaagataggtatgaggtaaatggtcgaaaaaatcactcatacaatgaaagaggttaaagaagtcggtaggataaacagcctcagggattctaaacgcagaacgtaatggcttcatttcctcatcccctgttaaatcagagctaacccaactcaaaagtattgaagttgatgacaagccatcgttcttatggtggtgttggaatgcaaatgatgggtcagtgatcaaaccgtgccatgatttggaaacccatttgagtcgtgcgagagactccgcaggaacctgtacaagaatatctttcatgagttcgtctggtagcttaccacttaatgcccccattaaggttctttttcttgatctaaacaaagctctggcgctccaacaaatttcagaacaaagatgagttaaacaagattttattacaattctaaacaagaaaataggcaacaagtttttagtaaggacaaataccaagaaaactcatacagaacttgaaaataaaacaaacaatatatatgcataataatcgtttgttagaacctttctttccggtaaagaaatcaagaaattggtagtcaatcaatagtgataacagttttgggttgaacatagaaaaatggcagagacgagatcatggataataaatagagagcgcgagtcaattgaaaaagaaaagctaagagttaagagtttgtacctgtggtgtcaactgtcaacgatggagatgcttctatgaaagaggaaatcaatttagtgaacaggggagagcgaggtcgttcagtagaatctttttatttagggcagttacaatatggatgtagtttgtttgttaaatcttgctcagttttagttttcggttttattttcaaatgtaagaaagaatgaagtaatgatttgctttataacttgatttggcgggtggagactgggattgagtgtgcttggctctacagtagtcttatatttgatatgtaatttcaatatatattcacatatagcatataagtaatttcggctaagatatagagattcttattttttttatgattaaaatctacttcaaacataagtatatatatgataccacaccaatagtatacaaaaagaagtgtcacctctaaaccaaattcctacaatttcagtctcaataagccccaccaaattggttatacagttaaactaatgatgatttcttttccgcagcttcaatgtcttctccaagcccaagggcccaagctgagtccaattcatatgaattcaaagaaatagtcttcattatcttagttggcatgctatatagacgctttatcaatggctttggtaagctgagtcccttgttaaggctcttattcttcaaatcaacttcttcaccatcaccaccatgttcttgcatttctactgctctttcttttaaagttactgacccttcttcctccaatacctctaagggttttttggacttgtttctgtacaccgagtatagtataagttgagcacaccccaatatgaatcctattgcatttggtacctgaaacaaagcataataaagattgtacctttgagcttggatgatttacattgtcaagtcatttgataactaaattttatacgtaagagtttggaaacttacaccaatgaagaagtccttgaccagcatagaataaatggaccaaatcccagcatttaaaaataagaaaaatgagaggaaaaagggcatgtactccacactcttcattctaatcaccaacccctgaaaaaaaataaaaaaacaaaaacagaaataataaacatttctttcatttctctttttcttaatctacatatagtgaaagtggtataaaaattaacttaccatgacagtaagtggtgaggcatacatgcctatagttaatgcagcacacaaaagtccaacaaaggtaagttttatttcttcacgtatagcaaacagagtcaacacgattactgatccaaaaaaccccacatccagaatggcaaacaatttccctgtttttacctgaaaagaatatttttggtaaccaagtcaaactaaaaatctattcactttccaaaagtggaacagaaatgaccaataagtgtaactatgttataaagcggggccttaccttcttgtccatgggagcatagatgagaaagatgattacatagattagttgcaagatggcaccagcgccattaactgtcatgattagtaacccatttgggttcaatataccatagaatgtccataagcttgtactcagaagtgtagttatgtatggaagcccttggtagttctctgttgatttcttcttcaacactccccagaacgtttttctataaacaagaacattaacttagttagatgcatgtaatattcaatctgaattgtgacaaaataagaatagatctctcttatttttattttcttggctcaaactagataacaaatacttgttaatcatatatacttcttcacaaatacttgtctcttgagttttagttccatattcataagtaggaaagaagttaaataggttttcgatttgatgggattacttacatgggagacgtaaaaaccagaaaagaaataacattgcctgcatataaaaagaagagtgaaatcagataaatgaaaatttgaggattgaaaacaagtaatattaataagagataagagtcacggaccaataatgccaataatgaaactcaagctaacagccatttcaacagagtgcagtagtggtagagctatgtaatgaatgtgttataatatgacagccaaatgaagaaggtgttgtttggtatatataagggtgattatgattcgcacgtgacgagagaaatgacgtgtgtgtgaagtgttatgtggttgaacatggttgggatatatatccaatctcttcttttatatatatagattcttttaagtgtgctactattagcccatctttgacacgtttcactttaggtatacaggccaatcctgatagtagatggtatttggcccaccaagatctgctcttttcttcatgattaatcactttttttaactttcacatgtaatgtgatttaagttttgtcagttcgtttctttttgggatgagaattctaacacttctacatgaaacataaaaatggtgggttgggtatcgtagtattgtatgatgtggtggatgagtagtgagcatggactcttttaggacacctataagattttgtaccaaattaaattataacactatattagttaagaaagtaatggtttttatttaattcactaaatgggtaggacatgatatcagttttagtatctgtaggtaggactgtctttagtaatgaaaagccttgtaaatctggtctttcaaagttttggtcggcgttaatggacagcattagctttagattagctcacatataataaaaaattaaataaatgactgtgttgagtaatctctcaaccaagttctataactcgttgactgttttgtatgatattcgaaaaataaatacatttttgtcttaagagagcttgttgtcatacctttttgaccttagttgtaagttaattgtattatgcttgctaataaaactatcaaaactattgcctactttttcattgatatttctttttgtgttgaactgacggatgccaatgtcgtgggccaattctcttgtctattgatcttaaatgttgaattgatgctcttgaataatgcagccaaagaaaatgataggtagggaattgtgatatttatgaggagaaataataataataattacaaaatttaaagattgtgattgtgaggtatgctgtacacgtcataagaatttctagagaaatacggtattatttggtattagtatttggatgtacttgaggttgagggaatgacctaaaattgaaagggaaatttataaaagtattggaatttgagttaatttttacaaaaatattgtcacatgaatttttgttcaaaaatactgtatttttata

SEQ ID NO: 112574 - DNA, 1039 bp, Cannabis sativa
tcccaaaatcactcaaaaaggaaaaacacccaaaatcaaaatctgtttcttcttattgtcaaaaaaaaaaaaaaaattgcttcttctctataggataaaataggattttattaaggaataaataaggaggacaatagaaacatgagacttgtaactgcctaactaagaaagcaattatacagatattatgaatttaaccaagaacagatgacttcctttgatacgtaagtgtgatagcatttgaaagatgataagttcatgaagtccaccatttatattccttgttctgtgtaatataaagcgtaagttattttgaaccctgatcaaatgagtgttgttatcagtacatttctgtgatacgtgcaatggtgttatttgatatagaaaattcctctattattgttttgcattgtaattttggatgatctctaatttgcgtgcatttacataattgcattgtacaatgtagttgcgcgtctattgacttagggtgaagtttgaacaccataaattaatcattagcaactagataaatgtgtaagaactgaaagaatttttatccaaattttaattaattgcctttgtttgttttcttaccattgccttcttttctttctttcatactttctttgattaattacacctgtttttattaattcataataaattatatgtaattattgaagctgaatttaggttttgatgaaatcatgttatgcacattttgtttaattactaaacctttcaaaggatgtgattcgctaggtgccggttggtttataagtgaatattaattttttttcatttgatgttaagtggttattatgaaaattatttgtctatatcaattcactaatgtctaatattttaatgtgtcactgtttaagaaggccctaaatgcaagtgatagtagattggtaaagccataatctatatatatacataagcacataaaccaacatgaaattatctaaatcaacacaaaacatataaaacatcgttttaattcatattacattaaagtaaatcattaccatgg

SEQ ID NO: 112575 - DNA, 3347 bp, Cannabis sativa
cctggtaaaatatttccaacacacgaagcttcgtcattggtggtccttgatgatttttttttgtgctatgaacccttcatggtgtattaatttgtatattttgatataaatttttggaatctaattgtaaaaattatttcaatgaactgatataatttttttgggttaatttttttattatattttttacttttaatcccggttatttcataaaaatcgggatgaaaagtcccccttttatcccggtttttatgaaataaccaagataaaaagtcccccttttatcttggtttttcaaagactttttattccactagcatatatcttaattttcattttagcgaaaaccaggataaaaggccttaaaaatcgggattaaaggcctttgtttgtagtagtgattatactaatgtgggagtcaatgtgaggtagcgacaaggtggaagaatgggacccgacaagtggtatcagagccaaaggtttaggagagttgggattgtaggctgcgtttgtgatgtgtgagagaagccattagtgtgatgacctcgcgattgatgatttatatggtgccttgtattgaaagtctacctgatattgtagtagttaggtggcgtgtctcgttgatgattacggtggtacaagatggcaatcggcggtacaagatggtcagacggtgacttccgttggtgatagtgacggcataaggtggtttcgttggaggggaggccacgagtatgtgtttgaggggaggattgttagggtatcaatccaagtcccatattggaagaataagtagagttgtctttgatataagtgttccacctactccattagtatgagactttttgaaaaggtatccaaaaataaaattgtgagggcttaggcccaaaatgaataatattatactaatgtaagagtcaagatgagataacgacctgataagatagaagaacgaagcccaacaattataactaatataaaagtattaagtataaacaattataactaatattaagtataaataaacattaattataaaagatatataatacttgacattaaaatattaaaaaaaaattaaaaaaaaataaaaataaagtgtgattagcactcctctttaaattattcttagggtgtacacactttcatgtggttatttcaatatatatatattttgctctaatcaatttcaacgatccaccccttcttatcctcaataacacctctttgaatcccaataagagttgagtagagtttttgggacactgtctgatcacctgttttaaattcgactctgcatatcaattatcaacaaaatcacaaaaacaaaaagatgtaaacgttcttttatatattttcaaatttgatattgtctacaagtggaaaggatgtagaaatcatagaggcatcataatcactaatgaaaaagaaagagaggatattctatcatatttatccaagagtttatttggtacgtaataaaagattgtattgtataattgtatataattttgatctatattaaaattttgtacatttacatgcacaaatatgtcattattaaatatatatatatagtactaaataaaaacattacatataataaaatttaatataatactatatatatggtgtgcatactacaaagtagtttacattagctagttaaataaaatggacaaataataatactttgaacaaatcaaaacgtatatatttttcaatgatacaaaataatactctgaattcaatttttgttattttttctaatataaccaatttgaaacctgatgaaaaaaaaaatataacttgatagttataatcttataagtcaaattactattatgtttattttaataaaaattgatttcatactcttatttgtataatgtcaaaagatataaaggtctaatttatatcatttgacaaaataaataatttaatcagtaatttttacaaaaacacataattcaaaaaaagtatatttatgttagtatattgaagttataagaattattgagaagaaatatgagataccttttggtgtgatatgtaatggaaccaacagaagcaacaccaacagcagttcctgtacaaaatacctcttctgcttccatcacttcatccacttcaatctcacgctcctcgatctaaaataaatatacatatataatcatggtccttatttatttatttatttttgaaagaataacatatttatctagtttaaaaaaaaagttggtattgtagtaattattaatgaccttgtaaccatagtcacgtgcaatctcaatgatactacttcgagtaactcctggaagtatggtaccatttgtagcaggcgttgaaatttgatttcccttgtgaaaataaattataagaaaaaaagtaaattatatggatatggaacataagaaaaaaactcttaaaaaaaaaaagaaaataaaagtagaaaataaaataataattattaatcgtataaaattagaatgaccctcacaaattgcaactattaatttgttaagaatgaatatgaacactttgacttaataactattcagcacttaatctataaactaagtagtagtactacatcataattcaaatgaaaaaatatactgtgttaaaaaatatgtgatattcattttaaaattaattggtgattaatgaagtagttcaaatttttatatatgactcaatatttgtctattagaaagaaatattttgagatggaaaattataattgtttggtagagttgacaaaaataaaattagaaagttattttattttagaattacacttttatattattattattattattattattattattgtaatataaaattattaaaggttatatttagtaatgaaattttgttagtagttttaaaaagtttttcactctaatttcggagaaagttttttttagtattcatattttttttcacttacttttcatttccatacatattttaatttaggaatttttttatatttttatactttaaaacaatttttttttataatatattatagaaatccacatataaacttatatagcaactaacagagcaaattaaattgtaattaaaatttatatagcaatccacataaaaaactatcggagcaacttaaactaaaaatttaaataaaaaaaattaaaaataatgtgtgaaataattacccttttatcctatcttcccatttttctctttaaatttttcgttcctttttaccatacaaatgataagtgcatatttggcatcataactaaaaaactgtattttgtttttaaaaacagaaaattattttttaaaaaacaatttggcttgtttggccttgt

SEQ ID NO: 112576 - DNA, 2745 bp, Cannabis sativa
ccgatgatctggttattttttgcaaaggcaatgaaagatcggtttaactggtccaagctacttttaacaaattctatgagtccacaggcttgtcgggcaacaaattgaaatctctagcatactttggggggaatactgagaagtgtaaaaagagcttgttgaatactttacatatggaggaagggtctttccctctgaaatatcttggggttcatcttcgcccaacaaaatggagaacctcagactgtggagccattctagacaacctccacaaaaggctcaataattgggctagtaggaatctctcttttactattagagctcagctcattaactctgttttgcttggagttagaaacttttggatgattatttttattttaccgcaaaaagttgttgcagctattgataatagttgtcgggacttcctatgaggttctaatggaaactgtagcaagcttcatcttgtgtcttgggatactgtttgtctcccgaagaaatttagagggattggttttcgtaaaggaagaaaatagaaccgtgcttttatggttcatttggacaatttcgtgcaagcaagataacttttgggttaaatggatcgattccatatacctcaaaggcaaagatttttggaccattccgcaaaggtgatgttagttggtattttatgaaattcttgtagcttagaagtgctattgacaaagaggggctgcttaaagctggcaagtttggtaaattcaaatcaaaaaccttctacttatttctaattgctactgatgaagtgtcttatgctaattctatttggcacatattgagtgttacgaagcatcgtttcattgtttggcaagcaacaaacacccaactacttacttgagaccaaaccgggcagtttttaaagattccatctctgctctgccctgtgtgtgaagctgaggtagagatgcatcaacatattttttttgactgctgttttgtcaagacagtgatgaaggagatttctaagtggctagggccgatttgttggtctaggaacctggaagagtggagaaattgttgctcgaataacagtactactttgaaggaggcctctttgaatgcaattttcttggctgcgatttatgcaacctggtgcaatcataacaactctattttcaacttggcatgtagaacggctagagccttgagtctagatataaagctagctgttaaaaagctagagtgatgtatttggctgctcataggattaagaagggtgatgaacatgtaattgagtttttttcagtcagtttgaggattgttgtttgctgctgccgtggtggtggtagcttgtgttttgtattttgctaagttttgtttgaataaaatgttttcctccagttaaaaaaagaaaagaaaagataggcatggtaacctcacttgcaaattgcaatcataataattagtgggcctatcaagaaagacaaacctaataacaattaaacaaaaagagaaacatgaaatgttttgtacaatgtttcttgccccacctttctatattgcgtccaatatttttgaatttattactttgacattttggttacttaattgagagatgccatcaatgacaattttaaagttaggttgtaatgagtaactttatgaacacaaatgagggattgaagcttcatttcaccatagcactaaaaaatcattaacacattaattacatatatatttattacatttccaagtattcaaatttggaaatagaccgttataatcctagattttatttgttggattttcgtaaattcttgaaggaaaaagaataagagaaaacttagaagtttaaatttttaaaaaatgttgtaatgtaatataataattaaaaaaagtgttctaataaaatcccttgaaaaaaaagggaaaaaagggagttgtaataaaatttgtgtatttttttttttaattttttttttttaatattttgaaaaacaagtattctgctttcatgttggccaaattactgtcgctttaaccaccagaaacgtttaaaatgacagcccaatgacacttctttcttctcagttctcagatctaacactacaagtcaaccttttttctctatcttttcctccctcatttttctttgtctccttctttctttcattctttccttcttcccaaacaatactcacgtagatatagatattacacacagaccctaaatgaccattttacccctttcatctactttcccaaataacctttgacgttctcttacagctaactacttctaccgacccagcttcaatggaagctgccgctgctgacctccatcgccggagctcagatgatgtggatctggggaggaacgagtttcccgacccgcccagtggttgtggtggcgccaagtataagctgttgtcgcccgccaagctcccgatctccaggtctgcttgccttactattcctccagggcttagcccctcctcgtttctggaatcgccggtcttgctatctaacatgaaggtcaggtttgattttacctattcggattttgtttttatcttgtttgggtactgagaaaataaatattgaaaattgatgatgaaaagaaggggggggaggatagaaatgagaggttttgaatgttaaggctgtgtttggtagaacacgaattaaaatgtgttttgatgcgagttattctgctgattcaacttcaactttagctgaaaaaggaaaagtttttttttttttttt

SEQ ID NO: 112577 - DNA, 1603 bp, Cannabis sativa
  modified_base (31)..(51): a, c, t, g, unknown or other
tcagtccaggaagtagccagagtggcgtacnnnnnnnnnnnnnnnnnnnnntccgtgggtgtaaggacccaatagaggcttgaagcgtggacgttacaattgatgatcatattaggttgttggttaatgacaagtaaaagaatgtgtattttttttatctaattgttgtcgaatttcatttatagtccaccattgaagaacgactgccattgcacaaatcttgatcctagcgaacgatccaacaacaacgaaaaatttgagagtcttggtctctcttcttccccttctcatctcagccctatcggaccattgaagaacgaataccattgcatcaatcctggtcctagcggatgatccaacaataatgggaattttgggagtctaggtctctcttcttcctcttttcctcctcttagccttatcggacactccaagattttttttagtaaatttagttatggtgtgtgtgacatttactatgagttctttaaaaatcaaattactttcttcttttgtgtttgtatttgtaagttttattgttaatttatatttgtttaattattattatgtaatatttacttaaacaataattaaaacaataatgatattttaaattctagaatgatcataattatcaaaggtagttaaagaagtttaatttttttaagctaagctatatcacttccttttgactaatagtaattaatttcttgtttgttgtatattgttctggagaaatctatgcctaagcatcaaaaaataaaataaaacaaaatgaaaaagaaatcctaacctaaacctaaaacccaatctcatctctctctcttgctcacgacctccatagtccataataggcgagccaccaaccttcattgaccaaaccaaacacctccctcccttactctctcgcttacctttgcaaacccaaatgaaagatcattcctctccgacctcgtgatgagaatggacaccatttttggccaagcttttgaggctaagaaaaacactttgctccaacattttatttcggatatggatttgtgggagcttgggacaaacaaatttgtgagagagagtgagcttgggatgaacagatctacgagagagagagagagagagagagagagagagagagataatttgggacccaccatgttcccttttccttaccaccttcagtgatccaaaccagatgtcatgcgagtgaacacctccatcgcttgtgctgacatttcatggcctgagttgtccaacctcgtcaatgtgctctcttccataggttacttcaaccaaaatcaaggtttctttgccagtgcggatgagatgcctagggtcggagactttcctgacgagttcctacgaaaacaatctaaatatatacgctttatatttcattccaaatagattttaaggttggattcattaggggaagcttttcatgatctaggttattttttattttattaaatttttttttgtgtaagattagggatggcaacaagtagggtatgtttattctatgaccttatcctatgaaaaaagtgttggaaattattttaccaggatttaaatttactaacaagtatgtttgattaacatccta

SEQ ID NO: 112578 - DNA, 2119 bp, Cannabis sativa
gtatttttattatcaattaattaatataaaactactatatagatatctataataattaagaagaagaagaaataaaatgatgatgattaacgatgagacatgtttgtgatgatgatgatgaattaatgctaattaacaacaaaactataattatatatatatgtgttgtgtgtcttaatttgttgtgtgcagaaatggaaaattgtggtttgttattatagaaaattaagtatgagagagaatggctcaaccatggaaagattaggggttgattttgtataattaagccttcttttacggtcttccttttgtttgtttacttttttaagataataattaattaattaatataatagagatgtaataataattatatatcaattaagacttcttccacctatagctaatttcattaaccacacacacttctcctcacctttagccttctttaatttattagatcttgactcagccaatgcatttttgtaaatatatatttatgaaacaaaaaataatcaattattagttaattctgaaaaaaaaaatactcatattgtaataacataattgttatgtatggacaatcggaaaaggttaaaatttatatatggtggtaacatttaataacataataatataataccttgtagagataactaataataactatattcttaattaaaagttaaaagtcaaaaatgaacatttcatgcgcccatcatcactactctacttgtattatattaaggaaaatttacatggtattttaatttttgttatttttttacaaactattgtcagataatattttttacttttttattatgttttttataagtttcatttggcagtatactgtgttaaattttcactggtgttttactgttattttgagttgttcagctttgtgttttattggtgttttataaaaatacaatatttttgaaaatatttccgcgtgataatatttttgtaaaaattaactcaaattttagtatttttataaatttttcttatattaaccacacgtgttaagaggcaagaaatgcccatttggaaaaatctccaccatccgggagattgggccaagattaggggttaaatgttgcacctagtttagcccctagggtattgaaagagtcattacagtttaattcaggattgatcattttataggcttctagtcccagattaggatcaactggagcctaaatatactcacgaatgaggtgccaaggagcccttctaagtctgggatgtatacacagtcgcgaacaacattgcacctagtttagccgcaagggccttgcttcttaactcgagaaacttctggggagaaaatcccagctgacaaaagataatcttgaatcaactacaagtctacaacaacgagaaaggggggaaacactgtagcatgtctcattcgtacccaatatatcaaaaccaataccttataaagtagtataaacatatataagaatctgcacacccactactctgatacagactttaattcccatgcatttgattggtggtttattaattttatgcaccaatcacatcattacacaagaaaagataagtcaacttacctaccacctgcattgggttgccccatcgatcccatattaagagtaatgcctactctttttcacttgtaatcactccactagtgacttaaccacaattaacactaatctagcctacttgcatggttacctataaatacaactcattcacctactgtaaaagggttcaattttagttttctaagcaaaaatattattgaattgaaaggaactttcattgtcgtaagcttgaacaacattaatataatgactcatggaggataaattaattgaaaattttggggttccatctcaaacccatgttcttatatatagcttaatatttttacatttgatcaatgtgggacaatattgtccatacttataacttctctaatcactcttcaatctttataatttcttcttaaatttgttcaagatatctaattttaaaaaataaataacatccacaaataaataagcacagcacagtctaaaatacacatagcatacacatatatcatttatgtataaatatatatatatcttta

SEQ ID NO: 112579 - DNA, 3911 bp, Cannabis sativa
tacgcttatttactcacttatagtaaatttaaaatttatgttgaactagattagtaagattataatcccacttattacttaattaacccaaaatataaagataaatcctaattatttaccattagacttattgagatattgcactaaatattcataaaatatgaaaaactagggtcttaaaactactaaaactggtacactagattcccaaaatggtaaaccatttttctaggttctgcttgggaaaccagttaaccgtttctctatcgtaaacccaaagaatctcgaatctagctcaagacttccccaaatcgtaccaaattctccaaaacagctaattcaacatccataattcaacatccatagatatattccaaccaacagcagtaataaaagcacataaaaatgaaatctaccattaaagagcaaaatttgagctcaaaagctcaaacaaagtctaagctcatcaacagccacacaaccaccttagaatcagctaaaataatccaaaagtgaccacaaaatcaagttataactcaattcaaaactaatagcagcaaaaactcaaacttgcatgcaaacctagctttagaacttggaaattcaatgagaaagaagaagaacaagcttacatttgatctctaatctttcaaattctaagaattctcatctaaaacccctctatattgctgatagaaatgatgaagaaagttgacttctttggttgtaggtggtggcctacaaggaaagagaaagagaaagacttaggtttttctccaaattttcatttttagcttaaaggaaaataaacttaaagtaattaactaatatcattaaaatcagatataattatctaaaggtaatcccaaataatttcactaaaagacaaaattaaggtaaaattattaatttaacctctttcttcaccatgatgtaatcaacacacttaggggtaaaatggtcttaatcaataaccttggatactcctaacatttgaactgtataactatattgccccgctatttttaaagtaccaaaccatatataagtgactatacaggccatattgatctggaactggaccggttggatgtaacactatatttttacatggaaacctagataaatagattatgatgcaccaactacaggattttgtacagaaaggagaagaagaaaaaaaattcttagtaaaaagtctctctatggcttgaagtagtctcctagaaagtgatatttcaagtttgataaattcatgttgaaacagaggtttacaaggtcaaaacatgacattgtgtccactataaggttttagaagataataatttcatatgcttgctaatttaaatgatatgttaatttcttgcaagcacaaacatgaggtagacaaactaagggaaatgttgagtattgaatttgatatgaagtatcttgaggaagcattaaagatttatggcatggaaatcaaaagagacaaaaagaatttcactctgaaattgacacaagcttcatacgtcaaaaaggtggtggagttatttgagaagaaataagccaaagatgtgaatgctcccattggtgcacacttcaagctgagatcattgacttaagaaaaagctaaactagaagagaagaaaatgattggtgctcccctactctaatgtagacaacatcatgtgtgccatgatttgaacaaggccaaattttgcctacggttggacttgagcattggcaaattgtcaattggcacctaaggtacatgaagggatctacaaacctgtttattagctacaaaagacaagagcacggaaattgtgattcaaattttgctggagatctttacaagagaagatctctaactggttatttgtttacagttggaggaaatgtggttagttgaaaattaaacttccaacatgttgttaaactttcaaccattacattgctcttactgaagttgttaaagaagctatatggctaaaatgaatcatgatagagctgtgttttgaacaaaatgaagtgaatgtgcattgtgattccgaaagtgcaattcacttatctaagaattttgtgtttatgaaaggacaaaacacatcgacaagcttcatttcctaaggtccattgtcaacaaagtactattcaaggtggtgaaaatccacattgatataaactctgttgatctattgactaaggtgataccagttagtaagtttatgctctattggacttactcggtatcaagacatgattcctagagcctctaagtcaagtgcctaaatacatcaagggctacaattgaaaaaattaggaatcaaggtggagaattgtgaagtctggttcttatttctcagcctatcaaagacattcccttggattgctgacatggcatcaagaagttaaaatagtaacatgacattaagccaactgttttaactgtccaagacttaagctaatataattagttaattctattgtccttctcttctctctcccctgctaccaaattagaagcctatataaacttacctagaatgatcaactactaagttaaacagattgatgtacaaagctagttatgaaaccaggctgagagctagtgaattgagagaatttgtaggtttgttgctcaaatgagatgaaaccagatagtgtaatctttgtttgagtgtgtaactgttaggtgtgtgtcctaaaagtatgtaaagatatatttattagtttcacttgaacaaataaatacaatggtttattattatatttaaattgttaaattactaattgaataatttatgtaaatatcaaaaaattacatattcattattgagaatgtgatcttgtattactatgacagaatgaagatcacataaatgaataaaatagtcaaaaattaattaatattttgaaattcttaaattgggattgtaggtgcatttactaagtatcttgttggtacaaataatctagatttaaattattaatgtggttaaacatctcgataaaagtattttatataatatgattatatttgacaaggaccgatgtgaatcaaagtctttatacaaaatccatttactaataaagactagtattcatatcataacaggtgattatttatagatcagcttaaattctgagtgttcatgaactcctgttcaagttaattgaatttttaatttatttgttaaggtctctctaaagaataaggctagtgacttttgttttagggatttaattacatgaatgactgaaaacatgaattaacaaaaaggaatccaatccttcttaacatattatgtatttgttctcttaagggttaatcctagtattgaatgattttgagcttaaatatataataagattatagatcaattattcacaggtgaagtaatagtacttgaggaataaaaagtaaattagaagggtacaatggtaaattcttccattctaatttatgaccaatttattggaggattgaactattgtaagatgattatatcgatggaaaacataagaaaatatttatgtaaaagtatatctataacataaagaggtcaaatttgaattcatagtggaggaatatcaaaattataaataaactaatataattaaagagtttaactatttagttttaatttattggagcttaatgttataggttcatgatccttgagacatctcaatcagaatctgacaaaggtaaatacaagtagtaggcaaaagggacttatatgattagtaaaatatattactatgtagtatgcataattattggataattataagtatttaattaattgaaatacatgaatataatgaattataaattaattaatttttttttttgataaatcagcaagattattattgatcaacaatctattcaagacaaatacaatgaaagagcgcctttacat

SEQ ID NO: 112580 - DNA, 6170 bp, Cannabis sativa
aaaatacaggggccattttgtcatttaacaaaacaaatagtccaattaataatttttacaaaacacagggctcaaaatggtatttacctaaaattttatcataggagaaaaagaaaagaatattgctattaaatacatgcatgcttaacatctgaggtagcattttacaaatagttatagaaatattttattaaagcatgtgagacttgttacttaattgataaatactgatataacaacttggataatgctagagctagaatgatgtggtggataatatcaggccctctatttcaactgaacaggatatagattccttcatgatgtctctaatgaggaagttcgtaaagcactcttccaaatacatccagataaatctcatgccccggatggaatgactcctggtttcttccaaaaatattgggatgttgtgggtcaagatattgtttctcgggttagggagttctttaatccttgttctttactaaatggtttgagccaaactaatattgttcttatttctaagaagaaacattcagttactatcggagacttgagacctatatctttgtgtgatgtgcttcataaaatgatttcaaaggtgatttctaatcaactaaaaggcattcttcccccaagtaatttcagatactcaaagcgtttttatgcatggtagattgattttaaataatattttggtttcgtttgaggttatgcattatctcaaacagaagcacaagggcaaggagggttatattgctttgaaactagacttgagcaaggcatatgatcgtatcgattggagttttctttgtactatgatgcttaagataagatttgatccacaattggttgctcttatcctagctataatttatcttgtttggtacatggttgttaatgggggttgtgagttgggtcctatcatatctgagtgtggccttcaccaaggggatccattatctccttatttgtttctcttatgtactaaaggcttcacttttattataaagagatttgaaagatgcgggatttgaagggttgtaaagtgactaatggggctcctatcatatcgcatttgttatttgctaatggcagttacgtgtattgtcgagccaataatagggaagctggtaatgttctgcatttattgagtattttttagaatgcttctgaccaaaaggtcaattttgcaaaatcgtccattttctttagcactaatacttgtgtgaacactcatactagactctgtgcaagattgggcatggtagaagaaaatgagagcagtaattatttagggctcccctgtaatatggggagaaataaaacagccattctgggatttctgaaagataaaatgcaacaacagatacaaagctgggagggtcaatgtttatcaaaggccaataaagagattatactaaagactgtggctcaagcccttcccaattatgctatgtcagtcttcttgctgcccttgaaaacttgtagttagttagaaaagttgatggccaacatctggtggaatttcgattccaagaagtcttggggtgtgagctagttgagctaaaatcgattgtgctttcgcaagagtgctggaggccttggttttcataatctctatgactataatctttctttgttgggttagcaaggttagcgattggtgctttttgaaaattcacttatgggacgtgtctataaggcaaggtatttcccttgtggctcctttcaaactacttccttaggaaataacccgagcttcatttagcgtagcatctttgaagcctaaagtttgattaaagcaggggctagaattcttattggttttgggagagatactgatatcttaaacactccattgttgcccgatgacactcacccttatgtcctgcccactcacctgggtctagaacataacaaagttcaaagtttgatgattgtggataggttggagtgggatacagaggtgcttagtgatctttttgattctagggactatgagttgatattgaatgttccattgagctcttcgaatggttttgataactggttttgggcaaaagataccctagtttttactttgtaaaatttacttaccattattatctttaagagatgaagggtgcttgggatcctatcttgaaaattgaggtgtggcttaaactgtgggaaagtaggattcctcccaaggttttacatctagtttggaaggctcttactaaaactcttccaactcgaacatagtttcttactaaacatgtttatgcggggttagagtgtccattctgtcatggtgatgaagaaattatttcccacatcttcttgcattctctcttgttggagcagatctggttttgatttctctaccacacagtaccataatgtctactcttggtttcattatctggtttgttcgaatggttcaaacatgttggaggaagctgtgatgatttgttggtccatttggaggtccaagaatgacattatatggaataaaaagatgtacaacgcagttggtataatcttttatgtacgtttaatccttactcaatggaaacattctcaatctcgaaaaattgaccttctttatgtaccatgaaacttttgagggtaaggagcattggacgaaacttgattctaatatgcttaagattaatgtggattgggcgacatttcaagctgcaaatggctatagtgctagggtcattgttcaggactctcaaggccacttggttaaggcttattcaatctacaaaacaaaggcttttgtcatgtatttcgcatcaataatttagcagtctatgatttgacaaagcatcatttttgtttagacggtgagttatcttattttgaggagaattttagacttattgcaaatatagacatcataaattcatgagtaatctaatccctatgtcaaaataatattattgtatataaaatataattttgttcacttgataattgatatacatattattatttgaacaagttatatattattattagattcaacaggaaattaactctttactgcatatatatatgttctataaaacgaataatgagttgctttctaatttttagttaatttatttgttgtcaaaatatcggaatctacatagaaaaatttacatattttagtatatatttaaccattaacattggcactgcttttttcttaattatatattaatactaatataataaggggactttaatttggtcaatatagtaatgccaaacggctatgcagtgggtatattctcccattcattctaaatatacataaatattattgaacttttaaataatttattattataagtactgatcattgctaaaaaaatataataagagaataaactattcaaacaggggcatcccctagattgaattgaaatatatatgtctcaaaagaatattatacattttcattttgacatcatatatttttttttaacaattacattaaccaatcttgtttttttttttttaacaaaatataaagttatggtgcttttaataaaaggaatatattaccatctaccgttttgacatttaaaaaaaaaattagtcaaatttttttttcatatccgagtatattataattatttgagatattctataaaattttaaaaaattcaaataagcaatgttcaaatagtctattttacatgcatataaaataagatagtcacacgtgcagcacacgctttgaaccctaatttcagcatgttaaaattttttaaattttttaaaattttgtaaaatatcttaaatagcaataacgtacatgatcatgaaaaaacaaattgactaaaagattatttcatataccaaaatagataaatatacatcaatacatctcttttaaagaggtgcattatagacttttttaaaaaattataatttcacttaacatgccacgaggttcatgcatacacactattattttttttaagtatatatttaagggtatttttataatgcatcccactaaaataagtatattgatacacagtgatggattcaaaaattttgatctataggagtttaattattataaaatatatttgtgtttactttaataaaaaataaaatttttcctaataagtttatttaattttaaaaggtttaattgttataaaaaattatttgtggagactattttataattttggtatataattattaaattataataaaaatatttggttttatatgtgatttttttccggtggaccctacaacccccataattcctaagctaggtctgtcactgttgctgtattcctaactattttggtatctaaaagaattttttaatctaatttttttatttgtgtacgttatatatggttattgaagacattcagtaaaattttgagaactttaaaataatttataatatagaattattaatatgcatactgtctgttttacacacgtataaattaaataaaaaaatcatacatacaacacactctttgacgaacctttttttttttttttttgaatttttcaaaattttacaggatattttaaataacaataacatatacaatcataaaaaatagattaatttttttttctaaattctgaaataaataagggtgcatcgatacactcctttgtgcattgtagaatttttctatatttataatgagattttttttttgaattcatgttaattacaatgattaaattagtacataaagtattaattaatctattttttttatataaattaaatcacactagacataatatttatacaattattataactagtgacagactcaggattgaaagtggatggcgttatttttttatttttttatttttttttgtaagactggaacaaaagtaaacttaagtgatggaatttaaatacttgacttttatgtatatacaatctaacttaattacaccaacttaatattatatttataaatattatcttttattaaaaaataatcacatcacttagccaaagatcataaatagtatataatgagacaaataattttgttactctaactaaaagtaatttatgattatttttatttattttcaataagagagataattatttatttgttcaaataatatttcaataaaaattaaaaactattgacacaaatagttggacacattgctcattgctgtaaaattgaaatagacacaaatttatacttttatgattttatcccaagtgcttccatgaataagctaggtattattgtagtacaaaatacacaaataattaacaaccaataataattagaatatagactccaaaacaccaacaccaaatatgtttcatcatatatgtatgtgtagaattattgtagaacaaatattttgttgtttgtttttttatatatacaagtaagaaaagaagaaagatatctatattaaaattaattactatttttagttgtattgccaatatataataaacaagtatctctaaaatctaaatgtgcttctctattggatacatatatatgatggacaacactataatagctagcacacaatatatatatacactatttattattatatatatatacttcaatattcctccacttgccattaaagttagtgggattaattcaacttttaatataatattaagattacattatttaattataaataattataatgtatactcaaacaatgagttgaaattatatatgcactaagttttagttcaaaagtttttattcttttttcaatagctagctaggcatcaatataaattaatatgtagtgctctttgtaatgcatggtgtgtgatttcttacgtaaattttagattattatatattgttagtgtttttctctcttttactttttttttttaaaaaaaaaataaataataaaataacttttttttattaagaagagaaaactttaaaactcttcatatattttttatgaccatagatcgagatagaagttttgaacgtagttatcaacttttggaaataaagttttgtaatatataatagttatatggatcgatgatatgtacatacatatatatattaacgaaaagctacctgcgaggtacgtatattaaattttatgctagtttttttctatattatttgaaagtgatacaatacaaattaaagaaaaaatattattag

SEQ ID NO: 112581 - DNA, 3337 bp, Cannabis sativa
  modified_base (39)..(51): a, c, t, g, unknown or other
  modified_base (3274)..(3276): a, c, t, g, unknown or other
tctttattgatatttaaataatagagattacattgaaannnnnnnnnnnnnagggcataaaacccaacaatagatccatctaaggcgtacgaaacctctctggcagtgctgcatcgaaaattctctagacacacggctctagatcttcgtcttctgagtaaaatctgactccactttttttttttagcaaacgttttgtcactttttttaaggtcgtggttttatcttctagtttcctcacgtggtcatacaggagctcacgcccccaaatttgatcattgatattatttcttaagtcacctctatgaggcttaatcctttctccttgcaccttttctctttatacattcgagttttccattgcctttacttgcaccacaaagcactcatcagtcaagagacccaacaaaaaaaataattaacagcataaattagatagataatcaatccaagtaaaaataagaatataacccatattgattatcataagtataccaacaatccatactgattatcataagcatgacaactatccatgctaaaataagtaactgcctcaaaaggcaagccataagcattactatataggataaacattctagatctaatctaataaaacattcttgataccacaactagtattcaaatagtattgttgttgtcaaaccagataacccgaatacctagtcaccagtatgcctgatatgtcactgtcgctatctaatgagaaattcaggaagtaagaaacctaacaatagttatagtttagagtcatgactcttctttcatagcagtgatgaccactttctcactttcataacagtaatgacaattttattggtttcataacagtaatggccatcactaaacatcaccatgctttcataacggtaatgaccgtcaccttgctcgcataacagtaatgatcatcacttttcataacggtaaagactgtcaccttgtactcataaaggtaatgattgccaccttttttaataacggtaataactttcaccttactctcataatgataatgactgtcacctttttttcataacagtaatgactgttactttgattgtcacctttttttcataatcaactaattcacaaacaatcttgatcgtgtttgacatgctatgtggtaaagatgtgcttttcttacttcaagttctactccaagtatgttggctaacctgtatggacaaggatcttcgatcccagcccctatgtcacaataacaaaaataataattaatcacttaacctaacccgttctaggtccttaattcatcaccatacgtcatctctataggtcactaaggtaccaataccctaaacatcgagaaaacatgaaaaacaggggctctaaacaccaataaaaatggtaggctaatttttagtggtttctagtagggaaaatgatagatcatttttccaaaatggtcagtcattttctacaggaaacgtaaaaccccaatttttaacttctcaaaatcccacaaaaacttaaccaaattattccaaactttagagaacaatcatacaacatccatacaataatttatatgtgatagaattcaaaatcatgccctgacatgaaaagtgccttgagagctcaagctttgagcttaaaagctcaaacttgactcccacctcaaaacagcagtacaacaatcaaatgagcatcacaactaatcccaaaacaccccagaaacaaaaccaaggctcaccaaactcccagaaataaaaaaataaaactcaactattaaaacttatggattttccaaagaaagaagaaccaaaccttacctcaagattcgacttcaactacgaccactccttagctcctcatagggctagaaaaactaattctttgatagaagaaatcaagaaaaaagtgaggtggtaagggttctagcttgctcgagagaaagggaggaggggatgagggtttcattgatgtttttattttttaaattaactttatctacatatatttatattactacacattttgaaaaaataaaacaaaggtaacaataataataataacgattaattaattaaaagatttattttaccatttcttagccactaagaaatctctaaccctaggttatttggtcaaattcgagtatcgcaacatacctcggtaaatctaaaacctacttatctcaataattccattagagttactaactaaaatcgttgtgaaatttttggcctctgatcgagtctccaaggtcgccaaacctgacaatatttttattccacgaataactcacattataaccacatattctaaataaatctttataattaataaattacgcttatttatccacttatggaaaaaaatcataaactacgctaaattagattagtaggatcataatcctactcattagtacatgattaacccataacatataataaatcctagttattcataattaggtttccaagatattacaaatattccctcttgatggagatttcgtcctcaaaatttacctaaataactcgagacattgctcctacatctatgactctaactcctaagtcgcttctttaaccttgttgtttctccataaaactttaactagtggaattttcttattctgaagttctttttccttccagtccaaaacctggataggttgttcgtcatatgataagtctttttgaagctcagtgtcatcattgctaaaaatttgtgtcggatctgacacgtactttctcaacctagatatatgaaacacattatgcactccggtcaatgcatgaagtaaagctagctgacaggctaccaggctacctcgctccagtatcttaaaagggataataaatataggcctcaactttcctttctttccaaatctacatatccctttcataggtgatactcagatatatacagaatctccaagttgaaattagatatccctatacgctatgggttagtgtagccagtctgtctactttgtaaagcaagcatacgagatcatatctttttaatgggttcactagtcttccggactacttcagatccaagataccatctctcaccagtctcctcctagtaaatgggtgatcaaaattttctaccacataacatctcgtaaggggtcatgccattggtactctaataactattattgtacaagaactcaatcaagggttgaaactttttccaggaaccctcaaaatctatcacacatgcccgcaacatgttttccaatatgtgaatggtgttgggattttatgccctnnntaaaacccattacaatctaatttgatttgttatcaataaaagattagaagtcatttatgtt

SEQ ID NO: 112582 - DNA, 1582 bp, Cannabis sativa
cctaaatgctagtattgaagaaagctcggccttaaaggaggtcttaaactgctactctcagctctcggggcaaagcatcaatttggaaaattcagacctttgcgtgggaggaaaaatttctaatgagttggcggaggctttggctgccaatttaggagtttctcttgtgaagactcacactaaatatttgggcatgcctacttttgtggggaaaaataagaaagaagtctttggtaagattcgtgatcgagtggaagctaagcttcaaggttggaaggtggggctattttctcaagcgggcaaagagattttgataaaggcgatagttcaagctttgccttgttatgtaatgagttgtttccggatttctaagggtatccttcatgagattgaaagcatgattgctcgtttttagtggggcgctacttaaaagaaacataaaatacattggggtagttgggagaaaatgtgcaagcttaaagaacaaggaggcatgggctttcgagaattagaaggctttaatcaggctcttttggcgaagcaaggttggaaaattttgaccaatcccgattgtctcttggcaagagtgctgaaagccctttatttcccaaataataactttcttgaggctaaagtgggacattttggctctcatatttggcgtggtattgtgtggggtcgagagcttttactaaagggttaccggtggcatgttggaaatgggcttaccataagaataaatgaagactcgtggcttcctagaggggtcccctttactcttcgatcaaaagttataagtgtccccgagggggttactattcatattctactaaaccaagaagggtcttggaagagtgatgaagtttctggctggttccaccaagatgacctcccttgggtgttgggaataaacccaaatcaggagcgagaagatgttattggctggggggttactccgaatgggcaatatactgtggctagtggttacaagcttcggttctgtgatcctcagatggttgaatgtttagataaatctattcttaggaagtggtggaatttcatttggagttctaagttaactcctaaaatgaagaattttatttggcggcttttccaccactcaaaaccgagctaaacaagagaggtatggctttaaatcatttttgtgaccattgtaatgtttttgttgaagatatttgccatgctctttggtattgtcctaagattcaatcgatatggaagcacttcagatttcttcatcttttcccgtcttacatcggtaaagcccctgatttcctctttattatgaaggatcgttgttcaaaggagacttttatcctttttcttggtgttacttggttaatctggcatcgtagaaacaagtgtgtctttcaacagaagaacatagataataagtgtggattgagtgggccacgaacttgcttgattactagctaaaaatcgattataatcctcctcaaccttcctatagcaatattcaacataaataaattaaagaggaataaagaaaagaactgtttgaggataaattctggatcttcacttgaatctctatgctctt

SEQ ID NO: 112583 - DNA, 2061 bp, Cannabis sativa
tgatacccataacataattggtcacttaattttgtatcacactttataatagcatatacattatacatatgtgcccaaatagaattttaatccaacaaattattcttgtaataaataaacctacaaccaagtacccaaaaagaattaacagttaagatagattaactttacctactttccaacaaagccccttattaagcagaccccttccccagagaagactctgccaagtgaaacaagggcaatgacctttggtagcatttagaaaggagttattgttgaaatacttagtttttaacaacttaacaataacataattaggaaaggataaaatgagccaagcttgcttagcaagtaaagcttgattatgaagacatagaatgaaacctcatcccaccaaaaaaatttagaatcacacaaacgagcccaacccttccaatgaattttacctatagatctccatcaaaatttagccattagagactcaatatttttacaaataaagataggaactctaaagcaagacatggaaaaagaaagaatagtttggatcagagcttttaaaagaacttcatttccagccatagaaaacaatttaccattttaagaattgatcttagagctcacattttgaatgatataaataaatctagatttcttataccttcaaaacattgagaaacactaaggtacttactaataaaagacttattttgaagccctatagtggtgtaaacatacttggaattattagaattagtattagaagaaaataaaacaaaggatttagaaaaattaactaattggcccgtagctttgctataatgtcaagaatattcctaataactacataggactaagaagagagagtagaaaaaagaataaaatcatcaacaaagagaaaatagaaaataacaggagaagaaagacaaatagcaataccattaaaacacttattctgctccttcattctaatagcatcacacaagcccttagaaacaagaagaaatgtgtaagaagagagagggtcactctacataatacctctagttgttgaaaaagtttcagtaaattgaccattaacaagtaaatgaaaagagacagtgaaaatacatttactaatcaagaaaataatacgaatatggagacatattccattgtgtcacactttgtaagtgtattctaaactctatatgtgaattatatgttatagtgattaatatttatgttaattattagttttcatgaaaaataaatcgatcctctagcttacatttcctacaagagaatgcaggcttgtccttggggccatgcaacctcaagtcatatcgtctcctttttgggtgggtctcttaggatggctttctctgtctcggtatttttatctaggttgttggggttttgttgtggagttcaagttttgttagtttttttctttttctgtgtaataatagtagttttgagatggaatctcattcattttatccttaaattctaacactttaagatattgggcttctgtcgtttttgtagagtattcatttgtctgtcaatgtgggttgttgttgttgaattatgtctttgtgagattttgtacaacttagttttcataagacttgttggggttgtgccatttctctcttgaatgtactttatcctttcaaaaaaataaaaaatgtaactcgtgaccaatacgatgagagtaatatctatttcaaaatattattttaatataatctgttttttatttaagcgtttatatattactaccatgttttatctgggactcgaacccaggacctccaacacacccacccgcctatggtcatagtcattgtttactcattaattattgagaacaacaatatgtaaaaatatatgatactattgtttttaatcataagctcaacctaattggttcttattaaaatatactcctctgtctcctacaaagttcataaagtaacatatatatatatatatatatatggataattttttaatgggtaatacccattaatgggtacaaaaaaaattgatgaggtgacaatttagtgactt

SEQ ID NO: 112584 - DNA, 1784 bp, Cannabis sativa
  modified_base (1736)..(1738): a, c, t, g, unknown or other
ccttgctctttagtccattgtattagcgcatgtttctgtctaataaagattattttcattcaaaaaaaaattatcagaaattatttctatttaacactaagttgtataattattatttcaaataattattctaatacaaggttcacatggacatggacgaactcgttttattgaaattctcatttttgaagttttataacttggaaattcacaaaataatttccaatacccgaataataccattctaagcctaaagttgtcataacttgtataattaccaattttatgatttttaaatattttacatggttaaggtttttagcttcaagtcacttcgcgtaaaattctaaaagtggcaagagtaacacaaaaataactatgtataatagaattcacataattcatccattcttgacctaatagtcacagaaaatacaattaatttagatacatacgaaaaaattgtatgttacatgcagagcttatgtcattggaaaaatttcaatactacaaactgtcgaaagtccagcctataaatacgcaagcagtttggacatctctcttgttcaaggaaacaaagtcaatcaattctacaagtgaataagagaactttctgcaagaacgatcaagcttgagctcagttataggaatcgagaatgaatgaatatttatttgtatcaaaatttagttatgacacgtgtacacaatttaatgtttttattcaacttgaataaatttacgtgattgtgtaatactttcgattcttatttcttaattaatctaaactgattttgttcaaaaaagtattatatgtgacaaagcttagaaatgctcaggcaaaattgcaaaaagattggacattcattatgcataagaatagagctcaatcattcaactctacattcagttcaaaagttcaaaaagactaaggaagtacctatttaaattttacaagtattaaactaacaaaataaattaaaatacttgttcgaaattcgaattgctcaacttttcatcaattattatttttataaggcaaactaattatttattttataaagtgaaacataatataattggcttgaatgaagcaaggacaaaaatagatataatgagcttaagaattgataaatcgtacttatttttacaaggaaaactaactatttatttcatatagtgttgctcttctgatttggttagtctcttcccaagccttttgcaaaacagatcaactagaacaaaacatatcagagcaggacaagaaattttgaagcctgctcagaagacttgggaaaagactaaccaaagtagaagagcaagattgtatgaaagtcaacctggtcaagcagaacacaaaagtgtgaaagaactcaaagagaaagaactacgtatgacgagcaaaaataggtcgcaaggaagagagctcaaaactctacaacagaacacattttagacaacacatattatacaccaagggcaatgcatgggacacgatgaagaatgaatgacaaagtaacagagttgttggtagaaaagggagaaagtatatgttatttaaagagcattaattaaaattacatattttaataccatattaaaagttgtcctttcaaaagagaaaaaaaaaaaaaaagaaaagggacaggagaaagaagtcatgatcttttcaaccttacaaaaactatatctttaaaataattacatttgacgagatctttttgttgggttttatgccnnnaataaaactcatttcaatatattcagatttaatcattaatatagat

SEQ ID NO: 112585 - DNA, 1184 bp, Cannabis sativa
aaaaaatacagtaaaaaagttaaaaataccgcctggcagtatttttataaaaaaataactaaagttagtataccatgtaaatttctcgtaatttaatgtattcctagagatactcctattaatagtgtaatgtagatttttcaaaagattacatggaccagccagaatttgagtggatttcctaatatttcattattattattattattggcgtgactttctatgtgtctgattttagcgagtgattctagttaaacctccgctcagctattttgtggttgttatttaccaagtagtgtgctgtgagtatgtgacaaaaaatacacaaactgagaaaacgagaaaaggcatagttgaaaaagataacaaaatcaacagatggacatggctgcaacgaagaacacgaactgtacggacgagagatggagtcttgaggggaaaacagctcttgtgactggtggatctcgtggcatagggtatgcatatgtgttatataaaaatatttatatatgatatggttaacttataattaattggttgtagtagttatgtaagtctaaattaatacaaaatttaatcttttaggcatgccatagtggaagaactagcaaaatttggagccatagttcacacgtgttgtcgtaaagaaaatgagttagataagtgtttggaagaatggaaaaagaagggtttcaaaataagtggttcagtttgtgatgtttcacaaagagaccaaagggaaaaacttatagaaactgtttcttcaatttttcaaggaaagctcaacattcttgtaagtttattttatctctctagttaacctctttttttcctttatttattctttttctaagcatatatagttatacatacaccatgtaatgatctttagtactttgatgaacaattagtgccaaatcttaatttttataagaggaccacctgtatacttagatggaaaaataatcacaaatatgctagtaaaaaattatgttattaaattaaataaaataatacatgggactatttaaggttacatttttattgtaactattatggttacatttttcttttacctataatagcagttaacaatagataaaataacatccttttctagaataaattaattataactaattattttcttaaaataattaattgaatatttaacaagacctttt

SEQ ID NO: 112586 - DNA, 1697 bp, Cannabis sativa
  modified_base (1671)..(1672): a, c, t, g, unknown or other
cttactctggaattactttccatgaaataaatccccaagtacaggtttcgtcttaagtttatcgcccgaagttgaggtcggaaacatggggttattagtggtcaatgtttgtttcttaaaataattgaactctgtttgccgttgctcattttgtgtacgagtattttagtaactacaatattgcaaattggaatcgatatgccttttaaagtaggattggagtttcagtttaaaatccattgagtggcaaagtcttgttgtttaatccgtgctgttatttctaatatagaatatttagaatactatctctgactctagtggcaatgtttataggcaattagcagtatttttattttttttttgaaaaaattattgacagtttctgatggaatggttaagaatcttctgactttgaggcttggttgatttattattattattattatcgaaacctaactactatttaggtatatgacgtatgaatttagcctatttataatcttgacttatttttttgtttggcaaggcgaaaggaagaacgaaagagggcctatcaattattatgtctctcacaaccatctaaagtaataaactacctttccaggtcttttttatttttgatgaaattttcagatgaaatttggttgaagcaatggatattcatggcaattatttaaatttttgaacatctaactaactaaatgatgctgaacttagttcaaagattacaatctcctcaagagaaaatttattaaatacactcctcattgataaacaattagctttcttttcttgttcaaatacgtatagaataaaaaaatatatgcattttattttttatgtttggttacattttaaaattatttttgttgctcctaattaaacacacttttaattagttttagtttagcataccattgtctagatgcttgttttaaactatacaagcttttgtttaatttgtaaacagtattttgtggtatcactcctttaggagtgtaagaggtagtttcatgtaaatatcttattttaaatcaccatagaggaagacattgtctatatccatgtgatggagataccaatttttagtggcgggaagagcaaaaagtaattttaatgtgttgaactaagctacaggagcataagtgtaaaagaagtctatacttagtttttgtgtatatcgtttggcaactaatcaagcgttgaacgtgttaactgaaccatctaaattgtatttgatcttgtatacctatatattaccaatgacatattggttgggtggaagggttgtgacaatttaggtatggtttctttctaaagcctttatttcatcatccctaacttttatccagacaacatattttgaggcttcagtatatgatttaggtttagataaggtatgagtagcaagtattgcagccctgtaaaagttagaaaaacgatgataagatacataattagctataggatagttggttgaaatagcagccttgtcatatatatgtagtcttaaagatatagaggtttagtaatgtttctaccaaacctgttacgaaatataaaaaatgggtcacgtaatacgacaggacgacacgatttgccctggcccctaatttatgacaccattgattttaagttaactaattataggagaattacctcatatactannttttaactttttttttttcaaattt

SEQ ID NO: 112587 - DNA, 3125 bp, Cannabis sativa
gtgagatactacttgattgcgtacacttgcgtaataaacataattttcgtaacactgagccaaatattcctctgcctaatcccattcctatggctccctctctaaagtgaagtaatcaacctacacttgtgttatctgactctgttacatccttaaagccatctcctactcctcaacctaatccaattcaacagtctgtgtcccagtccaatggtcccataagaaacaggcattcaatgaaaataagagccaaattagggatctttaaacccaaagtgtatgtagcttttcaagaacctactagtgtgaaaatggctctgcaacatgaaaaatggaggaatgctatgtcagacaaaatgggagccctgagaaaaaatgtcacctggacttatgttcccttaccagatgggagaacacctattggatgcaagtgggtgtataaaattaaactaaatgcagatggtactatcaacaaattcaaggccagattggttgctaaatgctttcatcagcaactagggtttgacttcactaagacatttagtctagtggttaaaccagtgacaataaggattgttttgtcattagcattggccaaaggatggtgcatacaacagttggacataaataatgctttcttgaatggtgatcttaaggaagaagtctatatgactcaggcccctagtttcgagttaccagatgcacctcacttagtatgcaagctaaataaggctatctatggtcttaagcaagcccccaaggcttggtttgacaagcttcatcaatgtctcttgtcctttggttttgtctcttccaagtcagatcacaacctcttcattcaacatacttctcattctatgattctgttgctggtttatgttgatgagatcatcatgactggtagtgatgctgcacaagttgctgctttaattcaagcattagacaacaagttctcactcaagaatcttgggaaattacattactttcttggaattaaagttgaacacatagaaacaaggctccatttgtctcaaggaaagtatataaaggacttactatgtagagctcaaatgtaggatgccaagcctgctcctacacctatgactagtggtttaaaattgtctgccttttaaggagaccctgttgagaatcctcagcaatacaaatacatagttggagctctacaatacttgactatcaccaaacttgaaatctcatacagtgtgaacaaagtatgtcaattcatgtcaaatcctcttcatacacattggaatgctgctaagaggatcttgagatatctcagtggaaccatttctcatggcctgactttacaaagatctgctgagcttgatgtcactgcctttggtgatgcagattgggctagtgatcctgatgataaaaggtcaacatttggattttctattttctttggctctaatcttgttgcttggcaatgcaagaagcaacatactgtctctagatcaagcacagaagctgaatataggagtttagctcaagttgtttctgagatcacttggatgcactcattgtttacgaagattcatgttcaacttcctcaatctcttgttatttggtgtgacaatttgagcacaattctccttactacaaaccctgttctacatgctaagactaagcatattgaactggatctgtatttcgttcgttaaaagctttcttagaaactggtgcgaatccaacatgttcctgcaacagaccaaattgtagatggattcactaaagccacttcaacatctcgatttgatttgttcaaagctaaatttggcattggtccctgcaccaatttcaagtttgagggggagtataaagacggctagagagtaaggtagttgttagtggttgttgtctaattctgttacaattctgttatggtctgttacaattctgttaggagtgtaaatactattcatcttttaaatatattttaataatattttaactatattttatttcatttttattaatatgtattatatatattaaaatataatatttaaataatatcataaagatagagagaaaaaaatgatatatggtgttacatgatgtaaaataaagaaagtaatattttaataatgtattttaaagaatagaataaaaaaaattgttgagagtgtagtccatccttagtgtaattgatagttattagagcatctccaaagagacattatttttggtattacactatcactaaatttggtgtcaaaaaatattttcactccaaccacaatactaaaatttataccaaaaaatatattttattattaaacaatatataaacaaaaattagctattaaatattattattattaataataataataataataataaagatgcagttactacagtgctactgcatatatgcagtgcactgtagcaaagagtgcataaattacctcaaaatggtgctaccttggagaagattaaccactgcatcctcaaatttgggggttctttggagttgctcttagcagatagagagggatacaggaacacgtgggtttcatcttttcaaaaaaaaaaaaaatattacattccaaaacaaaaatgtaggaattcactaaaaaaaccttgtaaagattaaaaatacaatttcctagtggaaataacaaaagtaaataattaaaagtagagtatatttggtaaaaaaggaaaaatagttgatgaactgcttacagagacttattattagtatacagatgagacatacatttgatcctctttaagggttgaccaatttaaataataaagatatagtgagaattttatattttgcctaattttcaataaaaagagaaatagtaaattagtacttcataaaaagagaaaaagaaaaagaaatcaacataaccttttttttttcgcatattcgtaaaattatataccatcgtcttaccaaaccaaaatttaactatatatttttatataaaaaatttatgtacatctggggaacgaaataacaaattaactaaaaaaatataaaagtgtaaacttaaactgaattatgcgtagttttcagaaaaaaaaaaaataaaataaaacagaacaaactgaatgatgctttaaacaaaaaaaaaaaaaaa

SEQ ID NO: 112588 - DNA, 1231 bp, Cannabis sativa
ctgccgctgcctaggagcctggttctggttatataagcagacactgatgagatggtatatggtgattaagacagaggtagttccagctgctattaggaggaaagttaatttgtggtccttaaagaggcttccgatgccatctcgatcaccatcgttgttgttggccattaatttaaaattgtagagaatagtatgtgatttaaatgagtataacaatatgaaaagagtggctgagttaccaatataatcaagataagatgatgatatgattaagcggtggatcatgttatgatgatattgtctattattattattaatgacggtaatagcaaagactataatatgtccagttctactgctcctctctcttgttctctgccttttaattttgttacaattattattttgtagattattaccaatttatccttagtaaatgggtgcaattttcattttctttttctttaaacattttattctttttatatatactagaaatgttacttgtcaaagtcatgcatgcatgaatagttttagttttagacataaattatgcaatttataataatttatgtgtaatttataatgctatttattttttatttattataaattacatatatgctatattttaaacatatgatattttttttgaaaaaattgaatagttttaaaaaatatcataaatataatttataataaataatatttaatgtttaatttcgataataatagtaaaataatcatatatttccaaactcaaataaataattaattttcctaaaaaaaaataaataaatacttgattattattgaactcaccaataaaataattcagtttattaatttcattattgctccatataaataaagaattgcactctttgacaatatacaattatatttacagaattcttacatgtagttcattgatataatataagttgtttgtcttccaattattagttcataattagagttggtcaaaattactattttacccttctaattaccattatagatttggatccaatactcctagaattaacactttaagggtccgtttggtatgcagaagttaactagattggattggaaaagattgaactagactggacaagattggattgtgcagaatgtaatcatgtgtttggtttaaaaatagactggactattttatttatttccttttaaaaataaacttaaattaaataaaaatatataataataa

SEQ ID NO: 112589 - DNA, 8474 bp, Cannabis sativa
actgtagcgtgccttagcattagggcgttacaatccagggcctgaaaaattctccacgcaccaggccaaaaaatccatgttttgttgcacacccgtgcctattcccactctgtcccaacaaagcttagccactggacagataattaaaacatgtaggatggtttcatcatcaagagaacacaccggacagagagagtttgccaccgcatgtttagtccgaagctgaaacatggtaggaagacaatagatacccgctctccaaacaagattcttcatcttagggggcagcttgagagtccaggattttttccaaattttttaaccaaagactcatccaagtccacgccacttttaagatcctgaatgagtttatacgcacttttaacagtgtataatccagataattccccactccaaattagttgatcatgagccggtgtagtgtggagaggaatttgaagaatcaactctttgtctcttaagtcgaataaatcattcaatacctccacatcccattggcgaccacctgaagtcattagattggcaactttagcatttgcaagactcggatgcaaagatgtaaccaagggattgcctttatcaagtaaccacgagtcacctattacattgattgttttgccatccccaactctccaaccaactccactagccacaagattttgagcctcaagaacactccaccacacaaaacttggattggaacctatagtagctgtaagaaaagttcctgtggggtagtaacgagctttaaacacacgagccaccaaagattcaggtttaaatagtacccgccacctttgttttcccaacattgctaaattaaactcccttaagttaggaaatcccatacctcccttcattttgtgattacaaagcctcttccttgacatccaatgaatatccgtattgttgtcagaagaagactgccaccagtacttggacataagactctccatatctctggttacctcaagaggtaaaagaaagacattcatggcataacttgggagcgattgggcaacagactttattaaaacttcttttcctgctctagatatgaatttagttccccacccttgaagtcttttttgaactttctccttcaagtaacccaaagctgctattttatgacgtcccattgagcttggaaggcccaaataaagactcccatccaacacagcactcattcccaataaaccacaaagtcggttcctcattgtctcaatagtgttagaactgaaaaaaaatagaagacttagataaattgactttctaacatgaagccaattcaaacttatggagaacttctttgatttgcatagcttcttatttcgtggccttgcaatataaatagttatcatcagcaaatagcatgtgagaaatcctcggagcaccattagcaactttacatccatgaagccaacctctttgttcatacttgcagagtagcgcagtgagaccctcaacacaaagaataaacagatacggtgaaagaagatccccttgtcgaatgcctctcgatggaataatcagcccaacttcgtggtttgcatgaataactttgtaccttcccgatgttacacatttcaacaccaattgaacccaattttctgaaaaacccattttacggagcatcgtttcaaggaaagaccactcaactctatcataagccttgctcatataaagcttgagagccatgtacccttcttttcctgtgcgttttctttgtaagtaatgcagaatttcaaatgaaaccagaacattaccaaaaattaaacgacttgggatatacgaactttgattatctgaaatgaccgtatcaataatcagcttcattctgttgaccataaccttagtgataatcttgtacatgatattacaaagtgcaattggatggagattagacataagttctggattttcctttttcggtataagcacaacatttgcctcactataatcgtcccccaacgtgcactgattaaagaaataacagatgcattgcaccacatcacttcgaacaatcgaccaacatttcttgtaaaaagcaggggtcatgccatccgaccttgggcttttatccggatgcatctaaaataagactttcttcatttcttcttcgacaataggctggcataactccatgttaacaccgtcagacaccacctttggaacacaatcaattacctcagcacaataagtgtttgcagttgcgaacaaaccattgaagtaatcagatacgacattagataaacccgactcccaagttacccaatttccatgatcatccttcaactgctcaatctgattgttcttttttctgctgcttgctgccttatgaaaatagctactattttggtcaccttcacgcagctaaaactgtttggctctctgcttccaataactctctctctctctctctgatgaagggccttgaatagttttttcttgacctcgttataacattgaactaaagcctcatccctcttaccatgaagcaaactcaactcctttttgtgcttttttatacggtgattaagcgtatacatgctatctcttttccccactcttcaaatttttcagcacacagactcaacttttcaccgaaactagtagcttgaccattctcccaacaatctttcacaatttcgtaacataatggttccttcaaccaggtattttcaaatcgaaaacgacgagttggaacaaaaacattgcacaccgtgggctcaaaaaaaataggagcatgatcagaagtagaaaaatttaagtttaaaagattagcagaaggaaagacttgaagtcatgatgacgtgactaaagctctgtccaatcgactttcaatccagtgattagtacctcttcctttctcccatgtgaacgggtggccttgcaactccaaatctgtcaagtcgcaccgttgtaacactcagttaaaacctgcaaggagtctttggggggtaaggtcagccccctttttatccttttgtctgacaatgttgttcatatctccaattatgcaccattgcaactccaaacgagaggataaagtttgaataagattccaagtgtcttgccttctattacaatttggctccccatacatacccgttagcctccaattaccaaattgaacagagttaacaacaaagtcaatatagtgatttgagtaacccaacaaaaggccatcttctttatttttccataaaaaaccaagtccaccagccaatccaattgaatctacagtaaacaccccatcaaagcccaataatctagcaagcccatcaacttttactttttgacattttatttcacataaaaatacaaaattgggttgcttttgagaaataatttctctaagggattgaatactctgttggtttccaagcccccgataattctaacttattacattcataattcttggcgggtctggtaaccagagcccgccccaaataagttttttgaacccaccacatcattcatcacaacattactaatgataacatttatttttatggcattttgcacgttttcacttgaagaagtatggcccacctccacttctttttcatcacttggcccactatcttggtccatgatcattcttcttcttttggagtcaataaaaatcagcccctcattagattcttcctccaactttgccatgttttcctcccccataatcacgtcccctgatatatgggatttaatttgattggcaatcccattatccatggctccttgattattcctccctacagtcaatcccgaattcctctcctgcattaaatggtcaccctcactccccactagcgccagaattacagtccggccaccactgtgattacttggagtcccacccgcacgataaccgaccctagtagccaatcctgaccttaggcatttagaaccatcaacataattacgtcgtctcggagccgctttcaactctaatccatatctctttatgatctgatcttttggagtgtcaaacaacctttcacaaaatctttctgaatggccgaggattccacagataaagcaaaacgtaggtaaatgttcatacttaaaacaaacatggcacaccagccctccctggatttctagtttcttcttcttctttaatggaacatcaattggaagcttgactctaatctgtaaataatcacgccacactccggaaaaattattcagatccgatttgacaaaggtctcgatataattgcctacccccttaataaccttctctaacataaaatcgattgtcatgttatgaagttgaacccaaagcttgagtttcgttagcgcaaccagccggggattcaccccttgtgtgacgcgttcaaagattagtggagctcgatcgaacgtccatggactttcttcgataacacgctcgatatccacttcgtggtagaactgaaataaaaagagatttgaatctagttgcttgacatatagacctcttcccagttgccacaacgtggccatcttattctgcatggcttgatagtcaatggatcggttggttaagaatcgacccactagcagccatcgatcatcgatatctgttaagccatcctcccccgcatcaaacaccaaccctttctcatcttcatcttcaatcgtgaaactagcatagtcatcaactatgttctgatgttgggattgtcgttgattcatcatagtcgtataaaacaaaaaaatagcacaatcggacaagactaaacttttgaaaatactcaaaacaaccatgtcaaaaaacaagacacaacaatcaaaaaaaaattacgattagtttttactaatttaaatctaccgtatttaagtaaaaagttttcaaaaccacatattgagtgtaaattctactaattcatatatttttaaggaaaagattcatttttttacttccaaaatgttatattttaaattttttctattatatactaaaaaaaatataatttcggttgtttagaaaaagtccaatttataatattttttttagaaccctaaaaaataattttaagaaataaatatatatcaataaaaaaaacttgaaaaaatgtcgtttttatagcttaatcatagcttcattaattaaaaccttaattcacatagcattctaaaatatcataataaatcaagtaatatcatgttgtatatatatagataaatatatatacatatagtgtacgtacagaattactaagaagaatagtgtgctatataatattatatattaactaatagtcgatgattgagattgagggttatacgtagtagtagttgtagttgtagcagtgtggccaaaatcatgatcatgatgatcatacttaaaacatctcacaaaacactttgccttattataatcatcatcatgacctaataattcatcattcacaatctcattctcttctaatgatctcccattggtttcaacagtgaaaagataagtgattaccatacccaccaagcacactcctcccataatcaccaacgacgcaatcattccaattccttcagggtatccttcttccgctttattgtgagaagcccacaagaaccctaacccaacaatggctcccacctttccagaagccccagatattccatgacacgtggatctaaaccttgccgggaaaagctcagcaggaactatgaaagtggtggtgtttggtccaaagttagcgaagaagaatgtgagtccgtaaagaaccatgaatcctttacggtggtcgtgattctcccaaaaactgtagtaaggtataccaatggagatgtaaacaatggccatgactagaaaccccatgagctggattcttacccttcctatacggtcaatgaagtagactgtgaaccagtagccagggatggtggagcagatggctacgatggcttggagtttggccacgtcatatgcgtctctgaatacgctgacttcgttggccggcttaagaaagttgttgtagacgtgggactggaataggttgctgctgtagaagacaatgtcgacgaggaaccaggcggcggagcaggcgaagagatcccgcccgtggcggcggaagaatgtttttgagaagaaaggatattggtgtgtttggttgttggggagttgtacaagtggtccatcttctgtgatttggctcatcgaaacatctaataccttctccatgtccttggctgcttgtaccaaattttgctcaaccaaagctgtatatctgatcaacataaatttatataatttctacttaatttaataatttgataaatataaaaaataatgatgatttttgtataaataatactagttaaaatgattattagctaaattaatgtataaatccatgaaaataataaattaaatgatgactactactggtcaattagaaagttattacgagtgagtactctaatgtcacatatatatatatgacttaattcataacaatattgtctacattccaataaaaatataataatgataaatttaaatcacactctttcatttatctaattactaaaacttcatagaattatcacttgagataactatatgtgtgaatattatgattattattatcattattataacgttcaacaaattacaggcaagaactcattaatctagcaaatgaatcatcatcatcacaccactactaattaattattactatagcaaatatttaaaattataaaataaaataattaattattaatatgatataaatattttcttaactatatatagatcgcatatatatgtatatatttatacatgcatgaacgagtcaaatcagttaatgatgatttatttaacatataggaataggatatatttaattaagagttagtcaatgatgatgatgatgatatatacatacatattatatatatagtacttgtttacctggcagtttcaggcatcatcatacgccaataataggtcatggcagcggggatggcaccaatcatcactatgattctccaagcaatatcagcctcttccggcgtagcagatccacccttcagtccattattatttgacgacgaagaagaagaagaagtctcctcaaatatcctacaaacgatcatggtcaccatggagctggccagaatcccaatcccctgcatcgaaaacacagccgctataaacgacccacgtgtcttcttgttagcaaactcagacataatggtggctgataacggatagtctccaccaatcccaacgccgagcaagaaacggaagaatccaaagctagcaagaacacatcccctctttgtgcatactgagaatccacaccctatggcgctaagcaccatcatcatcagtgacatgccgtacacccttctccttcctatcagatcccctaaacgcccaaacaccagctgtcctatcactgtccccaaaagggacatgccaaccatgatggaaaccactgccggcgggacctggaatctgaggtcttgggggtttttggtttcttggtagtaaattcgaccaaggagtctcatgattggtggtatgcagaagaggtcgtaggcatcggtgaatagccccatccctgctatgattatggccttgaagtggtaccattgtgttcgtgccgtgtcaagagccgacagtactttcaaacccatatctagatcgatcgatatctctctttgatgaaatattgaactgattgatacgactgtgatatgatcaaatatatctatggtgtccccctagacaacaataacaaaatccaaatccatatatatatatatatatatatatgtgtgtatgtgttacgagtaacaatatttattaaattaaagtgtatgactacagttcaggtgcattaatttcgtagccaaatatatatgtaatcgaaaggtgttgacttgtgtagtcagttaatattccaataagatgcggatcctattactgcaaccgcgtcatatttctatattttaatacacataattgatcccctttctcatctcactatttacatattccatcattgagtattgctacattagcttaaaatatatatttttaattttttatcccatttactttgatacttttgattaaattttatatttatatatattctttctcccaaaaaaaaaaaaaaaaaattaaacaatatcatatattcattgcccattttgaacaatgatgtttataaagttggtttgaaatgttaaccaaaatgtatatgtaagaaagactactccatgggcaactcactttagaacatctccaatggtaatattttggagaatgcttgatgaggtcgaaagcttatgtggtaaaatatagagatgatatactattggagataaaagaatattattcgtaaaatttgcattgatgctatgtcttttttatacaataaaaaattaaaagtggaatatatatatataatagtttaataaagaaaaaaacttatatatatata

SEQ ID NO: 112590 - DNA, 3687 bp, Cannabis sativa
  modified_base (54)..(57): a, c, t, g, unknown or other
  modified_base (2560)..(2561): a, c, t, g, unknown or other
tgtacaataaaaaaaaattgaatggtttatagcttatccaaaccgcaatcattnnnntggcctattaaaatacctctaacccagccaaccctgtgcactcctatttaatagttagttcgcttcaattttccttataataattattaaatatatatgaatacatagaaaattgattcttaccagagagaacaaccatgtccttgagatcaaggcctacattctgaaactttgagagaagtaatggaacagtggagtttgggccagggatgttgttgtttgctgctgctttgttagcacttaggctgtctttccttcccatttgaacttcccaactcggtccacctgactacaattagcccaaaataacaatagcattaatgtctctaacaaaatcacctgatgattttataccaaagaattctactactaataataacaataattcattattatgacaaaccagaaggacagagtccctggcggcgacagcgagaatgtcggcgcaagaaacggttgcagggcaaaaggattcaagctctgatttgatagcatcaattacttcaaaaccccttaaggagttgcggtttggtgctgctgttttttctccaacaaagttgttagtgtcatctaacaacactgaaccatcacacccctgcatatgcatatgtataaacattataaaaacaatcatttttgatgcataaataaaaaaaaataataagttataaagacatgcattgacaaagcagtcatgaaagtggagacgaagtagggaagcagccattctagagtcctccataactgcccttttgaccaaagaaaagatgatatcttcagcttctgggcaagcgtctttgtatacaccaaacccaacaccaacacctacacctacaccaacactaacaccaccattttcatcaccatatccaccactatcactctttgcttttgagaataatatcataataacaagattcaacatgagtagaacctgaacaacaaacttactatccattcccacttattcaattttcaaatattttcttgttaataataagtgaatagtttcttctactatatatatagtttgatttgatgtacaaaatggtggttaaaaaaaacataagaagaaagacatggtcaagagggtagctttggaagaggtcattgagcatatgattttgtacctaataccatgtgcaagtgtgatcactaggcctacgtaagtattatctaattttctctatatctggggcttttgttatgattcactttcattattatcacctcaaaatacacacatatatagttataatatcaaatagtctttgctgagctcatgaaatatttacttgtctggagagaataaaatttcctatcttgatttctaccgaaaaaaaacaatgaaacacagtagtcaaataggaaagggatgttgcttgctataattgaaaaggattatattaatcaatagatttattattattgcactacatagataatgatcataattaattaacctattagcattaaagtaaaaataagtcgggaaactaaattatatgttaaaaaactaggctaactaaagtgatgagaggattattgtttgaccatatatattagcatatttaactatacatatatatatgtacatgtaatgtgtgtatgtgtgtgtttagtcattagctcatccatataatctcagacttataatatcactcttcattgatggtccgctaacatgttatggccactcaactcataatggatacatacctgggcttgtagatgtggattttgctgatgtgcgggctataatggctcttcactgatgggaatacgaactccaacaagtgatggctttatgctacaagcaactaaagtatatgttaaaattctgatattatgacgagtttagttgattttataataattttcttttctagaacaagatccacattaatcttttttgtcatgacttttcattatagcaacttcattgaacactactttctcttgggtagtaaatataattagaattaaatgaattgaacttctcaaaagttatatatatatagttggagcatcaaagaaatatcatcattgggatcaatggacctttgtttacagaaatattatgaataatttgtgttatgtgattgtttaccttatttaagtttctcaaaatgctcatatgtagagctattaatcctgtgcctgcggtgcttatttttgagtagataagaataggacaagagatgctacattaaatgccattcaatctcctttactagacattgggattgagagggcaactggcattgtgtggaacataggtgaatgctgcagcagcagaggttatatacaatacaaccttgtgcagggccggctctgaaaaatatatgggcccaagacgaattaaattttggggccctcaaaaatatataaaaaaaaattaaaagaagagtattataggatttgaactcatgacttggactttatgtcatccacctcaaccaactaagctataaatatttattgcttataatacacttaaatnntacttaaataaaagtctaataattttttttatttttttatttcgggcctccggaaagtgtgggccctaggcacgggcctagcccgcctatgcttagggccggccctgaccttgtggatccaactgcaaaaaaaaaaaaacacacagaatgtccactcgggtgcatgaaccttgaactggagtggagtcagaactggaatggatctcaagtggacctaagcggacttaagtagacctgagtggacacttttgacgtagctccactttggacatgagtagacctgtatggacctgggtggacctgaatggacttgggtagacccaaatggacctaaatgggtctgggtatacctgaatgggcctgagtggactttgaggtccaattgagtagacttgatgtttatgtcttcttggtaactcttcgatatcttggtcatggcacctggggaactcagtcgtggtacttggagaacttggtcatgggacccgcggagtgtgatcattatgagacctgcggagtgtctttacaatgtccatttttcttaggaacgtccttgatatgttgaagagagtacatgcatacttacttggagaacttttttagaagtgaatgccatgttggtgagagagcctttacatatatgttgagtgaagaggttataaatatagccaaaagaaaagataaaaataaaaaataactcgaataaattggatttggggtaaatactattttggatcttgcgttttccaaaagttaataattggatcatctgttttgttaaatgacaaaacagaccttgtattttctaaaatgataaaaatagaactctaatcttaatttttgataactttttttttaatatgatcaacttgaaaataattcctaaaaaatgtaaacagttttgtcataacacttttaatcgaatcattattaaattttattttgacaaaaaaatcagtttatggtcctatttgtacctaccattttgaaaaatacagggtattttgaaaaatacagggtctattttgtcatttaacaaaaacagaagatataattgataacttttgcaaaacacaggatccaaaatagtattgggtgattctacaatgcaccccttaaaagagat

SEQ ID NO: 112591 - DNA, 2566 bp, Cannabis sativa
ggaaagttgtttcagaattaccaatgtaagtgcaaggaggttgcagcccatctagggttgtccaataaaaataccttcgacattccttgatggttgcgctataggacttatctcctttgacctctcctattcttcctctagtaggggaggaggttcaccatgaggaggagctatagcaagccacccacgataacctgagggatggcgttgaagtgcaaggccaaggggagtgtgcccatgtcaaaagggatcattctaagagccaagagggtcacttttaggatgaagttggtttgggaggaatggaatatgcatccaatgtttcctttgatcctttcaacccctaatgtctcttcggctttccccatcctgcctatggccctgatgaactagcatgatcccagtcccaaatgacctaattttctagcaggcatgattgtttcttgggaacatacacctcgcaagagtgatcatgcctccaccagttttcagatgaggaccgatgtgagccagccctcaaatgtattagttgggttagtgtttctttgttagaattggttttttttctttataccttcctatgaatgatatcttaatttcaaagtttttttgtatgtttcaggcgtctatccttatccagtacacacatgatgctgacactttcgatcaagttggcctctctcatcgccaaaaggttttacaagacttgaccaacatgactgtcaatcaggattgcctctaagccaaagtcaaagagcttgagcctagaattgaggatttaatcaagtaactttaataatccattgagcttcaagactaggctaaacacaaggagactagggcgttggagaaaaaacgactgcttaaagcccaaatttccaagcttaaaatgtatattgttgccttgtagcgggacagtaaggactaagaataagacaatatcaaacgcatcctatatggtgtgtagataaaaaatctccatgctaattttagcatttttttgtttattttcctattacatgattgagtccttcaaggtagaatatgaagaaaaaaagaggaagcaggagactatgcatcgtcaagcatctagaaatcttgatgcaggcgaatagtagctctgttccatctcgtgtaagatttctattctagaatctttagggcttgttagtatgacccctctatccacttgtttctttaaattggatgactgtattgatttttgtttttatttttctttttgtttcactttatgatgaaaattgtagtaattttgttatgcaagggagtatttatatgttaacattccttaacctcttttgacttttcgaattcaagggagacgttgtttctttgaaacttctctttctttttagttattttggatttaaggagatgttggttctttaaaccttctcaacatttttttacttttttttttgtctccttgcgtgctttaggagttttatatgtgttgagaagcttccttctcattttttgcatgtgtctttcaagaatatttttggctagacaactattattgctctacacttattctatctttttgtttgccttttttttttcttttttttccgaggttgctttagtgctatcttttagaccgcaaggttagctaatcctcgtgttcctaagagttttaccgttgtcactttatatacatatttcttgttgatatatggtgtgaggtccccaagtgtttgatagtattgatactaacggacacttgagtcattgcctatttgctacagttgctacgagtatgtaaaacaattgaaatttgatacttcattaatattattgagaacttgggttacatcctgttataaacatgaggttgctcatgacatcctctttcacaaattctcaaggaaaaatatcatgactctccactttctaatacattcaacactacaaatggagggcatctaggatgtgctctttaattgaaagtataaatctaacttcttacttgatgatcgtgtgatgtcaatgttccattttcattagtaatacttttttaggtgttcggtgttacagattgataccgtaatggtcccaaggggataggttagaggtcatactcttagaggtgacagggtgcaggaggtggtcatgtgtcaagtaatggctgttaggcgttaggttttcatagcatgtagaggtagtggttgcagcgtaccctttgttaggatgtcaaggcgtgcaggcgaggtacctccactactcgtacgggaagtcctcctctcacaatcatcgactcatttcaggtctcacaagtgacgtgaccgtacactgacatgacatgtacttgaccacatgctcaccttgtccttttgattttacatccaatggttttatctctaaaaaatttactaagtgtttattgcattattaagggatgtaaggactcacggctgagatgctcattgtcatgagcattaccgagatgttgtccatggcatgcatactaagatggtcttaaggcatgaatagaaagattctcttcatggcatgcatgccgagatagtcttaaggcatgcatgct

SEQ ID NO: 112592 - DNA, 2060 bp, Cannabis sativa
cgattcatttatcatcaacattggggacattattcaggcctggtttttcttcttcattttttttttctttgagtaaaactatatggtttatctttatgaaaatttaaaggaaatatttgaatgaaataataaaaaataatcaattttcattttatttatttattttattacatttttaaagtattataatgtaattctaataaaataaatttaatagattgactattaaattttaaaataaacagaaaagctattagaatagatgacaaaaaataataactaatatgttatagtttcttgggtctgcagctattaagtgcttttaacaaacttttttcttctaacttccacttcccctttctccctttgatccaaatcagttatcttcatgtaactgctaatttttctgggttcgcccctttctttccccagtcctcttcttcccttttcctctgcaactgctttcattcaacctctcttctgccatggatcccctgagccattctctgcaacataacctttctcttactgatgaagaaaggtctactttggtcctcgctgatgatgacacctctgctgctatgtcttcttctgtccatgttctaattgcaaaagttcttactgtcttccatgtccacaaaccaacctttttcgaccaaatgtcgagccactggaagggtcgctatccagctattatcactaaatttcaagatgatatgtttaaaataactttcggttgtgcaggagacaaattcagagtccttaacaaggaaccatggcatttccaacaccatctaataatcttacactcaccagatgctctgcaaaaggtctctatcactgatctagtctcaactcctttttgggttcaaatttaccgattgtcgtttcttagcaagtccaaatctcttgctagaacactagggaatataattggagagtatgttgatgtccatgaagactctcttgatgaaggatggggtcctttcttgaggatcccagtgaagcttttggttgcaaaaccgctcccccgcggacaaatgatcagtctaccaagaattaaagatgaattttggattgactttcgctatgagcgtttgcctgaaatctgttttgagtgtgggcgccttggccatccttttgaaaaatgtattgcttttatggaaagaatggataatgggaatgatgatgatttcctgtatggcccttggatgaaaggagcaaaactgccttcaaatggttatgatagatatagacaagattttgctaaagggaatgcatggcctttcttaactcgtctagcatgtacctctatctctgcaaccatcccaaaactggttacacaaccattgccccagcccagttcccttattgttggtgaatcctctaatcatagcccatctgcccttacttccaccacgtatatattccccacggctgaccatgctaccaccccacaactcacatttcaacatcataaccatttccccaatgcatcttcttcactgcctactggtttacaccagaccaaccaccaacgaatccccactgaccacactgttttggcccctgcatcacatcagccttccccaactatacgcttaccctgtaaccaattggttacttcaaacaaccaaaaaactcctcctgcttcatctcacagcaataccaaattaaaatagcctatctcttccaacaccttgcatttgtctcacattttcacacccgacattggccaagctttccaacaccatatacccatagctacttaccccccttcatcatcttttccaataccaaatccctatgtcagtaatatgccatcacttaacaatcccctcatcacaacctctacttcacctaccatctcccataacctttccataactgacaacaaggaaaattataacccaaataagctgtcaaagagaccaagtgatcagatttcaatgagaaaaattttgaaacgttgtcgttgttgggttttatgccctaaataaaactcattacaatctaattagttatcaatttagaagtgaattatgattacatgtatgtta

SEQ ID NO: 112593 - DNA, 2980 bp, Cannabis sativa
agaaaaagaatgaaatggcaagaggtatacccatgagtatttcttcacgtcatccatccaattgaggcacatctctttttagaaatgggagtcattcatgaggctaccttttttcctaatatgagacaaagagcaaacaccatgctatgtgatattcctcaggagaaaaggaatggaagattactctttctgaatcattcctcacaagctgctatatattcaacttccatggttgaatctgcaatactggtttacttaatgcttctctagactacaactccaccatcaagaatgaatactgacctaaatgttgatttttgactatctttgctagattaaaaatcataatcagtatgtataataggactcaactctcctctagtatacataagcatgagatctctcgttcttcaaagatacttgagaatgtgcttcaagctacccactattcaaaatttaaatttgattgataatgacaaacaattcctactacataacatttttaggtcttgtatacagcattgcataccttaagatcccaactgctgatggagaaggatacgttcctgtgtgctccatctcttatggagcctttggacattgatccttccattgagaaattccatgtttgaacagtagctatcctttcttagaattctccattgagaatatttctagtattttatcgatataagttatttgagaaagtgctaatattctcatttttcaacctctatagatatggatgctgagaacatagcttacttctcccaaattcttcatttagaacttttggctaaccaattctttacgtctgataatgtttctatattgtttccaataagtataatattatcaacataaagaacaaggaataccactacattacctataatgtatttgtacacacatgcttcattgacattttgcttaaaatcgtatgttttaattgtttcactaaaatagatatttcaagatctagaggttttctttaatccataaatgaatttaaacaatttataaatattttgatctccccaatctagcacatccccttcgggttggtacatataaataaattctttaagattgccacttagaatagcagtcttaacgtccatctgcaaaatctcataatcatatgtggcatatatgaacaagagaaggagaacagacttatgcatggccacatgagagaaggttttgtcataattggtgccttctatttgtgtatagccaaaatgctctataggtcttaaccattccttaagcattgctcttattcttgaaaatctatttacaccatatagattttatcttttcaagtaggacttcatactcacaaatttttttggtgcacatgggatacatttcttgatccatgaaatttttccacttgtctgagtcaggatcatccattgcttcttcgtatgtcaatggatcgtccttgtttgtgtatgagataagaacatgtgtctcatgttcgcaacgaacaagctatctcacaaccatcctgctatgaagatataccaaggttcccattttaggaattatggtaaccttgattggtcgtttggctagtggtattggagttaacggttcacaattctactttccttgataatcattttttttttggtttgtgatctctcatataatcttgttctagaaagattgcatttgtagaaataaatatcttatgatcctcatgactatagaagtatgcacctcgagtttgttagcctgatttctttacagggtgacacaactttatttcgagtgacacgtgaaaaatattttaggacctagacgagaagtacgatccttggtataccgtccagagtggtttattatccagaaacaactcatttgaagattaaggtggaacatccagacaaggtgaatacaactgtctgactagctttgattttacagtaaggttgcatacaacgaccatggtaaatacgatggtaacagatcctaatgtgaaaactctttttaataggagtgatccaatggtggaaaatcttgatccgagcacccgtctacctacacgagtttaaccatcaataggacagagagtgacaactcctctggttgggttcactccaggcacacaagaaattggaactactagtactcataatggagagactgggttgggtactagagatccatctgttggagaacctcgagttgtgatcggtgatgatattgagttgcaaaacctgtgagataccttagggtgaaattgtaatttataaaaattattattttaaatagttatgacaattatgaattgtgtaattaaatagtatttaactatttagttttatttgattaaactatattaagtagttaaatatatattattattattattaaataatattacagagagaaatatattattttagtgaaaataatctttattttaatccctgtaaaataagagattaatgagaattaatcaattaatatttttcggtaaagtaaataataaatcttatttgtggtaaaattgagaaattaattttggaccttaaaatatgaccccccacattgtaagcctagtccacatgtgtagggtgacatataaaggcacatgtcaattttgtttgattattttattgttaaaatgattcaaattaaattaactaattatcttttaattattgaatgaatatataattagataatctatttaattaaaaatataataataaaaagatttaactaatttttgttaatcttatatttgaattataattaaaatcaaattagatattatcttttattttaaagaattaaataaaggtttgattataaccttattgatatgatatatatcaataaaacaaataaccttaagaataagagaatagagcaatacttttaaagagaaaatatgattgaatttttttgttctcattaattctctctctctctctctctctctctctctctctctctctctcct

SEQ ID NO: 112594 - DNA, 1069 bp, Cannabis sativa
tgcgcctttctgaagccgggagcatgtctacttcaggaagcttctcatcttcaacctcactaagaatagcctcatttatttcttgctcggatgttccagcttcttgtttctccgactcagataggaggctctcctccacttctgaatgttttggttttgagaagaaaactaatactaccgggattataattggcgttaatatgagaacaatcaagcctatgacaagcaaagtgagcaaagtttcattcaagctcataaaatcctctagtatcaggactccaagcaaataagctgccaaaacaagacaaatgcaataggtgaataagaagctagaaccatcagattctctaacttgtttatgaccttcaataggtcttacaatgtacatcaaagcaatgacaactactgttggaccaactgcaaccataaaaatcaatgctgctttatctggtaccttaatcatataatacacctgagtcaaaattgcaccacttaacccagcaaatccttttagtatcccaacaacaggaccccggttttcgggaaagttccgaacacatgaaagcaaaactgctgtgttgaagaaggtctctccatttgttcccacatatatatacatgtgcatagcttcacaaagaggagacaaatatgatcaaatagtcttatactaaaccagtttcagttatctaggtctaagccagtcatctcattcatcattattaatacaaactaagcaaagtaaatgggggttcttatgcacataacattttaattgtagtaaaaccagtttgagagtttatcttatgtttttcactcgataatctttccttcataaaaaatcttggttttggcaacagttcaaacagttggagaacaaagcaaagtaattggggacttcttatgcacataacaatcaaattataatctttttgtgtttaattgaataagggcaaagaaaaagaagatctttactgaataatacttaccacccacaaaggcaaattgggcaatctctgagtgacaataagccaaagcaagccatacccaacaaaattctggagagcaccaa

SEQ ID NO: 112595 - DNA, 2836 bp, Cannabis sativa
  modified_base (403)..(413): a, c, t, g, unknown or other
  modified_base (1089)..(1092): a, c, t, g, unknown or other
  modified_base (1510)..(1511): a, c, t, g, unknown or other
gatacataatcccagacagatgaggttagctggattagttatccagacttctaacatgcccaaacactggatttgacaaattagcctatctacaccaatctagtcctacgtaccaaacgggccccttgtggtttatgttgcattgctgtaaacaaagttgaactgtcaaaaaggataaatgatgttggctcctagcaactcctcattgaatgtgagaaaggcactcgattcgcttttgcagcaggtttagctgcttgagggaccccaaaaacattccaaaaactcaaatcccacattattgtattgtcgaaacttattcttttttttcatatttatttttaagccttatggtatttttgacaagaatggactcacttatattaatgtgggggctatagccccnnnnnnnnnnnatattaccttttaaaaaattaaatgtaattttttaaatttgataattataagttaaaatagtagaaaaacccccacaaaattaaataaatctaataagagtgattataatataagtataaatattttttaatgataaataagcccccacaaagtaaaaattctagctctgtcactgattgctcaagctttattgtatttgtgatagtttaattatttggtgatagtctaaaccgcaaaaactgcaccgcaccgcactattttttgcagtgcgatttttgcggttttttagtttcgcggtgcgggtgcagtttgggaaattagaaaaatcgcatgtgcggattggtttgaaaaaatggtcaaaaactgcaccacccgcactgcaaataccctataggctatctcgtaattatattttgagactcgatttcttttattttttttcttttcactttgttatcaaaaaatatacatgatatcatatcactctaactttttaatttatattttttaatcttacatgttatttatggattgtatggatttaacatgttttatgaataaaaaacatcatttatgtttttgttttgatcagaaaatattagaatttaacgataagatgaatgaggttctatttcaaaatcaattggctatgggaggagtagcccattcatcttnnnnatcacaatttatttccacacattatcaacgtgggactaactcttaatacatcctcctcacgtttgggcctgaaaaatgtaagtataacgaacgacctttaagagaccactggactgaacgtgacatttaaaagaatcccacaaggccaaatatcgataaatttgtgggtgtacacgtcgataaatttgtagattttgaaaccggtcaaagacctcaacactgaaaatgtacacattggccgaaaggtctcaaatggaggttgaatgggagacagcggaagtatctatttggactagcgacactttcgctcacaacggatcacaaatagtttttgaaccagtggaaatttgggctcacaacggatcactagtgactctgatatcatgttagaatttgggaataagatgaatgaggttcnntctcaaaaccaattggctatggaatgagtagcccattcatcttatatatcacaatttttttcacacattagcaatgtgggactaactcttaatagaaaagacattcgtaaaactaaaaatcaacaagcaaagtagtgatcttattacactaggcaccatctcccaaaaattcaaaacccactaaagacctatatctgaaaaagactaggaaattaataaagcttcttcactttgggcaagtttcattttccaaatcctagttgcaaacaatcagcgctacaacaccttactattacccaaagtaaatggtaacaagacttttttttcttggacgtttgagttacaactgaaatagcaacttcaattgcaatgaaaattcacatagcaactcacttaaaaattagtggagcaacctaaaccgtaaatttaaaacaaaaggttaaaaaaaaatagtatataaagtaattctccaaataaatttaaatagtaaggtgacgttggattgggaggaataaaaacatataaatgagaatgagaatgataatagaaataagaataaaaagaaatgcataaaaaatgataaaaaattattaatatttttctcatcatacattagaatgatttttccttccatttcaaaataaaatagttttattggaatgatattccaatacttatgtaatcaaacaaaaaaaaatgttagcgaattattttttatcaattccattctattttattactttcaacaaaaggccacttaagataatttgacatcaaatcatttcaaagcttcctctctctccctactttagttgtttaatttatgtttataactttttattttttatttatttttttaataatatttttttgtaaataaaaatacctacaaatatttgtgttggtatttttttaaaaagcaatctataaaaatgtatacatttttattttaaattaaaatgggacctgctcgtgaggtccacaaaaaatttcaaaataaatatgactttactaatttttgcaaattaaatttttacatcttacttaatggaaaaaagttcatgatttattcaaattcatacatttatttattaaaaaattaaaattatataaaataatattaagaaattatatttaaacaatactattcatgtgcttgcacacttctcgaccaatcgagtgggtattaatttttagggtaaattgcggcataaatacttaatgtttcagattttatacacttaaatatattatttttatttttggaggcaaaaatacctaatattacaattttcttacacttgttactaccacttccgttaact

SEQ ID NO: 112596 - DNA, 1188 bp, Cannabis sativa
aaaaaaacaaaatatataataaatctcactctgttacttattagtccttatggaaagtactgcacctacccacctctctggcgccacctaaataatacaaagccaatataggaaaatcgacccaccaacgtgactacttattaatttctcaaattaattattttataatagacctattaatattattattatttgcatgcacaaatcaattatctaaggaaatattagagccattcattattttttttattcttttttctttagctttttaccaccaatttaagatagagacgtagaatctactttgttgtagaacaacgccatgatattaaaagttaaattaatttgaataataacaacccaaaaataattgatatctatacaaaaccttctcccatatagacatagatatattatagtatcattaagaacaattatcaagtctgtattaatatactcgtattattatcatggttggtaattcttttacgtcttataactaggacaagtctaaaacagtagttaaataaacactgattaattgatctactgtatttaatgatagtgttatttttattgagtgttgtggttggtgaatgttgtgatttgagtattgctagtaggcaccagtagtgcctagcaccttctcgacatgtcacgttgcgattgactagcgatactccccaaaatttattatattaaattatgtgggacccgatacttagttggaccaatagtaatactgacacataggagggtgctaggcaccaccactggtgccctttagcatttctcttgtgatgttttgtttggctaataaaatatttcattttttcaaagtactgttttgattaaaaatggtttatgtgattgataaaaaataagtcaataatttttatttttttgggaatcatttacccctgttcattttttatctttcttctacctactttgcctcccaaaaaacctcttctttttttcttatgctatctcctctatttatataagggtaaatagcggcaaaattcctaaaattttcattttagttttacttaactcccaaaacttaaatttgggcggtaaaacccccaaaactacgatacagtttagtaaattacaacttccatccaaatttagctgttaactgccaagttggattgtccacgtggacacaatatacacgtgaca

SEQ ID NO: 112597 - DNA, 2564 bp, Cannabis sativa
tttgtatgtgatgaaacctttgtactctatggatgctagttttcattgatgagactttttctcttcttttttgttttcgcaccaagtagttaaccgatgataggtagatttttgctgattttttattgttgattttaatattttaattagggtacacaatctcaatatggtacttcatttgtataaccattagtttcagacttaaactcagagctcagtggtatgtctactagaaaacctattttcatattcttgattagggcttccatttgttgttgctttgctctttgtcaagtctcatctaatctttgtaattgtcctcttggaataataaagtttctctgcttccttccagcttttatgtgtataggtagccatttgcaaaggagctttgctatccatcacaatggaatttttattccaatccacttgtattggatcttaaaattttacaaattaataaaatttattaaatgaacttaatcactttgcaaaggaccaatcaaataaaaccgaatcagctcgttcagattttttaatcaggatgaatagaatttttctttccaaaattagttattgaaggatttaaatgtaaactatctagaacataactgctgttataaaatggatgaaaatatgagcacaaccagcagagctaatgtgcttatcctgtttacttgttttttttttctttttttcttttgattgaagcgtcttattagagttacaaaatctgagatttgatcccatgacccccacacacacacccctgtaagccctattgagctagcctcaagtggttttatcccgtttacttgttacaacaacctgagtgtctatcatgggttgaattcatctccaacaaaaactaactttttttttttgaagtataacttctttttatttgtagtagttgtcaaatgttacttgtgcatttcactaattctgattatgcgctatttgcttttatggtcataagtacaaatattttatctgaacttggtagtcaaaatgtctttaaaactacctaaagatgcatggataaggtgtactttctgtaaactttatatgttttgtacactttttgtagacattctctaagaatgaaagtttgaggtattagtagtatatgtgttgttatgtaagagatttaacctatcatcatcatcacgtgttacggaaaagtctcacttcatgtgagttcttttatttttttttcttacattatgtcatctccaattaaatgagcagaattgaacatttttggtttggtttctcttccttgatatggtgcttgcaaattataggttaattaatttaaataatgtttcatttgagatcattattgcccacttaagttgacagatctgaagtgtatcaatgatgttacttgtcatttaattttgtgaatttaacttcatttgaaatctttgcaaagctatcctaggaaagtagacatgtgtgcctatgaataatttggatgagagaagtgatggtttaattttacttttctgagaaaggagaatacgatatggggttttataaccaccattggcacaatgaatagaattataacattgcatgattttttttcttttcttcttgtgatgcagggtcagcatatggtggttccctccatgcaaggcaatgagtaggacacttgagcttttcattttcagtttccttctctatcttcttttatgcactccatgggtggcaaaattacattagttatatcctctttatatgaatattctaattcagtctaagaattatgtttcaaaggctctctttcccattgggtagggatttatttttacctggttaatgatcttactcatctgcagttgtgtaatgtaaatcacttgtctctcttcgtagtatagtgggctcgccatggaagactgcttagatgtatggctccaaaacctatgaaccgaagtcgttcttttctcatttttgcagtatatatggctagtcagcattattacgattgtttttcttctctgcacagtgttcattttgattcatattattacattacatgaacgacgtaactcactcaattttgtgactttttccactctatatacattcaaagaaaattgatagtgtaatttttctacaaaatttccccaaatgtctccttttcccacgttgaatgtttgtatccttttttccatgtgaaatgcagaacaatgtgtaaacgtaagacatgaatagtctaattttttttggaggatagatgacaatgatcaagttattccgattagtgatggaaatttggcatgcggggtgtgtatccacggtacccattccaaatggggcagggattatccgtcttaatgataatggtgtggggtaggatgtaattttatatacttaaagtgggttcggggcggggttggaagtgatactactcactctatattcgatctagatatatagtttttaaattttttatacagttttccaattagtacgtatgaaaagttattggctatacgtacaaagttgattattaatcttaatttactgtgttggtagaatatttattttaaagt

SEQ ID NO: 112598 - DNA, 2523 bp, Cannabis sativa
gggcacaaccacgtcggccctgaaactctgtgccagttgaagatactaggcacgattttgcagttcaagaggcacgaaaatgttgtgccaatgttctcccttttaaaaaccctaaattgttcttcatcttcgcatttcttcttcttatttctcctaccctctctgcctccatcagaccaaaacaacctcctgccttctaaaacccactcataatttgaaaaatagctgcatcccaactccaaaataaacccaccaatacctcattgctccatcgaactcgataattttccggacataataactgatagccttctcgaatgtgataatgttctatttggagttgctgctttgccattaaatcacaaaacacatccttaaccaccacgatcttcctccaataccagctactctgcattgaagcaaagtaatcccactaattttcctcctttatataaacattatgaactcattctatccatagatcatcttttttggaagttctggcccaaacatattttcccatggtagctttgttccaagctacaatgttttggaatccaagatcacctgccttttttgttttgcacactgatttccatgtaatatttcctgcattagtaccaaaagattaaccctgctgcacaagttcggatctacatatcacaatgattgatttcaagatcctttcaggaattaaaaaaattggctccaatatgtatgtattgacatgagcactgaatttatcaaataattcttcctgcaaaagagagattccttatgctccaccttcttattcggcccactattttatcaactagaacctcgcattcctttgacaagattctagttgaacaaattgaaagatacttaaacgacaaagaaattttttggaaaccagaagccagcacaactctttggacctgaagattaaaaaaacaacttcaagccctgcaacaaatagtaaattgacttgaaattttcattgcaaaaaataaagacatcatctgtaaagctcaaataatttaatgctagctccgcacatcttccatgaaacttaaagtcctctaaatttcttcataatacgagacaaatattccatacttagtacaaatttgaagtcctccatttttgcatttaaaggttatatttgtctatgtatgtttgcatgtcataatcgatcttaaacaaattctattggagtgtgagttgggtctaatccaatatttaaaaagaaatcggattactttggatcaacactactccatcgaatgaggagttctacccgctctgaataatcagatcttgtacatgagttaaacaaaagagtacacacataaaaaaataagttcatggaatatgaataaatttcttttcttttcaaagactaaaagtttcacattaatttccaataaatgaagtaagaaatagactatatctatgttaatttgtatcatgaatgacacatacttaattaatacaatataatgatcataaacatgttttttatctttggtgtagttttctatctatcaagtaactgaaagaagggttcataaatgatcctttaaggaacatatcagagaccactttatacattgcttcagtgaggtgaagtccatcccaattcaaatactgagatgggttttgacaggctttggtagaaggtgtcccacagaaggaaaatacattaacgttatatggttcatcaccagcaccacaacaagctttgaaagactccttaatgccaaacttggctggactttgcatgactgtttggtaggcagtccaataatcggcgtacgctatgacagcttgggggaattgtcttctcaaagatgtcaccaagttcaagatggctaggttgtgagtataactttggttgtttacactcttcacacaacctatgttgtctctatcatttttggaggataatttcatagtcaaaggtaagcaacctgtcattggaaagccttgaaccacaacatactttgcacctttctttaacaatgtctgtagaaaccagtaagtgatatatatatcaaataagaagagcattaataagattatgaaaacatagatagtactaatggtctagagtaaactcattataggactagcttaaaagtcatgtatgtttgtggctaagagtatgattattagtaaagtattatcttcaccatgtactcaaatattgattatgtttccttgccaaaagattgaatattaaaattatatctatagaaaagtacagcacttaaaaccttaccatgatatggttttgataattatatgcaaaatgactttctaaattcacttaatattaataaaaggtgtctaatcttactgttaaaaattgagtatagctagtcatcgccaactttcgaatagtatcactagaaaaagtggatccaaaagtataagcataatcatttgcaccaatctcaccaacccaaaacaatgagttttcaatgtcagcaattctacactttacatcctgagctttacacccaacattttcttcca

SEQ ID NO: 112599 - DNA, 5681 bp, Cannabis sativa
gaatccccgccccattaggggcggtccccgcggggccccatccccatggagaaaatgtgcatccctaattataaccattgggcttattcatattccttttatagtacacatgtcaacttttggtaaatagtcaaatttcgggtataacaaaacaaaaacaacacaaaaataaatgtaaaacaatgaagcagatataaccacttagaaaaacataaaagaaccacacacttcaaaatttttttgccagtgagctcgtcaaatgtatttataggagaaccagaataaattaaccacaaaaatagccatagagaaggaagaagaaatatatttatagcttccatctttcacacctacggtcagaaccaccacaacaacaagagaacacccaaaaaataactattaatttcggcgagatagagcaagaacagtaaaattgacgtcaaataaataaattatcgcaaataactgtaaaacaacactaaaacaaataaaaaataaaataaaaaaagattaaaaaaaaactaaccctcttctgcacaacctcaacgccaaatgcaatagagactatatttgcaagcttagttctggaaaatcagaataaaaaaaaaccacactaactcttatctttcctgaacacgtgacttaaaacataactaaaaatttaaaaaactaaattaaaaaaaagaaaagaaaaaaaagaagaactgaataagaaaaaaaattatatgttaatggaaaaaaataaaaagaagaagagagtagaagagtaaaaaaaaaaggaaaagatgatgaacatgaagagaaaataatgcaaaagtgagattcaactgaaaaaaaataaaataaaagatcgagtattaaatatttagagtattatatttttcatcattaatttaaataaaaaaaaataaaaaatgtattactaaaattacaacacaactcaaaacacatttttataatacttaaaaaataatataaatggatatgattaatacttgagatgccagttgttacaaaaatgagacaattttttttatacaaaaaacaataattagtatgagccatgaggtgtaaatttatgtcttcttgattgagtcatcactcacttattggtgagacatgatgagatggaaacatataaattatttttatttccatgtgcgtgatcttcttaagcttgttttttttcggtttttttaaaggattactgttttaatatttcgtaatgtaacaataattaaatatttacaatgaagtattcgttaaactatcagaatacatgttttaaaaaaataacacaataatgagacgtagaaaaaacagaaaaattagacattgtacataaaaagaaattataggagcccccatcatatttaacatcaaagtttttataattttgcagatacagttttcttttttttactgaacaattttgcagatagagttagagcccacacatcattattccttaaaaagcaactctaaaattagaagcccttttttttttttttttttttttttcactaatttccttctttttactagcttagggaccactacaaagataatataagtaggtagtctctacctctcaatatattgcactcacttaatcaaacaaaagccgaccatttcttaatatgctttctatattatttggctctcatttttctttaatatccagagctaatatatatatttatctctaaacaacactgctatattttcacatgagctaataaatcatttaattgtgttgttcttttgtccctaactgtacgtggtcatcagtagtagtagaagcaccgttgactaattccatctgttctttattcttgagtaatgcatttgcggccctccacttataaaatttaccaaaaaggacctccatgtcctcaagggttcgaccctgtgtttccggtagcattgtatagaaaaatatccaagcaacagtagccactccagcgaacagaaaaaaggacccaccaatagtgattgcattatacagagaaataaaactcatagaaatgaccccactagtcaccctgttcaccgccacacccatactcgacccctgggcgcgtagcttcaacgggaagatttcagagctgtaaacccacgtgatgggtcccattccaatagagaaaaacgccacgtaggacaaaaccatcgtgattgacagcaccacggcccacatcagcttctcatccgactggtcaatgatggtcaacgacaccccaagtgtggcaagagacaacaccatacctcctacgctggtgagaagcaacggccgccgtccgatcttgtcgagtaagaaagtcgccgtcaagatgaaaatcgtcttcacgaatccgacggctacggtcgccagtagcttttgatcgtctgatttgatcccggccttctcgaagatccttgggctgtacaaaacgacagcgtctatgcccgaggcttgttggaagaagtggattccaatggctgagatcaagatgtggcgaacagctggcgtggggtgaaccaggagctccttccataccccctcgccgtgacttttcttgctgacttcaacgatgtcgtcagtgcagtgttcggggatcccggcggcttctttaatgtctgctaatctgagctgagcctcatctaagctatccgaagtcttgtcaaggaccttcttggcttcaccgagccgaccttgcatcacgagccaccggggtgactcaggcatggctaagactccaacggctaataggacagaggggattgacccgactccgagcataaggcgccaccccaaatgggttgggagcttggagaaggcgtagttagagacgtagccaagtagtattccagcattgataaagacctgtaaataatgtaaagttaattattagtgtaaagatttttttatatttttacattttaatataatacttgcacttttcaaagttgttagaaacacgatattggtatcgttttattttttagtgtagaaaaagttgtatagttatagtaactggtgggtgaaaaattagtaggtttgaaattatgatgaaaatatttgattttaggtattgtgaatacctcagggaatgaggtgaggaaaccacgagaagaagcgggggagacttctgctgtgtagacaggtgcgatcatgagagcgtaaccgacgccgacaccagcgacgaagcgaccgaacatgaggaaggagtaatttgtggcgaatcccatgaggagagccccagcgaagaatatggctccagcaagtacgatggtgtagcggcggccaatccagtcagaggttctaccagcggcggctgaacccagcagggagtataagttcagaatacccatcaggatttcgatctgtgtgtctgagattttgaggtccttttttatgaatatagctgctccactcattacaccaatatctgtccatgccaaaattaaataaaaaactaaatactaaataatctcatagaaagttgagcttttttgtttcattatacacttcgtttccacatgcatgcttttttaaatatactgcaatcttgaaatttaaggaaaacaaacaaagactttccaacaatattataaagagaagttaaccaatataattgttttgaacgaaaagtgtagttttgttaaacaatatgtccagatgggaaaactgaggtgtgttatatagtttattacaagatgaggatatgtaaatatgtataaactaaccatagccaagtaagatggaggtcatggaagctaaaatagcacaagccatggcaaagacattctttttgggtcttctcggaggatcaaaatcctcaatggtttttggttgtcgaccgggaacctcggcattctgtacagctttccggtcagccatattcttttttattttttttctagagagatttattgtatgggagacgagaagagagatatattctaattataatttggtagagagagggagagagagagtgtgtgtttaattaggatcagaccatagaaattggaaaggttgtgcattgcctagctggttgagcatagatcacttatatagacaaatccccttggctgacgtaatctttgaacatacactccaagaaggcagctcttggctttacgtaattcgggtggcttatttgtactactttatacttaataaatagttaaaataatatgataatgagaaaaatgaaaataggctatttttttatttaattatttttatgtcttatcctcaagtgggtcgactgtgtggagttgcactgtttattataattttttttttttaaaacaaaattaacgttttgtagataaaaaaagtaaaagttagactttattttcattacaaaagattataaaatagagatcaattagaacagaagagtcttgctaaatattaatttactttgtaaatgaagagacctagcaacctccaatccaatttaattaaactcaattaattcaatataattgattggattgaatgttaaaaattaaattttcattagatttgatcaattattgaatatcaattttgttatcctaatttttgcactctgaagtagcatcacacgatggtgacacgtgcgattaattttgtgtatctgctcgcaagaaatatgccgaacaaggcaccacatatattcgctcggacaaagcctttttaacaaggcagtgagcagtccgaacagcacgccaacacttagcgaattcaattctcgtatcgtgagtcaccaaaaaaattcttataattttgggattagatcacagagatatgataagctgtctgaatcccttgattagtgtattctgtatttaatatgaaatatttccacttatatcaattgaactcataagggaaattcttccctctcaagcttatagccatataaatagtaattcatactcactaggcaaagggtcgaaaaactgatctaagaattcatattcaaagatactattgtaagagctctaagaaaatggattattttccttgttcttaagtcaatacaaaccaagaggattaggctattaccgaactgctcggagctgaacctctataaaattctcgtgtctttattgactttattatacatacacattatactacttgtcgcttacaatttagactcactgtcgttggccaaaagcgaggtcagtattttagtgcgcttccattgagcattgaactcaagatcgttctcaaacctaatcataaatacaatggtggtacagactcgtagaggcgtggctgatccagcaaatccacaagcggtggatcctacactgcagaacccagggaacacaagggttccaccaaccacaaatccccaacaaccctcgatcgtaggtcatggagtgacgactcctgtgagtggaatcgcgcatggtgtgtaagagactggcagttcagtagctaatcagggcattctcaacactgtcgttctgctcgtaacaaatgttcgaacaactattggagatgacaccaaaatccagaacctccgcgctgctcttcgagtcatgcagggtcatactaacaccttgcatcacgatcaggaggaactccgtttcgcggtaattcttgcatttgaagagcagaggcgcatgttcgctgaatggagggacaaggagatggaaacgttaagggctcagcaagcagccattgacgactgaac

SEQ ID NO: 112600 - DNA, 2611 bp, Cannabis sativa
gagttgcataattctatcatcctaggctgaaactttagtttgcagtgtcttcagtctattgtctaattgagcacttattttcatttcagatttctttgaagtgggaatctgacccacagactgttcttatattgacaaaaccaaattcaacttctgtgaaacttatgtgttcagaaatggtcaggtgtggttagaaactgagatatccttagttttctccttacaaaagctcattttctagtagctgaaatgaaagatgtcctatataccaagagctcttttgcacccgtagtcatttataaggccattttattattcttttctcgtatagtccgtttaatcctcctcattcatcattgtttcattgtaagcagatggttaaagcatagaaggatgaacatttatgtggaaccacgtgtgcaaactgaacttctaacagagtcaactgacttcaactatgtccatagttggaaagatggtgaggagcaaaatatttttcattatcacttattttaatgcttcaacttcttgatttttgaatttaatgtttaaatcttttccttttttcttttgacagacagcgaaatcaccctccttcacaaaaaagttgatctcgttgtaactctaggtggagatggaactgtcctctgggtatgtgattccttacatttcgaaatattcatatagtaaaaagaatataaagaatagttgagaagtcagaatccagcaaagctggtgtatcaaatgatattatcattatctgccttatattgctgtgttttaaaggagttttcttcagatcttagagtaacctactgattgctgtcttaattgcataaacttaattttgaaaatgcagttttgaacccttgaaatcgagaatttgctcatttaatatcatttcttttactgtaatgatatattctcttagcatctaattttggttgtaataacctttcacaatttatttacaggcggcatccatgttcaaaggaccagttcctccagttgtcccattttctttagggtctctgggcttcatgactcgtttctgtatcctttgactctgtgtgttttaccaccatgccaagtaatagtaatttataaatgttcgtaatattaattatttatacttaagcttacaagcaatggtagccctctgttatgtctcttcccaaccacatgcttattacttttttctgtatgtctgtgctcaaaaaagttatctttaacacattcttcagacagtgaaacctacaaagaaacccttgatgcaattttaaagggacccattaacataacattgcgacaccgtttgatatgccatgttatcagagatgctgctaaaactgagtatgaaactgaagaaccaatacttgttctgaacgaggttacaattgaccgcggaatatcatcctacctcacttatctagagtgctactgtgataattcctttctcacatctgtccaaggtgatggcttgattctttccacaacatctggtagcactgcatattcactggctgctggaggatcaatggttcatccccaggtacttaaagatgtcatttttgtgagagtttgatgaaatgaatgatattgcccatattgagcttctatgttttatttgtataggttcctggaatactgtttacgccaatttgtcctcattcactatcatttcgaccactgataatgccggagcatgtaacaatacgtgtgcaagtgccattcaacagcagaagccatgcatgggcatcgttcgatggcaagggcaggaaagagttgggaccaggggatgcacttgtgattagtatggccccatggcctgttcccacagcatgtctaattgactcaactactgacttcttccgcagcatacatgaaggcctccattggaatctcaggaaagcacagtctttcgatggccctcgagatacataactaatcccttacctctttcttctttcttctcatgagtcttacttctcagtttcaagtttcatctgcgaggataagaaataaaaaacagagaaagaggatctaattagtaatttgacgactgtcacgttttcatcatggaacactttagtatatgttagaacttagtcgagtgtattgcaatgtattcatgtaaaagccaccagtttgtatgagaaatttgtgaacagaacattttcatatactatcacttgtacactaaatagcaaaaatagtctaatggctcatttgaatttgactcattattgtcattattgttgtcattgtatctcattctaccattataaataagctacatgagtgagtcttatttagattttattttttgacacaatatttttctaatactttcaaataagattttttttacagtacacatgtatattatttttaataataataaaaaaatatttttttaattgctatttattttttttttctttattagtttgaagaatttatttactcttttaaataaatatttttttgattgataataataataataataatattttttttttgttactaccgattgttattttagttagttaatttttttttaaattgtatataaatattttttagttaattaatcaattaatattta

SEQ ID NO: 112601 - DNA, 980 bp, Cannabis sativa
ccataacataattggtcacttaattttgtatcacactttataatagtatatacattatacatatgtgcccacataatagcataacaaaagattattttgagaaattcatgagatagaaaaattatgtaacaactacaagaaaccataaaaaattatggattgaacatgttgatagtaaatcttgtttggcaatctgtaatgggtttatttattgaggttcattggataagactttgaaagttttgagggtaatcgatttgaagtgtttaaagtcaattaaagcacatgatgatgctataaaatcatgttacccagtttatttttgttttgttttgtatgaaaactatagcctaattactatttataaattttgggattgctcatatgaatttccaaaggcaggcagacacctaactactctctctaacaggtgcgttgaggataggccagcagccaaggcgccaatgtgatggtggccttatacgaaaatggtttggtgactgactgcctgagcggggagaacaaaggccgcatcttgtccaatgactttgtggttagaaaattctaaaaaactttgggctgtgaaagatttccaagtgaaaaaataatatctagaacaattaatttcgctctatggaaggtttcaatggaagagatctcaccaaatatttgaatccctgaacattgaattgccaaatgacatgtgatactcatcaactccaactcatttcatatagatcattgtttttgttatttacagaatcatgtgtttctctttaagatattgattttttaattagttgtttccagattggttggtttaggggatggagcaagaaattggcattatgcttgatacttgagatgtgattgaactgctattgttgttttaacaaaaaatatcaaaattcatgttttttatttttaaaattgaaaaacaaaagtgattatagaacatatttttattttttgtttttaaa

SEQ ID NO: 112602 - DNA, 3873 bp, Cannabis sativa
aaaaaaaaaaaaaaaaaagggatagggttattaaaattgttgatactcaagtgaaagaaacttgttctttcacattcagcattggtaagaggtatcaagctcaaattctgtgatactactgatatggatgttcctcgtattatctcaggtagtctatgacaatttgatgcatgtgctacttggcgtaacactaatgagaatccatgggaaggcagcatcatcaccttgcttctgataactacccccacaacatcctaatgttttttccccagccccagcttagctcaggtatccaaaataaataaatataaataataataaaaaaaattcatctttacctctcttcttgattttattccggaagcttcttttcctgctaaacgctgtctcctattagccagatgaaaataaatgcgcatcaatacaaagaatgaaagaaacaatagttctttaagcgctccatttgcattgtatgtacagttgaaccaattaaatttttatatgttcggacaacatgataataaagaatctcttttggaccttcaaacttagctaacatatatctagtatattagttgtctgccccccattaattcatatttatagaagaaaaaaacgatgtctgatcaatattcactaagttgttcccaagcaggagctacaaaaaaattactgaaattttaaagattaagttgcaggatagaaaaaaaaaaaccaaagaaaaccaatctattctaatcagaggagaatgaaatatgtgaaaaagaaaaatgtcactttacatgtatcagaattcagaatagtgagttcaagaattaccacagactgcccaagctcccctgcggactgaactgcagcaaccaagtcccggttggactcagtgtaaaagctagtgactagtccatattgacctgctctagccgtgcgaccaaccctgtgcaaaaagtctacggccgaactagcaaagtctgcctggtattataaggaaagaaatacaacagtttatgtttcagtatagattaataaatctcttcaaaaaatgtaccatataccaaaatcgcagatttcttatctaaggccatataccaatggaaagaaatatgtctaattttgtaatctccatccctaagaaagcattttaatacattcaattaaatttcctaaagcataacaaggacattcatttaaatttcctaaaacatttcaagccattcacttaaatttgctctatttctatgtttgcaaggagctttccacttgcctaatattctaaccaacaaataggcatgatcataactgacttgctaaaagtagacagacctgaataacatgtgagatatttgaaatatcaacgccacgtgcagcagcatctgtgcacactaggacaccaccattttcttgaaaatcatctaatgtctttgagcgctcctccaatgagcaatctttatggtaacgataacattcaattccagcccttcccaatatctttgctactgcttctacagcctctactgtatttgcaaaaacaatggttcgttgaccaccaccttcaaccgattttgagttggaaccttcattcacagctcttaacagttcgtctacctgagtatcaactgagacttcaacccacttctgctttaatctaaaataaaaaagaaccaaaaagttaattcatgtgaaagaaaaagttactaaatgcttcagggcaaatgaggtcattcaaaaacagaaattggtgataagataacatgatacgctagccaacaaaaaagaaagaaattaagatcccactaaaatagtagtcagcaaaaagtgaacttcacctggggttgtgacgatgaaggtagttcccactgacccagttggcgtctggaaacatctttttcaatactgcaccagcagttttctttccattcacaggaagtgtagctgctataaagatgaactgtttgctacgttcatactcttttctcactctcctccagcctgtctttttggcaggtccagcatcaacttcctcaggtaagtcatcaacatcatcctcaaaactttcctcctcatctgagatgatttctgtttttgaatcttcatcatcctctgcattttgttctgatgatttatcaaataccaagtgcataggcaacttaggtgtagactcttttgaccaagacaattttttttcatcatagcgtagcatgtgtataagacgtataactttattctggaagcccccacatagaagcatgtcggcttcatcaaacacctaacaggacaatggtagtacacacaaacacacacagattatcataatatcttctctccctcataggtagcctaacatggtatggtcattgacttaacgcgaagtgaacaaaacaaacatacatggcacaaaacttaccacatatttcacaccacgtaaaaatgccatctgacgacgtttgtgtggatcaatattatttaaaagtgcagcaggagttgtcacaactatatctggtttattgaccggccatccctagagccaaagagagaaccatattactaaaagtacgtaatttcaaaacgcacgggagaatcagttatacattaacagacacacaagtgataggaactaacttcattgtgcaagaattcaatagaaaacccagcaatgaaacagtagaaaggactaagtcatggctgccattgacacagcctttgtattgattaaaagaagaaaaaggaacagcagtaggttcactacttaggacctatgatgcaaagaataaccctcgaattctacttagtatcctatatgtactattatattcacacacacttaatacaaagacccatatcccctattaatactagggtctaacaccagaacagaagcaagcacgtaatcatatacctgtcgtccgcagacagctgcagctacgagaagtggttgaccattgtcatcacaaagaccatttgccatacgaactacttgttcgcacaatgttacatttgggcagagaacaagactaagcttatgggatggggactctacttgttcagtctcagtattccccgaatcaacttggccactgcaaagtctatcaattagagggacaagatagctatgcgttttaccacttccagtttcagcggcaacaaccacatcctttcccgtaaagatagacggtatggtagcagcctaatatgaaaaccataacaactacgttattcgtgtaattttttcagcaaccaaacaggtggtgggcaaacacaacagatatgaattaacatgataatgagccataaagtacctgaaccagagacggttggccgaacccggcattaaaaagcgctcgagaaaccttatccgaaacgcctagcgatgaccatgaaacgctatccacggcgtaaaaggtatcgcttccaactccgtcgttgaaggcagctgtaacagttgtcccaaatgccctgcactgtatgtggccaggtgtcttcagccaaaaccaggggattcgaagcgacgaagaatatgaggcagaatgggagagaaatgaatatgagtatcttaaatgggagaggaactttgacgacgaagacgacaaaggcgataggttgcaaaactggagtactgcaacaggccgatagagaatcattctggataatagatcagttcaaaatacggctttttttatcagtgaagaaggtggaaaaggagtttaactttgagggaccgaagaagaaggaagacaaacccttgctagaggtttagaaatccacattacaacctttattcaagaatacatttaaccaaataaattagctaattagtaatttttctctgaattttgacatatactaaatcatgttccttgaacttttttagtcattaaa

SEQ ID NO: 112603 - DNA, 3590 bp, Cannabis sativa
ctataaatacatattgtctcatcacaaacaattgtatattttttgataataagataaataaaactgtttctaatttaaagatctagggaggaagacttaattgatagtattacacaatcaaattatagtaattgctatggatcaatcaagtatgtatacctaattattattgtgtcttagattatatacaaatttgtatcttgggtttattaattttctaacatgtggtatcagattgcctattgtatatgatttagaacatataatttgtataacaattgacatgtatatgttaattattcctattacatattaattttgtaattattatttgttaaatttttttgttatttagtcttaaaactttatatgttttattccttattaaattctctttctgatgatatattatatgcataaaataattgggtaaattgggagaattttaaaattaaaattttaagatttatatgattacattataaaattaattttgtgatttttaattctattcaatataatttaaaattaattgtgaatatcttattaagaattttatacaatgtttccacacatttaattttttgagttggatgagaaaatcgagttcttttggctctttaatttttgaatggattttcagttagatctacccacttttagttgtttatacttcaaattgaatccacatatagagtagaaattgaatcccaaaatccttcccttttctgtcatttttgtgttgttttttgggcggatttttgtcttcgacccaacaagagaaaatcgagtcgcgctataatgactgcatacttagaatatgaattagtaaggtaattagaactaattaatgttctgattatatgtgaatattttattagatgggccatattttcaagaaataagcattagggttataatttattaattctgaaaattttaagtgtattatgtatgacatatgtgaaaaataattttttttatattttttaatcagcaacaatagaattgcgacggtttagccattagagtcacacgaattgttttataacctttgtaagttaatttccaccaaaaacgagccattagtttctcaatatcttgacttgtcccaatcgataaaagaaagacactcatggcatgagttggaagcgattggatgactgttttgagaaaaacttctttactagcacaagaaaaaaatttaccatcccaactattgatctgttagatgaccttattttttagaaaaccaagaatcacggacttgtctcgaccaataatattaggcaatcctaaataaagagacccatcagaagtttcagctataccaagagtagaacaaatataagagcacaaagagatgttgatatttgggctaaaaaatacagaggatttggcaacattcaccatttgaccagaagccaattcaaaatatcaaagcagagtagtcacacttttagcaacacttgaagacgcctgacagaataagtagctattattagcaaatagcatatgtgtgatcgatggtgcaccacgagccacacggaaaccttgtaaaatgcgattagcttcaaatttttgaatcaaagatgaaaaaccctcagcatagatgacaaaaagataggtggagagtggatcaccttggcagataccccttgtaggaataattggtctcatgacatgacctccatggagaatagaatactgaatagaagtaacacagtgcataacaaggtttattcactttttagcaaaactcgttcgcgacataatagcccgtaggtaatctcattctacttgatcatcgactttgctcatgtcaatctttgaagccataaatcatttcttgccttttattttacgttttagataatgcattacctcaaaagccaccatcacattatcagaaataagtcgactgggtattaaggcactttaagtatttgagatcacatggtcaattaaaccgcgcatacgattcgcaagggctttcgaaactaccttatacagaacattacaaaggacgatgagacgcaattcacccatagagatgaaattcttcttctttggaatcaagacaagattggtattatttaaaccctaaggaaaaatccttgtatcattgaaacttttaaccaactgtataatatcacacctgacaatatcccaacgttgttgataaaatctaggacccataccatcagggttaggagccttatcagggtgcatttggaacaaggcccatttgatctcatcatcaaggattagctttaaaagttcttcattatagaaattttataaagaacggctgacaccattaaccaccatgtcccaagaaggagcaccagcacaaaataaagaaccaaaataattagtaataacttgctaaagccctgtgtcccaatctttccacaccatttgaatttcgcaaacatttaatttgattatgtcatcttcgagaattcgccattatatgggaaatacttgctattcttatcgccataatgtagccaatactgctttcacctatgcttccaatatatttctttttgagccaaaatctcaaaatagttattttgctcacaaacaaaatctttaaaaaaaaaaaatagttatgatcagcaaaagcctttaaacgagccacggatttcttacttttagaggggaaacttttaaattactagtaagttttcgactcgaattatcatgtttgaagttgtaaattttgatcttttcctaaagatgaaggtcactgaaagattcccaacaattttttacaatttgagaacaactaaaaaataatcgtctgtatttttgtaaaaaataaataaatgaatgaataatccttacaaaagtttttgttatttttgagaatttatgaactaatcccaaaaaaaaaaaataggagtgaaaatggtaaaatgccaaaagaatatgattgaataaactaggacctactaattgaaaagaaaatttacacaaagtattattttagcaaaattttaacatgtttatagtcaaataattttttatatattttttacaaaattctttttttaattttgtggtttttatgttatttctaattacaattttactgtgctataaaaaaacataaaaacataaaaataacaacatgaaaataacaaaaaacatcaaaacaacattcaaataacaaaaaaatttcatgattacgacaagaaaacaacacaagaataacatgaaaacatcaataatccgtattttaacattacagtattttaacattcaattatctctaatcgaatagatcatagtgttgccaattctatatattgttatgtgtaaagcaatgcgttattttaattttagtcgtgggtctggtgaatataattaaaatagttactgtcaaagttattttaaattttgattttgtgctgcattattgcgtatatgtgtattatcaattttggaaaatttatattgttgaaaatatataatatatagggaaatttgcggcaaaagtccccaaaaagttctcaaggtcacactttttatttgtccgttggtctccaagttaacagatctgttaaacccaattcaaatgc

SEQ ID NO: 112604 - DNA, 1775 bp, Cannabis sativa
aaaaattaatataataatatagaatatttttttagtgtaatttttagtgttatggttggagtagaaataagttttgacactaaatttggtgatggtgtgacaacaaatttagtgtactccttggagatgctctaaggagcagcaaaatggagaaatgcagtctccttggcgctgctctaagagcaacccacccaaataaaggaaaaaaaatgtgtaaaccgatcaatgatttggttggcttaacccgcccaaaccaaaccgaccaaacttttaattatttttttttcaaattcaactcaattatggtccttctcttaatagacatcaaagcctttcaaaaatacacataaaatgtttgaattcatgttggtaaaaaaaaaaagaagcagaactcattagaatgaatcaatgaaactgatattctaaaagattatgtttatcagaatttatagaatagatacattttcactcaagtgtcaaaagtccaacttgtttcagtaaaagccagaaaaagtttaaactcttgattgtcataatgagaaaataattatatgcacaataacatggttattcaaattactcattctatcagtaggcagattacattgacaaaatttaaagtttattgacaatcatataattaaacaactcaaaattagggaaaatcaatctcaaaataatcaaaattaaatacctgtttggaccttggaggattacccaaattgctgaaacagaagcaaatactaaatccttggtaatgattctgcttgcaagtcaaaagtagacaaaatcaactcaatcccaactcttcaaaattcaaataggtagatcaaactcatacttcctcaacaaattaaacaaaataattaactctacttgaaagagcgtatcaatacaaaggctatccagtaagaagcatttgcgaaagttaatctttatttcaattagaagaaatgaatctcgaacaacaattaaactgtattaacaagactttgaaactaactaaggcatagatagtctaactgagattatgcttatcactcactacttactcaaacaatgattcaatactcggtggacattcatgagggagggcgtatcaatcgtggatgaggggaaaaacagagaagagggaaatggagagaagaggtggtggagatcgactccggcgatgagcgagagggagggaatcgttgatgagagctacggtgatctagtcctcgcagtcgctgctgagaagaaagagagacatcttccgttgccgagaaagagacgcaccggagagggaaggctgcgatgtgagaagacgaagtcgctgctgagtgagtttttttagggtttttcagggttgcaaattggaatccggtgagtctttttttgcttaactgcaatgcgataagtggatgacaacactgtctaggattagattttaggattttaggctttatgtccttgtgtaattattttaggtaaatagcggcataagtaccgaaaattttaagtggcataaactgaatatttattttttgcagaataagcacctaatatttataaaactgtaattttttttcagtttcgtgagtacagactctgttttgaatttattaaaagaacatttagaagtaactgatattacaactttccttctagactcaatgatctagaattcgggtcttacatgtgtcctatttaagataataacagagtctgtactgacaaaatttgaaaaaaattacagttttacaaacattgggtacttataccgctaaaaataa

SEQ ID NO: 112605 - DNA, 10906 bp, Cannabis sativa
  modified_base (163)..(167): a, c, t, g, unknown or other
agtgggagctctaatcatagatatcgaatctatagcttttataactatttataagtaaaataataatttccttagagcttggcttaacagacataaatggaagatcatttatttcagtaatattagtttactgaaatatcatttataagaagctaagtgtttnnnnnataaaatacattgaagggtagagcagtaaatttatctttactcgatgtaaatcatctatagaggatatttgattatttggattgaaacaatagataatttatagtgtatctattcttggtgaataggtcattctatgtaattaggagtacaatttcgaatctatagtggagtcaagatgaattaataagatagaaaatttactcggtaaattctagaactacttattgggagtttgattatataggcccatggtcctcacactagttgagataatattgtcttgtagacttaattaattgattttaattaatcaattagaattcttaataagactatgtcttatttatgagtttcattaagcaagggcttctttgaaaaaaaaaaatagaggatttagggtttatttattaattaagagactttgaaaggtctaattaataaataagttaaatgacaattttatgataattaattataattatttgacatttatagagttagtattaaaagatgagatttgtgaaaagaaagataagtttcaataaaatgtcgaaatagaaatccactaggcccactaagggttcggccatgatggttcaaataaaactaattttatcttcttttttttattattctattttaattcaaaaacctaaccctaaaagctacactataaatagaatatgttgactcttattttcaacacacataaccctaaccctaattgactctctttatcagacaaaattgaaaataaagtaagccaccatcaaattcaaatttccccttcttcttcctaagattttcgaagcctatagtgattgagtaattgcccacacaattcaagaaaatactcaagatagcgtggaagattgtcaactaaaggagaatccatatactctgcagcagaaaggatcaagggttacagatctgaacggaaggagtcatataattcaactgccattaatgtagagttttctacaacttttatgtgtttatttcattgttttagagaattcatatttaggatgttagattatagatttataatcaaacatacatgttagtaaatctagatcatggtaaaataacatccaacaagtaagtgatctcatattggccgagctcaatggcccacttgagtagtcggtcggatgctttaggcttctgtaacacctgtctcaacgactggtcagtgtacacccttattgggtgagcctggaagtatggtcttagctttctagaagttaaaagaaaacaatgtgtcagctctcaatgagtgggtatcgacttttagcgtcaatgagccttttgttggcatagtacactaggtgctaaacaccatcttcttctcttattaggagtgcgcttacaacatattctataatagctaagtatatgtccaattcctcattgtttagaggtttcgataagataggaggttgagctagttgcttctttagctcttggaatgttgtttcacactccttcgtccatttaaatgtcttattttctctgagtatgttaaagaaagggacacatttgtttgtggattttgacacaaatctgcttagtgctacaatgtgtacattaggctctgtacttcttttgtttttgtgggtgacttcatgtctaaaagggcttggatcttgtccgggtttgcctcaattcccctagcgttgactatgaagccaaggaatttgcctgagcctactccgaatgagcacttcagggggttgagcttcatgttgtactcttagaggatcttgaagcattcatttagatcctccacggcccccaacctttttggacttaaccagcatgtcgtccacataaacttctatattacggacaataagatctttaaacatcttatttacaagtctctgataagtggtccctgcattctttagcccgaaaggcatgactttataacaatacaggcccaagtctatcatgaaacttgtatgctcttaatctggtggatgcattttgatttgattgtagcttgaatatgctaccataaagcttaggagctcgtgaccagttgtagcatctactagttggtcaatcctcaaaagtggaaagctgtcttttggacacactttattcaattcgataaaatatatgcatactctccacttgttatttggtttgggcacaaagacaggattggatacctataacaggtagaaagcttcaatgatgaacttgttggcactcaacctgtaggagcctgactgagtgacccttcttggttgggttgcaaccctgggttggccagaacctagctgggcataccctgggagagggtatgtccatggctggtcagccctaggcttgtcatcttactctggccagccagccctaggccaagtagctggccatggccgaccagccctaccatgggcagttgtacatgggcagccactctatgatgggtagtgtctggctgctcgttctcccctgattggccagtacagcctgtgtgttgacagggggttgatcacactaatttttagggtttggtggattcaactgtccgatgtgattgttcaatggtggaacaaaatcacttcaattctcactccttaagttaatgttgtcttgggtgtttccacatgttcccggacctagccggttaaagatagaccttagaatgatttgctcccaaatatttcagagaagaattttgctctgtaggactgctagagtttggctgagtgggggtgttaatgagccacagatgcctgcctggtcccccatgccactagttgccaaggtttggctgctcccgtcactagatctatgtggcaggacttgtccgtcttcgggcagggggaagtttgtcctcgttctcaaagaacttagttagactgtttgcctgtagaccctacccaatttgtcgatgagtctccattggagaggatctctaatcagatcctatcctctcccagtagttctctcattgaactgccttatcatgtcactagctttcctgttacgatggtccaactctgcctgatgagattagaggatgtagtcctggtcatccatccatctcaggaatttgcgtctctgttgggtgaatgcatcacaacctacaacacttggttcttcagtttggacttggcttacagcctctctaagtatggccaactaaaagtcttctcctaagtccacatgaggctcaccaattgttggttcgccaattcctggccctatttccccagcataatatcgggaaacaaagttagttatggtgcgcgaggacagttccacatggacaaaaccctctgcttgaggtggtaatggcggatctaccctgggcggcagaggttgttcattggaatagtcaggttagcagggtcaaccagaccagttgtgttggtcgagtttgttgggcctgccgtgttggcagaattggctacatctgttgagatcgtggaaactccagttgtggatggaacatgaacatcatgatcaacagtcatagggtcttgaggaagaccagatgaagcagaagttgtagttggagttctccttgttacaactatggtgattgatcagatatataaataacactctcaatgaaagcaccaaaatagtaatctcagatttggtcaactgacagtggagtcttatttatgatcagaatcaccacgtgtaaacaattaaaacaagtaaataaatggacacaatactttaatagaggttcgaccatcttagttagcgggtaacgacctactctccttttagttatattgatatgagagataataccactcatatcacaagtgttgtgagttttacaatggctctctttgaattacaatagtgagaatgtaagacagatctcaacgaagtgaaatgaggaagacttagtctctactacactgcaagtggcgtgtaggagagagagactagggtttcgagtgtttaaactcaagagcttaggagtgagaacttagagctttaggtttagcctagtgttctttatataagagagagctttcataaggtccaagccaaagtaggttgatatcccttaaaatggagatatcacctatttgttacatattaaatatataagaaaataacccattaattattcctaaaaaataggtaaataactgaagttgaacccctactttgtgggttgttgaagtccatttgtagctgagagtgtctgtctaggttgaaagctgcagagacaccaaaagtgtctgctagaagaggagctggccaacctaccacttgttggaggctggctggcctatgttgtactatggctggcctggggtggtccggctagaccccccttcgttggccattttattgtccctttgtcctgctttagtatttggactcttcgtcaactagtacgttgtgcatagtgacttggtcctcttaccgatagttgtactccacatggcatcaatcttgcttatgtggacatgccacgtcacgtggacaaaaattgggataacactttctttctttttcttttttcccttttcttcttcttttatcctcaataccttagacggagatcctctctccctcatctatctacacggtgccactgctgggaaggctacattcgaccagcaacggtctgatggactacaaaaatatgattgataaacctccaaaccccaaaagcccgactcaccttccctccctttctctctctctctctctctctctctctctctctcctgatatcactctctctttcacacaacctgtaaatgtaaaagaatttcagagccaattgctcggagccaaattttgaaggcttggccaggcgcttggggaggattgaaaaggatgtattaaggaagggaagaaaggacttggcgagggagtgagcaagggactgttcgtccttggaggcggtggctttcttggttttttaggtttttgagatctgagcaagagcgaagatggcaggagaagataaaagagattctgacggagacgaagcttcgagcttggaaatgagagaggtatccatggcagataggaagagagatgagtgagagagagagagagaggaaaaaggtgatggagatggaattagggttaggttatagaccccacagtatttaagaagaagaagaagaagaaaagaaaatagaagaagagaaaaggaaaaatatatatatttttattattttatttataaatttataatttttttttaataatatttaaataattaattttatgtggaccattcaaaatttgtcattatatacttaagctgtctagcgtgacacttaactgagatttttgaacggaagggtaaagacataacaaaagtgaggtttatgtagttttacggtcaaaaaatgagtttatgtgattaagtgtcacaataaaatttatgtgattttatcgctaatatttaaaaaataaataaataaagtattgaaattacaaaaagaaaaaaatgttatgataaacagaggttacaatgtgataaaaaataattagtgagtttttttttggaagaaaaaagaattagtgagttgataaggacatttgatagaagaaaattgaaattgtgattgaaaggaggaaggaaggaaggtgtgattttgttttaatttgggtcatctcatctccaatgccgtgtctcgccctgaaactgagcatggctgtacccagttatgcccacaaacgggtatgggtccggaccatcactcccactcccaccaactttttaacaactactatttcatcttcttctctctcaacaacacaaacagttttcaagctctcttcttcttcttcttcttcactctccttatatacacaaaatagagataagcatagagataaagagagagtggtagtaacggctactatttataggaaccaatggaggatatccccttcttatccctgcgcaccctcagcgcacgatagcaaatcatcgccgcaatccttagggttctctttcaaccacaaatgcttttccctctctcctcctccttcttcctcttcttctttgtctagctctggttccacttcttcttcttcttccgaggaccaaattaaacaagggttttctgcgtcgtcttcttttgagtccgggtctgagggtctttattccgaaatgggttctgaggacaaggaccaccaccgtaaagattggtcgtccgccggggaatccaacgggaaacaatcgcaacaacaccagcgactctccaataagtttctcaccctgcccactattctaaccctaggtcgagtcgctgcagttccacttctcattagcagtatgttatttattcccattcccttgctggatcgttgttttgtttgtcgggaaattggggtgatctgattggatagatctgactgagatgttttctgagatgggtgaattgttgcttatgcttctttgtatcttagctgaaccagattgttttcatgtgggggctaaatggactgctttttctgatcaatgaataattataccggcgaattggttcaaattctgggttttgttgatgataattttgtttgtcaatttagatctaaaatataatcgcccgattacatcattttgttgatggttttgtagtgggaactttgccatacttattctgattgtacattaaatgttgctttttcattcttcgagattttgattttctcttggaaaatcaattgtattacatttgggctgcatctcagtttggaattctcgtttatattctatgctctttgtttattgaccagtagctcaaattttgttgtttattatgcaaatcttctacgttggagggacgtaccaaagtagtttgaagctttggctgacagattatgttctgtatttatagccacttcatctctatcctgtaaacccttctataacctgcatgaagttgggttggttccctagtttttggcaaaatgccataccgtttccaacctaccttggtgcattaatggaaagtaaaatgaatgcaatgtgcagtcaattatgaaaagggttcaccaaagaactaagagctcatgacaacttcattgtttatcatgcttgtcctagcttattaaattgattattgcagcataatcttgctttcttttaactaattcattcattcactttttgtaccatgttagctttctacgtggatagttggtggggaacaactgccacgacaagtatcttcattgctgcagcaattactgattggcttgatgggtatattgctaggaaggtacggtagctttttttttttaaaataattcaagtggtgcagaattttccaaatcttatcgagtgctctaaagttttcatctttttttttgccagatgaggttaggatcagcatttggggcttttctagatccagttgctgataaggtaccgttgtccttatgtaactttaaaaccgttctcttaaacgcgtttgcaacgaagaagcatgtgttggttatattttaagaaacatatatgaacctgaatcccattgtcatgcctacttgatgcagctcatggttgctgccactttggtattattatgcacgagacccttggacattggtatatttgggcaagttccatggctactgactgtacctgcaattgctatcattggtagagaggtaatgcagctttatatattttgttactatatcctttagttataaaaccattattggggggatgggctacgaatgtgctatctcctaattaggagggtatctattacccgttcttgatttagattatatactaacgaggaaactttgttactaattgctaattctttatttatatctatgttgttctccctaagttcacctcatccaccaaaaatgaaaaagggttcggttcacttgcagaatttgttgcactcacaagtattataatctaataacaattttttatatgtagaaaagcccctatttgttatactcttcattctcattcgaatagctgtggatggtttaaatatatgtattggcttttcactatttcctattctaggtttcccacttggaaaataaagtgtttcatataagtggatttatgtgggggaaaataaagtgtttcaatgtttcatataagtggctttacgtccataactatggattccaatttgtgagatactctagttgctcaactaattagtggtttggtgtttgtaaccgttccaattatgagaaaatagattatgttaccatcagagtcttagtttatccgactaccaaagcggtttttaccctaatccattatatgaactataaaaacttcgaaattttcttcaattgtatttgaatgtaatgtagaatctaatttgaccaatcatcacaatgactcttcataattccattgtgggagtgggataatgttttgaaccagaattctaaggtgtgccccttatttggcttttttgttcactgtctccagttttgtttgattgttcaatataagtgtttggcatattatactttttttgtttttttcctcgtcacttgcacaatagtttggttttgatgattatttaaaaaatgaccttctagactcacttttactgtctcatgcacagcatttgtgggaaattcttgactccctatctggagccacggaaaattgttaaaaaacagccattttttgcaaagcgacgttaaaaaattctgctctcaccaagtactctttaggaacctgaagtcttttactagccatatttaattaagttgtagctcatttggtgattctagtacatctttagtttgacattttcacagttccatgtgatttcttctttctctgtcccttttatttggtttggttgtgggactcatcattatttgatggttattatcttacaaaatgtttgcgactcattgacagataaccatgtctgcagttagagaatgggcagcttctcaggataccaagcttttagaggtctgttttctctacctgttttaccaaaaccaacttttcttttgtttttaaactagtgaagctatcagaacaataacactattcactataaccaagcatgcactattttcaggctgttgctgtaaatagcttggggaagtggaaaacagccacacagatgactgctctaactatcctcctcgctgctcgagacagcaggttgatttctttttcccccatctttcttctgcctgttctttccttaaaacaattttatatttcactaacattttacctttatggctatcttctaaattcttctttttcacatgtcaattattgcagccttggagggccaggaatttttgtagctaccggggttgctttgctttatatctcagctggacttgctgtttggtctttggttgtgtatatgagcaagatatggagagtactgctgaagtagaactccaagccggctgtttttgcattatctgatatacatatatatatctaagtaccttcttctcattggggctttacttttaacactccctagatgaccctttgatccactttcactcattggagctgtttccacaggtatgatggaaggttaagctgtttttgggcataagctataaatatgggaacacagtttaggttcaatcatccaatagtttgggagaaaatgttgggatatagatgttgataaaaaagggttcccaatgacaagtcattactgggtagaatcgattttggtttttccattcttttggaggatcatagatctttgaagaagaggttggatgatgtagcattaatatttgttgctattgcagtcttggtattggaacttcaacattttatttatttattactactattcacacagatcaagatttgggattagaaatttttcatcgtgtaaaataaatacaacaaatggtttaaatatgttaaccttttagacccttctcatgtcattgctgtgtttattttattagagatattgaaggcaatactagttgaattatacattttgtaacactaattctacaaattgatttttttatccaaattttttaaactctacctctgtttggtttttactattttgttcattttttttttgttaaaagccaacttgaactctggtgtacataggagtgcaaatgacataattttagtagttcaggtaatatttattatttaaatattataaaaataatttataaatatgtaatataattagaataaaaaataaaaaatgataaaaattaacatttcttttaacttattctttccttttttttttcttgtttcttgatgcttctttctcttgccaaatgcttcacgctattacaccataaccaaaccaaccactaaatctcatcactacaaccgtttgccctaaatcaaagaaaaaatagggtaagaataaaaaaaaattaaaacccaaatcataaacagtataacaaatctcaaataaaatttaaaaccaaaatcataaatagatgatagatctataattttatctcaatcaccacaacactcttcctttggttcctcaccaccaccaccactaccaccacaacacactcagatttggacccatgccaatttcgacccaaacccccaaacccaaaaaccccaaatcctaaactcaaaaccctcaaacctcgaaccccaaaccctaaatcgtaaaaccccgaatcccaaacccagaccccaatagaaaagtgatacacaacggtcttggcttcgtccctataaaattttacaatttcaaaatgtgtagggtgagattttgaaagaaca

SEQ ID NO: 112606 - DNA, 4687 bp, Cannabis sativa
ttgtaaattttttgttgatgggtttaggttgaagagtactacgccagtgaattactcagagttggatttaaccaagaaggacaaggcattggaagatggatgtatcttgacagagaagggttttcggcctgagatttatactgaagagcatgaaaagcttttgggtcacacagagaagagctggacactttttgtggatggttgtgggaaggatggaaagagaatctatgatcaatttaatggaaaaacttgccatcaatgcaggtcagattgttgtctggttgagatctgaatctgaatcttgaatatgtgtataaaaaattggtttcctttgcaggaaatattttagttaccaatacaaagtaaagagggaataatgccacttatgaaatccttttcatgaccatgcaagtgtgaggacatgcctaataggatagagaaaaagaaatgaactaataagatctttgaaaagaagctatagaatagaatcataatgcattgagaactagtgaatagagaattctataagagaactatgcctggactccttctcatgactatgctcttatgggtatattgttgtttaaagaaatctaaaagctactcactaatcatttatgaaactatgatgttactttatgattaagagataaagaagcttagttttgtctcagtaatgcccatacttcctgcctggtgccatgtatttgatcaattaagtttgcaattctttcttaaaagaattctatatggattcattattctggtttggctttaaattatgctgagtttgcactgtatctttcaggcagaaaactcttggtcaccgtactcattgcagcgaatgcaacaaggtacaaggacagttctgcggcgattgtttgtacatgaggtatagtactgtattttctaacaactagtcataaataacagtgtcatactgctttagcggtgttttatataacatctattttttttaatgtaaagatatggggagcatgtacttgaagctaaagagaacccagattgggtttgtccagtttgtcgtgggatttgcaactgcagtttgtgccggcaggcaaaggggtggcctccaacgggcactctctacaggaaggttaatgttcaaatttgcctttgttgtcttctttcttttgtgtcttctggtgtcaaatgatactaagtttatttgatcaacttttcagatatcacaattgggctacaaatcagttgcacactacctcattcaaacctgtcgtgtagaggcaaacctaggaaacaatgaaggtgctaccactgaagttcccgcaaaaaggtcactacccttctcagacatgaatgaagtcccaaatgaagttaacagtgatcaactagtgtcttcaaaacaattcaatgataaaagtactgatgagttttctgtgaaacgatcattgcccttttcgaatttggacatggcctcagacagtgtgagttctctggaggtcgcggaccagattggatgttcaaaccatcaatatccaatcaaaagagaggtctatagtgacactgatttgaaaagtagctctaaactacagaaggaggagcctgcccaggacttggctgtggcagaggagaaagttatgactgtagaaaaaatatcattggaaaaggaagttgatcaagaaaatgatgttgaattcacttgtgataaacatgatgatcccgagaaaacactgctggtgaggactccattggcgaaggagatttctcctttcactagaattaactcggacagtattgctggaagattaaagcggaggcaggagaaaagctgtgattgtgatgatgagaaaaaagcaaatgtcatgcagactgtagaaggcatttctctaccatctgatatcatcaaacaagctggtgatagcaatgctccactggagacaagtcgaaaacttaaggctaagcgtgctgtagctgttgaaccaagcccagacagtatagctggaaggctgaggcagcgacgtcggatggataatggcgtctcatgttgatcattatagattgaaggctatgcacagttcaaactgaatatagatttctggctagtgtgagtgacaggttgtctaatgtttgaaagaaacccaattttgtaattttgagagtggtttctaaatgctgaattttgtctcatatgtcctctttatggtgaaagtaatggtgaagtttaatgatattgaaacttttattgatattgtctttttgttcatttgagctaggaagactggtttcacttttagagtatatatatttaaaacaagccaacttacttggatttagcttttttctgtgtaccattttcaaattgatatgaatatgaattatgggttatattttattaacaaaattatacgaagtttttataatatcttgaatttagcccacttgataatataattgaaatatgtcatattttatgcctttagttggggtaataattgaattgaatgaaaatgaattatttagtttttttttttttgaagaattagaacttcttcaccaatttagtatattaatgactatttattttttttttatgtattttatgcatgtaaggttgtgtttggttggaagtaatgaaatgaaatgaaaaagaattaatttttattttattattttgtttgattacattttaaagtattaaaataatttttcctccattttagtggaatgtctacaccatttgaaattgaaaatgaaagaaaatatcattaagataaaaaaaaaaaaaaattatctgtttatcaatttttcatatgcatttaaatttcattcattctatttttattcatagtctcattctagtacttaattttatctagatgtatataggtaaggaagatcctctcaactatgtcaagaactttaagatccagatagattttcaggggataaggaatgccttaggtgctgcatcttccccgcgaccctaacaaacacggcacaaaaatggttcactaagttaccccagggaggatcacctcctaggatgagtttgagggactattctatacccaattctcctctgcctttcagatacttatagaactgagtgatttagtcgccaccaagcaaatgttagactagtcactcaaggaatatattcaggacttcatgcgtgaagccaccaaggtcaagaacctgagtgatgacgacaaatgggccgcagtcatggaggcatcgcagtgggaagtcatttataaaaggacacaaggaggaaaccaacccctctatgtgagacttcctagacaaggcagacgagtttttcaagttgggagagggtaagcgaaatgccaaatgcctcaaccaaaccaaaagcaaagccaaggctcccaaggtcagtggcaacaataaaggtgactttaacaatgaaaagatggccaacgacgataatagtggaaataactttaataacaacaaaaagttaaattaaacattatcgttaataatgtgaattgaattcacattaaactagctattaaggttaatagcaactcataagattcacaatttcaaatgttaaccagaatttaagaccttaaactagaaaatgaataaaaacagaggaacttatctcaaaatttaatggccgcaagaattaattttttattgattatcagcacattacaaccaaagttcttgaaactttattacactcatcaatggtgtatcacatcaattacaatagcctcacttggagtacccttatcagatacacaagggaccgtacaaccctccttcgctcacactagttctaaaacagagattacaatttgagagagagagagagagagagagactaatcttggtgttgagatatctccgtgtagagctgttatgtctatttataggctttgacagttgtaatagttgaattggaatcggagaccaactaacttaatagaatgctaaaaaatgaagttgcatttcgctattgactaattttgtgagctaattctcaactgttaatgaccatgtcttcctaattaatacaaccatcggccacaggtgacactccccttttattccttccaaccaaatacatctttaaattttattccattttattctcattatactatttatatatatatatgtattaattttttgtaacccctatagttttctgtcaccgtgccagcttgtaattaacaaatatcaaagtacacaccttattcaatatcttcaataccaaagtgtacctcttcatgcttttcttcattgctatctatttctttgtccttttggatatcttatttttcgtattcacattttaaaacatccaaatataaaagttggtgcaattttctcctacttatttaaaatgacttaataaagtattaacaaacttagaaaaattcttcttgcaaaatatataaaataaattaagatttttcatggtgattttgatggattatactattatattataaacaactacatctaagtaatttatggatttcttttattttattttatcttttttctttgacatttttcattcatgaatacatatcacaaagtcttcaacaaacaagaataatccaaattctctatcaaaaaataaaataaatcctttttttggtacaaaaatagaaaatgtggttggaactaacatattgtcttcttatccctttcaaaaaaaaaaaaa

SEQ ID NO: 112607 - DNA, 2283 bp, Cannabis sativa
aaatttacaaaaaaaaaaaaaagccatatatctttgatttgtcactaatcagagtacgatttttcattgcaattattatctttcccagagctcacttttgtgtgcccatgcttgttcgaaaagattgcactttatttgtgatgtcatatctaagtacctaaataatgatattgtctgggttttgtttttctacatttaatgtcagacactgaattttcttgcaccaagttggttaagtaaatgacagtgatcattatctgtttgctatgttattacatgaaaaactccatttaaagctggaatttacgcatgtgatttgttgtaattagaccacaggctagaggaaaagaaagttgactgacaaaagggtcttgattaagttttcttttttgtcatctttcacataataatgcaatttttttttcatcaatatggacaaacgtgcacttgtaaccaaagttaaaggtgatgaaaccatcagaaaaatcccagcgaacccttttgatctctctctctcctttctctattgtttactctcttctctgtatatcatgttctttaccatccaatccaaagatgaaacttatatcttcttatggcttttgctttaccatctaaagatatgtaatatatgcatacgattaattgctcagctttactgtttaattacttgcttgtgcaactgtgtttgggttagtgctgtcctcattttcattatataatgggatacatcattttatgcttaactcaactcttaaatcgaaaatcttaaggtaataaaaaccataggggaaataatcatctggggttgtcagaaaaatgagcaagcttgattttttttcgttctcttttgggtttctttggtgattagtagtgatgtcgtttgttgtagttatgtgaaatacgacactgaaagtgttgtcgttgaatgttcatttagttccttcctcattgtcatgacgatgtgggttgggatccagtaacagcattcaagtattattgtcacttaacttaccattgattcttataatatttgacagtaatttttgttactgacaaatcattgctcaaaccatcattctgtataggctaatcatgtggacaatgggtgatgattttcagtatcagtacggaaaagttgattcactatgtcaacaaggtaaaataaatgaagttggcttggctgtgcctgtaataattctcatctgttgtaaattttcattgttgttcatgcacaattcttagttataacttgcatttgagctgtttaaatttatcaggacggacaggtgggttaatgtgatgtattcaacaccatctaagtgcagggatgcaaaatctgcagcaaatgagacttggccattgaaaactgatgactattttccgtaagtatctcttgttgttgtgctttttctttttctaattcttttattaacaaggctttcttttcttcgattacagttatgcagatagcaaaaatattttttgagatttccttaccctttaatggatacacaccatatgttgagattttttatgagtcattttcttaaactatttcaggtttttgtggcatataaaccctcttggttgctcggtcttcattgtactctcttaaatgtggtctgagaatcataattttctacaggttaatgatgttaatcttgttgttcaagattactttcttcatgaaaagaaaacaaaactggctttataaaagaatcaaagaaaaatgaaagacaattataatgcaattttctggtcttggaaactataaaaccatacacaaagtttaattttctttataagccttcatttggtaaccatagcacttttcggtttatgtcatgttagattacaaggctttacaaggacaaagaacatgctgaagttgaattcacagtgagttacaaacaaacaaaccatcttttttttttttgagacttagtagacttgagtgtgcatatagttggttttggtgaagaagataatggaaagaatgagaagctaggagaggcacttgctagttgttaacaacaattaatgacaatatctagtcacattgttcatgttccacccacgttctgttagcagtttaccattgccatccatctttagttgttaacttccatatttgcaatgtgtactcgctgtaatgttcatatggacacaatgtacacatgacacgacatctctggccacctgccttctcttatttctcatttctcctctctaaccttttatcattggtgactctctctcttttgctctcagtctctgcgt

SEQ ID NO: 112608 - DNA, 3438 bp, Cannabis sativa
acattgtttgtatttgggcagatagtagatgcaattgagaatgaaaaggtggtccaaaagaccataaatatatacaatgttgatcgtgcagtttgtggacgggtagcgggggtgattgcgaagaaatatggtgatactggctttgctgggcagctaaacattacgtgagattagctaatttgctgcaagtgcattttcatcaagggtgtgttgatttatttagatgcaagctaactcggacttttcattgtgttcagatttttagggagcgcagggcagtcatttggatgcttcttgacgccaggaatgaacattcgccttgttggagaggccaatgattacgtaggaaaggtatgcttatttaagctcattgcgtactaaacaccaggatgatcttaatcattttagtggactacatttataagctgattatctggaagtagcactgatttaaattttttaagttgtaattaggtatcttttggcagttgaattaccaaaatttggaaacatcttaagggttggtaaaatttcacaaagagaaattatattattgaccaattttataaattggttatatcaaaaataagtttaagtaaatcacatttaagttttgttcacttagcattcttagcagtaatctgttgcgaagtctttgaaatacttaaatcagttgtgccaagtctaaatctgctcgtggcaaataaatgcctagggtatggcgggaggtgagctggtcataacaccagtggagaaaactggttttatccctgaagaagcaactattgtagggaatacgtgcttgtatggtgctactggtggtcaagtttttgtaagaggtaaagctggagagcgatttgctgtcagaaactcactagcagaagctgtggttgaaggcacgggggaccactgttgtgagtacatgactggaggttgtgtagttatacttgggaagtgagttgtcttgtcacctgccacatttatgcttttataaaggtatatgaagaaatgagttaaagaaatgtgactgacttttatataatgacttgcctcagagtggggagaaatgtagctgctggaatgactggtggtttggcatacattcttgatgaggatgatactctcatccccaaggtttgcgaacatttctccttttaatgtctttttgctgttttatcaaatccagtaccagtaccagtaccactaccgccttgcaacattctattagttgttatggaatgtatatatatatatatacactagggtgtgcatttgactgatttcttggtgttctcgtaacatgtggtagctaacattcattttaccatgtcgatgtgcattatttgtcctgcattgtataaattcttacaaggtcttatttgactgcttttataggaacaaaatttctctccactaaatttattcaatttcatgttttcaaatttaaatttaatgtttttatttcttaaaagttaatacaaagaaaaaccacacacgacccaccttctgattcgagtctttccctttccatacaagcacacatttgagcagccactattggtccctgagaagcgttttgtatatgtataatattgatgggattgttaatttcaagacatttttcttcaaacatgataaaacaaaactacctctcttagttgaacgactgtctatacatgcattttgtataatgtatgtttctttcatctcagtgtgttgtatctatgtttaaaattaggaatttaagccttaagattttttatttcttttgtgaggtaaggtgaggcgaatgcttacccctcaaatatttaattaaaaatatatttttggagtacctacaaatatcaaggataaataatgtcttgtgaatctcatactataaaatgtcttataaaactcaaacatagcatcaaatatctaataaaacacaaactgaaataaatataacttttgtttctagaactagtatctcagattcctactattttagaacaaatttcatcaaaaacagcatgatgattagatattctctctgatcatgcagactgaaatgttgagggagatagggggtaacgactgactgtgtttctaaccttaaatgatttggactttttttttttaaaaaaaaaatttgtttgtgtttcattggttattttttcttttgtttgtgttttattgggactttttctgaactttgttaaaattttatattggaccttttcttaaacttagctgaataaacattaattcagctaaaaataccctaaaaattttatatttctaccgcctcagccattttcggccacctcacacagctgaggcgtacgcctctcctactcctacctttgtcaaggcgggatgcctttgggaaaaacttttcctcaaagttaggcgctcctcaaggcgtcaatgttaaatattgcattatatcacttgtaatatgttctaaatacgtgtgcagataaatagggagattgtgaagatccaaagagtgactgcccctgccggccaaatgcagttgaagaacctgattgaagcccatgttgtaagtgaccaaatctttacgatgtgcatacaagttaaatgcatacccattctcacatgtcattaaatatttctgtttaaacgagtgttagtgattccaacacgtgatataggttaattgctttgagaattgagtttttaattcatcttcgttgctctttctcatcattccgtcattttaaaacactaatttgataacctgcgttatttgatgaaggaaaaaactggtagcggcaaaggctctacgattttgaaggaatgggagacatacctaccactcttttggcagcttgttccacccagtgaagaagacaccccggaggctagcttggactatgagaaaacagctgcagggtcggtgactttgcaatccgcctagagtagcagtcaagccatatagctagagaggctggcaggatttctgaatacaaaagctctccaaacccactatatgtacatgtgaagatataaggagatccgtgagattgacttttgcatggaacatctgcatcaggtatcaatgttaatcacaatcactgccacaattaagttgagaaaaccagaagctacaaaacaagagaagatttaacttgatctcgacatctaggtcctgcatttaaagctgttgcatagtgctctgtggcataaatgtaaataggagcttgtttataatcttcttaaaaaaccccgttgctcttgatgatttcaaagctagttcagattagtcaactcttgctataagattgagtccagtgttaaaatgccattttcggccattaccttcagctatttaaataaaactcaggatgagctaaattcttgttggaatgaacaaaaaacgttcccacattattattagataaaattgttctttctacttattattggaatgaa

SEQ ID NO: 112609 - DNA, 2563 bp, Cannabis sativa
ggtaaaataaattccaacatacagaagagagaaaactcttccctatcacacacttggataggaccagggatggtagaaggatccagaatccattttgcaacttcattccccgaacacagagaaaggtcctcacatcgaataccccatttgctttcaagcaacaacccacaagttattggacaggttgagcttcagagtcaccataagcctccccccacaaggaacagtcgcccactgtacacccatgaatacggttatacctggatccaaaggggatgcaatccctataggctttccacaagaaaagcttcaaacgctcatggagccccaacttccaaagcttagtacaagtgtcatcctggaccatagtagcagtttgtaaacacctataggtagccttaattgaaaactcaccattaggactatttctccacaccaacctatcctcatcactaaaatcctcaatcctccaattcaagattacgtcggcagccgaaggcctaaacacctatttcacttcagtcgtgttccagtctacaccattcttcgttaaaaaaagcactaataggtaagttcgttaccacttgaggattgattgcaccagcatccataataacaccatcgccgcaggaccaaccatgattccacacttggatatttgagtcacgtcccatcaaccacaaacaattatcactgatgaattgcttggttttccaaatcccccttgccacatgcgaagcatgacgagggaggttacaactccaaaagcctaactcacgacaatatttttccttaaagatattaacccaaatagtgtttgtgttcttcgccatcaaccaccccagtttggcaagaaaacacatattaatatcacaaaaactgcgaatactgagccctccacagtttttaggtttacaaatagtgttccagtttacaagagcaaggtatcttcatccatctagatttcccctccaccacaaacgcctaaacaaggcatcgagagtgttagtgatcctacctgggatcgagaacacaaccatattatagatctgtaaagcagagaccacacttttaattaacgtcgttctcgcgaccttcaattctagccttcaattcttctcctcaccttgtcaataatgaaattaaagttgttgcatctattacctttcacaaacaaggggttgcccaggaagagctcattaccatccataaactcatagcccataaccttagccaactccaaaccctgctccacaaagcagttcttagacataatcgacaacaaattttttttaaactcaattgaaaattaataaagtagttgacatctttttatctatacatgagttatataacacttctttatttttcctaaaagagaaagtaattgttctgttttttgaaaaataaaaatatgttctataactatttttatttttttaattttaaaggtaaaaataaaaatatgtttagtaatttttttgtttttgtttttttaattttttatttaaaaagaacactcagatatagtgagtcaacactaagtttagggttttgagtttgagtcgcgagtcagagattcgagtttgaatctaagtctaggtcgggaactaggatctggactagtgattagggtccagagtctgggctaggggctggggtgcaagtccaaactaagtctaactctgggtcaaggggtccaagtcaaagttgggccaaaaagtaatacgtttataattcatcaacttaaaaatgcacaaatttttaattgagtatagggatggtaaaagtacgaggtctaatctaaaaaatttgtctgaaattgaagaaaaaaacttatttaatttaaatattttaaattctaatctagttataaaaatgatagagatttttcataacaaaataaaataaagtgtttaaagaattaacaaaattgacacaatctcacaattttatacgtgacaaaaaatgacatgcttagacccacaataaataaatacataaacatttaattaattattcaatatcataattatatttttacaaatgctaatatcataaagtaatttggtgatatgaatataattatgttttcaatcaataaactatacaaaatgaaattgtgagataataataattataaaaacaatttatttaaatttaagtatgtaataatgtgttaattaattatttaaattgaccaaactccaaatataatcacataattaaatgaaacaattaaaataaagcaaaactatgaaaaattagtccaaaatggaccccacacaccccagacgccttaaaaaattttaatttttgtttatttattttttctgatttgactatacgatatgttgttttttcaaaatttatgtcatttcctaaccaaaacgacacatcgttgatcatggagagacaaaacaacacaggtcatccttgaccttgatctgggcacgtgggtcaaaaccgagtcacgcgatccgactcttggaccagattagttatttgggcactgttatatattataatataataagtgtagattaagggctcgtttggaacg

SEQ ID NO: 112610 - DNA, 2042 bp, Cannabis sativa
gggcataaaacccaacagtttcaattgaacatgagtttccaggtttgatttactttgagaatgaattgggagtgaggtttcagtcattgttaactgtgaatggaaatctattacttgcaaacattacaacagaatgggacattcaattgaagattgtaggaggaaagaggggaaaaataagaatggaccattaaagataagagtaaacaagggaatagaaatgcaggggaacattaggatgctgaagatttcaagcctgttgttaaaggctagagacccaaaactccaacacaaacaatagaagctcagatgtcaaattcatttactactttagaagcaaaagaagagaaaggggagcaggtggcacaacagaaggaaggtagtgttaatgagggaaataaaggaggaggggaacaagctccttttctgaatggataaaataataagttggaacgttcgaggaatcaacaatccacataagtaaaatgaagtaaggcaatttattgctaagaataatgtgggtcttgttggtctccttgagacgagagttaaggctctaaatcttggagcccttatatgttaagatgttttccaattggtgttttacaactaatatagcttggcgtaaaggagggagaataattgttgtgtggaatccattaagctttatggtgaatatcattttttgctcgagtcaagttgttcatctttatgtttctactatggacaagaggaacaagttctttgtttcttttgtttatggggttaacaatgaagaggggagaagcatgttatggaaagaattaaaggagttgaatacaaatgaaccatggatggttctaggggatttaatgacatatttgaaagaggtgaaagaattggagctcgggttaggtataatccttcatcttttaaggactgtactatagcttgtaagcttgaagatatcaaatttggtggaagttttttcacctggaacaacaaacagaagggtgaaaacaggatctattctaaaatcgatagagtgatggcaaacaatagttggttgaatggataccctaatgctgaagcaatttttctaaacaaaggtgtgtttgaccacattcatgctttacttactgtgtatcctaatatccctagtggtaggaaaccttttaagtattttaggatgtggtttagtcatcttcagttcaagaagtagttggaaactgtatggggccaaattgtgaggggatccaaaatgtttcaagtagtttcaaagatgaaagctcttaaacctgtctagaaaacaatcaacaagcaaggattctgtgatatccaagctactgagatgagagccaaataaaggttgttggaatgtcaaaagaatactcaaagagatcccaccaatcttgagcttcaacaacaagagctggatgcaagggataattatgcagagcttcataatgcatacatttctttcttgcaacaaaaatccaagatcaattgtattaaaaatggtgactctaatacagcattgttcaattcgagcataagggataaaagaattcagaataaaaaattttttgattactaatgctatggggagagaattgatgatcaaaataaaattactgctgcttttttggagtattacagaggcctactgggaactaaaatgtagggaagacatcatgatgtccttccataattcctaatcaaatcctgacatatcataatgttatgtgcaatatatctacctttaatgaatcccccctgatttagagatcctagattaggaaggatatttttaagtctagagcaaataagtttggtagcaaccttataaagcacattacaacttgatataggcctaaaatcactcaccttatcaaggcatttgattttagggattagggttatgactgtagaatttatttcttttaggaggttacctgattaaaggaaggaggaggagatagcttcacaaacatcatttccaattcgatcccagttgtcttgaaaaaagaaactaccaaaaccatgttgggttttatgcccta

SEQ ID NO: 112611 - DNA, 5157 bp, Cannabis sativa
atatatataaaaaaaaataattatttttgtaataataataagaaaacgacaaaatgtcccgcccttcctctccattcccttcttgtttccgcccttcaggtgaaccacacgcgccacctcctccaccgcctccaaactccggcaacccaaacctaacaacctgtctgtaccacaccgatgttgctctcttctctcttacttggtcccgctccttcatgggtcgctcccttcacctccacctcctccaccacgccttcaactctccgccgccgccgccgcagcactcctcctccttccatctccaaatcaagccatttctcttctggaagaagcacggatccaaaaccctcgcccctaatattcgcgtctactgggacttaacccgtgctcgattcgggtccggacccgaaccgcaatccggattcttcctgggcgtggtggtcgacggtgagttgactcttctcgttggagatatggcgaaggagtgcttcgctaagaccaaagcagagaccccaacgactccgcagtctctggttctgaagagggaacacgtcgtggcgaagaagatatacacgacgagagcgaggtttggcgggaaaatgagggatatacagatcgattgcggtgcgtatgaagatttctcaaagctcaatttcagtatagataacaagagggttttgcagattaagcgtttgaaatggaaatttagaggtaacgaacgaatcgaggtggatggaattggggttcaaatctcttgggatgtttacaattggttattcgatagcgataaacattacaacaacgaagattgtggccgccatgccgtgttcatgttcaagttcgaagacgaagacgacaatcaatttgggtcaaaccaaagtcaaaaaaatcagaatgggatggctttgtgggctcaaaatcagctctggaatttgggcatgagcggaatcgagtggagaaagatgggcaaaagcttgtctttttcgtcggtttctatgtcgtcggcggcttcttccggcgggagttcgtcggttatggagtgggctagcttggaggagaccgagctcagttatggtccacctgggttttctttaatggtttatgcttggagaagaaggtgaaattatcattattaataattaattcaatttcgtaattaattatcatagtttttttaattaatttttttactcccctaaaatagctaactcaaatttgtttatgaacataaaaagataatcaaatcatatcaattcaattcattagaggcattattaggagaaaatatgagattctttactatttttatttatatgtatattaatttgggcagattctattctatttctacctactaagaaaaagaaaaataaaaattaattagtttagtttagtttcatgtgtacaaagtaaatgaatcataataaagttaatttagtgtgttaggtgtaagattttgaatgggttaaaatttagtagcgtagcaaatttccaagtagttccttcccgacattgaacaagaagcatgtgaagtgcatctttagttagttcttattggttgtctaaacgtgtatacatacatgacttttatacaaggtattttctcaaaataaaaaccaatgtctagttgatgttgaccatgacccttggatcatccaccaattataatcatatcataataattttacttggagcattgttattagatactagtagtgtctatttactagtaatactttttaaaagttattatattaaattatataagactcgatatttagttgaactaatagcgatattgacatatataaaagtactacgtaccactaataccttttagtatttctcttttatatttattatcatctgcaatagtaacattctttgaagggtataaaaaatttctattatcacttaaagatatgatattttcttttatttttattttacattatttttgactatttttctgccaaaaaaaaaaagtaactatctattaaaaaatgtcaaactaaactatatttatgtcatcaaatattctttaaaatattctcattacagatgttctaatacccttaatgaagtgtatcatacatacccttaattctatgtggtgtggtgactaatacccttaattttattgggatgtatatttaatgggatccaaataattagatatatattataaccgtatcctaataattttatatttgtggggatgttgacaaagtttttttttgggggggcctcttccctactttttcggtagcttagataattttggagatcgcattagttataagggtcttaggaaccacgataattataagggttttatacttcatcttctattaatttggtcatcagtatattttttgaggattccatcttattaaggatgataacgtcacaaaaagctaatagcctcctaaagggtcaaacataaaccttctcataagaagctatggtgggattacaaccttcaatcgaaacaagaaaaaatgctcacaaaggcatccctaacactacattacacagcagtgttgacatcaagtgtcatgttcatattttttatactaatggaaggttataattatagtaatcaatttacaagttttggaaatggttttaataatctatggtatcgaaaacaaaatttaaaatgtttagttacactctcgtataactaattatttggatcttatttttgacactataatatccatttaataagaagaaattatattgtatatttattttattttttttttaatttatatttttcttctattactgttagattctaattttaataagttatgtgatgttatatttgatactttgattataaaagataatatttatcaattaaattatttgatagtaatatttggttaatatgtaataaaaaaaaatagttctcaacttatccccatttagtaaggcttaggatcccacgtaataaggcctcttaatttaaaagaaatattattatctttttctacatatgaaagaagttccttagtttttcaaaaatacctttttatatgcaagaattacataaataccaaatacacaaattaagtagctcaatgaagcgaaaggtaaggtatggtgactcgtagagtattgttatttagcaccttaaagtgtttaataccatacagctttttatattatttatgtagaattcgatattataatgaaccaatatgtccacgtctagtgttgtggtaatacttgatcaaaaaggggcaacgaaagtggtgggaaattaccaaacggaaaggaattcgtagaatgtaattaagatacgagtaatacgactcaatctagtactaatagtagatgagatgttacctttggtcttttatttttttgaaattctttttggtaatcaaatgtttgagaaatttataagtgttggattgggaaaaaatacaactgaattataactttttgtactctgataattcttacttatggtgatgtctggttggaggtaatgaaatgaaatagaatagtaaggaaacaattttgattctattcttttgtttggttgtattttaaaatattagaatgatattttaatagaatattctttctactatttccattttaaaaaggaagaaaagaccatttcaatataacaagagaaaaatttaataatttttttattaatttttttatgtattttaaattttattctattcatatttatattctcattcttattcttatatttttatttctaccaaccaaacgtcacctatattctgattgtctttcatcatctatgagattagagagtgaaactttcagctttcattaatcaaactatttttttgctaaacaactcatttggattaaatggtaattaatgtttgtttggtttatatatagttgcttctgcttatttttgaatgggtatctatacatttggtatcctttgtactatttaaatatatttttggtaccatatattttaaataacccttatttagcatcttatattttaaaattatatatatttcataccataaactcaaatttatttaataaaattttatcaatgcgattgttttcaattttatgaattctaaatttgaatttagttatttaattacatataattgagaaagatttgatcaaattaataaaattgtattgattaaattttactttaggataccaaatatgtataatttaaaaatataaagtaccaaatgaatcttattaagaacataggtaccaaatatttttcgaaaaaacaaatgatactaaataagtgtattcattttttagggagaaattacattgtatacttaatttactttatttgttttaatttttaccttcattttcatattctttaagatatactcacttttatatatgatgtctccattagacccattaggttaatgtaaattatatgctacagagtaggaatatattgggcaattcactcataaaactggatatattttaataaaatataatataagaatattttttattaatgaatataaaaaagaggtattttttcaatttaacacttttttagagtatgtttggtaacttttttttaattagttttttgttttttaaattaaaaaagtaaaaatattttccaaaatcatgttttatataacacattttttaaaaataaaaagaaaataatgtattgtattaattattacgataaaaattttgaatacaatgtaagttatattatttaatacttaacaaattgttctattagtttatattataatatttacaaaggatctgggattaaccccaatctcccacccgaacacagacaggacctatgacttggatccagatacagacctagattgaacacaagacctggatcccgggacccggaccccggactcaaacgcagacctaggacccgaacccaaacccgagactcgaacctagacttaggacctggacccgaacccaaactcgaccaagacccggactcgggactcaaacttgaactcgaactcagactagactcggacccgaactcgacccgtagtcgatattgggatcgagtttattgaaaatatattataactttacacaatttattaatacaagtcaatatcaaacatagtattgtattaaataatactgatacaa

SEQ ID NO: 112612 - DNA, 3566 bp, Cannabis sativa
tctatttatatattttaggttggaccaaaaatatatgaatatattttggttttgtcccaagaagatcatcaacaatcaacaacttatgcttgatttcaagctgttttaagaagcaagaaactttgctaaacttgagttcaaatgtctacaatacctccttgatgatgtctaacaatatatacccacaatatattctctaatctactgtaacaatatccactatatttttttttagtaaattagaagatttattcaaaacacaaagcactatttttgcataacacattgtactatattttttacattactacaaatattattatttacaattaaatatattcttcacactttaaatagctaaaatgttttatttcgaaccttccaaacataatacactactgctgccacaaaagccacatagaccaatttttgaaacttatatataactcatatgagctcgagaaatctaccccaatagagtgtttaatgattctaatttgtaaacaattcatttcatgagcataccaaaaatatagaaatggattaatgtcacttcatcaaaatctagagagttcacgttcggctcaatcgtatatggtcgaaaaattaaggaaaaacttctcacaattgatgtgttcactaagactcttccttcaacaatattataactttcatttccaaactatgtgaaggggggagtaggactgtttttatctagattttcaatttaaattaattcagttaattatcgttgtgcacttgatagttgtattgttactatagtttccttaactaataacttctacttttcaaaaaaaaaaaaattaaaaaaataaataataaataacgttaaccctgatactgtatatatatatatacatagctagctacttcttgaaactacttttttgatcattcaattcaatgcaatatactttcattcgttcattacttcatttacgcaatataattaaatgaattattcttaaaaatattttcaccagaaatcgtggttgtgctaaaagttttataacaatatttggaaaaatgaatatagctgtgttttttctgatcagtatatattagacagatatcactttcgttggcataaagcatgcatgcatgtacatataatttattttgatatttatggagtttttgttgtacaagtataagatactaatttgacaattttcaaactcaacatgaattgacatttgtatataatttgacaaaactaacacacgtacgtagaaaaatgaaagttagaccgacaagatctaatcccaaatattccagttacgacttctcttactgtatactactgtccattttctgttgattaatatttggattccaaaaattcttcaacactatatattaattttatgcaatttagtaattagtatttaaaggtaaatatagagaaagaaattatttactagctatatcaattaaattaagtaataaataattattgtgttttaagagagtctagatctagcctactatattattaaattgtgtaatttgtgatgtatatataatctaaaatgaatgataccatatcacatttcgatctataaacgtacaataattatttctccgtacatacaaatgatcaaattaatattcaatgcatgtctctgttgattgatgtctagtctatatatatatcaagttatcaactaaccgaatttatttgtagatagttaaaatgttaaatctatgatttgtatagtgaatgtctaataaataattaaaatatatgctaataatcattccttttactgtataataataatcttcaaataactccagaattatatagaggggtagaaatagaatagtagtcagcaatactgttcatcaagtcgaatgtaagctatagatagggtttaataacttgttattgctttttcaaattttcatttgccaaatcaaaataagtaagtaacctacaaaatattgaatattgattattgattattgaattgaagaagaacaagaaattgttggagatggatttcgggttaaggggggaggcacgtgcaagttgggaatgggggcaatcaatttgttctgctaaatctggcaaagaataaaaacagtagtaataataataatcactatcctcactcttttatatatttcactactctttctttctttttctcatttctgtctgtctgttgagttgtgtatgtgatggattgatttaaatctcaaaccagtggacaaaaaatgaaatgaaaagaccaaattgatttgacatctttgacaagatgtaacattgctgcctactaccccaactctatttccttttcaatacagccaaaatcatcaattttacaataaaacaaactactttattatcatcatcatcatattcatactctctccatttgttttttattctttatataaataatatttaaaaactaaaaaacacttcattttctggcacagtactattactaccatactatatctactacttctttacttcaaatccatgtttcgtgtactcttttcatgttagatttccctgcatgcattaatttactcctcttttcaaggggtgcatgttgttttctcaatatctctctattttatttatttttaaaaaaaatgtttttcatttctcaaataattgtaacacactacagtgcagtacaggctctttggaaatgccattattggaaggattcgggggcatgtcttctgaaagtgaggccatgattctctcttttgtttaattttcttttggttttgttagaaatgagttgggatattattggtctcataaaatatatataaaataattataataatggttttggaattagactacacatattgattgaataagataattaatagaaggtagcagcaacagtttaacacaccagaattaggtcaccaaggtttaccaatgagtcacgtcggtacttttttatatccattatttattataattattttactgcctaggcttgtcacactcagtagtaccatctagttctatcatttactgttttcttttctctttaattctatgtgtataacgcaatcaaagatagaagtctattctattgtcgatccatgcattccatagtacgatctgtatttaataaatacgtacctatctacaactaactaatgttaacccactaaagctatacctcactcgtgagggaggaggggtggaaaaagatggaggacatgatgagtacccgcgtttgaatctaagggtgtttgcaaattattaaattatatatatttaataaattataacttttatttaatgagaaaaataataaaattatatgggttgagaattatggggttccatctcaaaagaaattggcaatgagttgagtagtccatgttctttatatatggttcaatacttttatatttaatccatgtgagacaatcttctccaatatccccctaaagatggtggctattttcgctcaccaatcttgaatcaccttatcacaggccagtgcggctggctaaccatctgaataggtgtggatcaaaagtccgctagggatatg

SEQ ID NO: 112613 - DNA, 5394 bp, Cannabis sativa
  modified_base (5243)..(5248): a, c, t, g, unknown or other
  modified_base (5353)..(5354): a, c, t, g, unknown or other
cttaaaaacaggccaaactgtttttatagcattttctactatatagctaaaacggtaagtaaagtgacttctagttatatttcttcacaaggcttcattttctcattattatatgcacgtggaacttgtaaccaagaaagcaatagcattaaagtaagagctattatatcctttttcttcacatatatgaaaaactcttttgcaaaagagtctagttattcttccatctcagaaactctgcctgtttcataaacatgatacatccaaacaggttcaagcaacactctagcactctctaatttctgtttttcatcttcatcactttcttcttcaatgtgtctttcaatctgaggatatatgtgttggagagaagccaacattatatcatcccactccttgtcatcatgtctgaataacttggtacatacaaagtgtactagtcctaataccagccccttattcttcccttctaacccaactaaggagccaaccaagaaaatttcaccagcagcatcgagtatgctgggatttcctttcaccaaaacgagaatcatttccaaaagtttcttgaaagcaggtaattcttctggttcagaagctctttcatcttccacatcaagttcggttttctgcagctcagctagctcaatcttagccaaggccgcgagccacgatggaaaatggagcctgaaggaatcaaggacagtcctttgtgccacttctccatgtatctgtttcagcatgtgcccatatcctaatgccagaatcaaatcaggcagccaaggcttagctgcggccacaaaccttgcagcataaccagagcccagatgctgttcaattgaggtcagtagatcaagcatgtcattggcaagaacaaaagtttgtggcctaggcggtgaagcttctgttatgtctttaagagctagattgagtagttttgctgcatatgtgagggagctcttcagacacaaaattatatctttcacatcatcctcttcaaaatgattcaggttattagattgattccttaaggttgatgctatatgtcgtaaatagtctgatgtgaattttaagcaccgctcgtgattatgaaaaacaaaacccattgtagtagcatcagccatgaatttgagaactgaagtaagcattttcaccttatttgacatctgttttgattcagtacagacagatcctgcatatatgtcataaatgtgagcattatccacaaataacatacatatatatatatgtatgttcatcacttaccattatcactaagacgagtagcatccgcttctggttccttgttcctttttttgcgagtactctttgcttgcttagactctgaatatggtttcctcaacttttccatgtcaccttcttggaatagcttctctgtacagttaagcaagtgccccagtgcctgtttaataactgtctgcagaaaaaagatgattttaatatttagtaatagtacgaggtactacaaacttcagttgcatagcagctggcttgacaaaataaaatgagaaatgtaagaaatatcactatgctattttacatgtaagagctaccattatagagaaaagcaataataaagtaagcacataaattatgagaactgagaaaccacttgccttcagacttgcttgtgaagaatcagagctatcattctccatgttaccacaatctaaaaaactacttattctaacattttcaagagtcatgtgcaatgaaagagttgtgtatgccaaaacagaagacacgtccatatattcacaatttaagcactgcaaaatgctgatttcagaaatggcctttaaagctagaactagtggttctagattctgagattccaatataacttttctactatcctctgatttaagcaagtcttcaatttgccaggctattcctacagagactgcatagtcctcttcaaaattgcctggctttttcttactgacacttttccactgatctacaattttgctggccgacctaccctgttttcttttcttagagaaaacacttgggttaggtacttcaatattaaatttgacatggcaacggtaagccgttttttgtagaagtgatgttagaacttcaagcatactatcaagctgaccacaagacagtaataacttgtgagcggacctcacttcagcttgtctttctacatctccagataaaccactacactttgttattaaatctatgcatcctttaagaatctcaatcacatcatctgctgagatgatggacgcaatgttgaagattgaagactgagcatgcttactagatgctgctttagtgaacaatcgcttcaacttttcatcaacaaagaattctctaagagcatccttgtattttggctcaatggtaaggttactgcaaagattggaagcagcaagaagaaaaccattaacgtgatctacttgcagtttatcaagcgacaagaccaagctcatgattactttcacaagttcgaagacagacttgagagatgccccctctgatacagcaaactcacagaaccttgctccagccattggagatctttttataagtgtaacacaacggttacaagcctcttcggtggatgctttagaggggaaatatgagggtataagcaatttcgttattttctgagccacttgagaatgatcatcagctagtgtagacaataacaaatctaactccaccacctgtgaacagaatgaaataaacaaagaaaacaaaataatcaactcacaatacatatacatatataaatatatatatatataaacaaagtaaattcttcaactcactataccttatgaaactgaaaatttcgaatatcccttatcacaaggagaagatctaccacagctagtcgtgttgaaaggacattatcaactatcaaatgccccattctaggcagaagcacttttaaaatttcatgagattgtggatttccaagtaaataaataatgccattcaatgtggaaagcctgacttcgttgcatatgtcacgagacatgtcattaaaaactttcgttagtatctttgtgatggttggtgaagggatgatttcccaaaataaatgcagtatgcggcaagaaccttctactgcaacaactcttatgtcaggactgtcatccatgagcattctctccaacaagtaaaattgcttatcaagcaaagcatctttcacctccttcgttgcatcaggatcttcaaaaggaaacaagtccagaaacagatgtagtgcattttgacgaacatttgtgttagcaacctgaaatagagaacacataaattaattatgacatactcttcctccctcaactgaattttgtacttaacgattaatcatcatcattttcttcaccagaaaattgacttgtttgacaaacatgaaaatacaaagacacagcaattgacaaacaacaaaatttaacacgtagattcgatggaaatgaatcatattaagcttgaccaattgcaacacccaaactgaacttttgtgttgataattaaatttgctcttacctctctctctttaacatcataatcaaaatcaattgtaaaatcatacatgcatagaaaaacgcctacaacaatacctgtaaagaccgaaatattacaggctcagtaagcccaaaaagtagtttctcgacaccatttgtggtccgctgattaataaaagctcccaaaaccctcctaacagaagcagccaatgtcgcagagcttgcatatatggcaccttctactaaaccctgcaaaaacccagtttcaatctcctccttggtgtccatctcagcgactttccaagctcgaaacaaaacatcaccataagcctccagcattgatttacttccgaacggaatttgagaccgtatcatggccagaaactccttcaacatctgcctacttaacccaaaagcgaaagcaatgaatctcctcccttcttctgttttcatatacaatggagcaatcacacaccgatttaacaaaagcttgaggtcttcaatgctttcgtccacaaaatcgaacagaacaaaggcctcacgaagaccacatactctatacacatcctgcttcttattcaaactcaatgacctcgacagcaagaatggaagtgactgagaaatcaacgattcacgacccgccaaatcctccttccaccactcttcgcacaagttcacaatctccgatgacaacgcagaatcagactccaaaacaatcagattatcatgcaaactttgaactcccggcaacaaatccaacggagaaaacaccttcttcgggtgcgaaacgcacattcgtacaatgtaagcgatggcttgaagactttgggtgattttatgcttctcctcatctgtattcggcgccgaattgagttccgggtctcgttcgatccgggttctggggatccgagatgatcttcggtgacgtttagttgggggcgagagcgacgacttagcgggactccggttggattcctgttcgaatttgggtgcagtagggttgcaaaatgattggatagcttgagaaatgtaggcattaagagaggacggtaaagaggagcagaggtcggaagagggcttaatagcgtgaattagggttttgagagctgtccttgaagatttgagggcgaattttgaagctgaagcgatgaattcgtctggtgaggattgaagagtggaacgaagttgcttctccatagttaatcgtaacaacaatggcgattatcaattttttgtggagcttgattgttggagaatggaaatgataacaaaattgagggaagtagtttcagtttgaagcttaaaatcactccattttcttttctatgattagtccgtttcttaagaggtcagccaaaggatgttacgttagagttttaaaaattttaaaatatatttcgcgctcatttctttatttttttgttaacagttgcgggagattgggcttacccatgtccgcctagcggcaaaccagcccatcagttgcacacatctagcccaatattaatttctttcttttcttttcttttttttgaaatctacaaaaataatgccaccagaatactaagatcatcttcgagagatgtaaaaattgtgttatatttggcacaaaaagtagttttgttgtaaatttacaccaaattttaacttaaaaagtagttttgttgtaaatttacaccaaattttaactttgtgctacaatccacaattacaaaattttgatgtaannnnnnatatctaattaatattttattaaaaaaattaaaatctaataatttgtaattaattttattattattttaatatgtaagacaataaaaaaataatataaatatttnnataatttaatgtgatagttaaatacactaataaaataata

SEQ ID NO: 112614 - DNA, 8099 bp, Cannabis sativa
taggcccgtgcctagggcccacacttttcgagggcccaaaataaaaaaataaaaaaattattaggcttttatttaagttaaatttaagtgtatgataagcaacaaatattcatagcttagttggttgaggtggaggatacaatatccaaggtcatgggttcaaatcccacaacaattttcttttgatatttttttttatatatttttgagggttccaaaatttaattcgtcttgggcccatatattttcagggccggccctggtttcaagagaaactgactgcccttgattctacttgaccatccaagaaagtagtacactcttcaatctgtaagttgtttgaatctcgagccaccatgccaaagccaaaattattctccctctcaagcagagctacatttatattaaaataattttttatttttatattttaaaataatatttttgatttttataattttatagaattctatatagatactcttaaagtaactaatggagcaattaaaattcacataacaactctcatacaaaactatcaaaaaaactcaaattataaattaaaaaaaataaaaaatatatataaaataattttcttatataaaaacacagttaatgatcatatatataaagaggactaaatggaggttgaaccattaataaaattaaagtttaaattagcttttaaggtaattggtacacctacagcattaatatatcactttgtagataaatttcaatgaatggattgtcggggaaatgaacttatataaagtattggtgtattattttttaatgttgtcattaaatttaaaattacgtacaagaagaacatggagtgtttattttttgcaccttcaaattcaaagtgatcaatatttattcaaactagaaaactatgcacgaccatgttttattaattacattacagatcagatagactaatagtaattctacagcgcatcactacgtactactcgtgcctctaaatctaatacgagtgtttgtgtgattaattattaaatctagcatattttagagtatgaaaatgtaaataagtgattcaaatataaaatattttaacttattttgttaaaaatttactttaatagtgtgtgaaatattatgatgcaaatatgtcacataataaaaattaatccaaatttgaattacaatatactttttatatttaccattgcaatttttattattttatttttaaattttatatttacttttgtattgttattattattttatatttacattttcattacatttttttttatttttcctttcattcacataaaatttgatcattttttaagaaagatgctccaatggcaagtaacttcaaaagttaaagaattagtaacatagagattgacactgttcagccaattgccatagtaatgggcatcctaatagagatgatatagtataatagtactgcaaaaatgatctttaacccttgaagagagggtcatagaaagttttccatgtcctcactttataagtatatacttggatatttcgagacatgaaaaattgtatgagcgcaattccaatattttatatatcaaagttgctcattagagcatatcagaggttagctgcttttaatagtagctattgcatttgagtaaaatagttggacaactgtcgtagcttgataggagcaatgtggtatttgacttttttttctttattaaataaaagtttttttgttgaaacaaaaaaaataataaaataaaattctcatttttttcctcggttctttttttagcgtcggggtatgagctgacgctaattggtagttttttgcttcagttatacactgaagcataaaatctctgcctattttttgcctcggtcaaccattttggtgagacgcattgaccgacgcaaatagtgttttttgtagtagtgactctccaaaaatattacaaacacagagatattaaaaaataacaaaaagaatatcaaaatgataatgcacagaatagaatagcaaaacagagcatgcaaacactggaattacaaggtttgatcacaaccagaaagcttgtgtctactccttaggtggaactgccttgaggctttgcctttattgattgaaaatgaagctcagagttggtacattacagggacagagttctggaccagaaatggagtcttgctcctacaaaatgactttctcaagggacctgagttaaacaaactcaaccttttacaacaattttctcacactctcatctcaacctgtttaatgaacaaccaaatggtctttatatccagaccagtataaagataacataagccaactaatatactcgaaaaataaataactattcccaactaacataactgactaacttgtacaagtgtataaatctcacaaagtccacctagtttatatacttgaataagtgcaaactctgagccagaaataaaagggcaaaatattcgttccatcaataagattttcagagtgaattcctatgtcagttgtcaaccccttgaaccagatggcttcttttactactttgttgcaaccatgtactctgcttaagtagatgacagagctacaaccttttttagattggattttcaactaacacaacccccaaaaacagtgaacacaaagaaagtgatcttttaacgttcaaatttctaacatagtcaaagtcaacaaaatcagttacattatcaatattgttgcaggctttgccaaatactaaaccagttttgagtgagcctttgatatatttatatatccatttcaatcgcttctagtgttcttctcgaagatcacaaataaatatgctagcaacactcatgctatgtgctagatcaagtctggtgcacatcataacatacatgaggctccctagtctatttgcataaggtatgctttccataagctttctctcagcatttgtctttggtaactagttctgagacaatcatgttaagtttatcaagtaccttcttaaggtaattgccttgagataaacagatggtatgaggtatgtttctcttaatttcagtacccaagatccttttggttggacctaagtccttcatctcaaattcaactttgagtcgagacttgagcttgtctatttgaattctttctttcccaactattaatatatcatcaacatacactagtagatagatatcattataaaagtagacacatgtatcataattgctcttggtgaagccgaattttatcataaattcatcaaatatttattaggttccattgtctaggagcctattttaatccatagagagacttatttagaagtcatacttggtccgatttttcactttcatagcctttaggtatccctatgtagattttctcttctaggtttccatgtaggaaggcagttctaacatccatttgatctacctcaaaataaaattttgcagccatggacataatgactctgatagtagtttgtttaactactggcgagaatgtatatgtcattgtaatcaatgtcttcttgttgagtaaatctcttagcaataagtcttgctttataccttggatcctcacctcttggtattcctttttctatttgaataaccacttgaatttgattactttctagttttctggcttgttaacaactgtctaggtcttgttctttttcagtgatagcttcccctattcaatagcctgcaaccaagctacactatccttcctagtatttgcttatgtgtaactagatggttcaacactgtctatgtcttctgctacagcaagagtacaagcagtgaacttagcataatcatatttattaggggcttttgtgattcttctctccctatctcaagctagttggtaatttcttaagctagcttgggagtcatctttggagctatcttcagtagtaactttatcagcatcagctgatctggatgaggttgagtccacctcaatttgaacactactacttctagtttttggtgcagcaatcgcaacttctttcttcatagtcatttcttcgtcattaaagactgcatccataggaataatgcatttattatgcattggttccaaacaccacaacttgtaacccttctcaccatccggacagcctaggaacacacatttaagagctctaggttaaagtttgtcttgcatgtaatgagcataggcagagcaaccaaacacccttagtgatctaacttaggtacatgacctatccgaacttcttcttgtgtcttaaaattcaaagggatggataggcacctgtttactaagtaacatgcaatcttaatagcttcaccccaaaagggcctatccaaaccagtaccctttagcatacacctaactctatcaatgagatagttctatttatccttttagcaaggccattttgctgaggtgtatccctaactattaagtgtctagctatcccatgttccttatagaattcatcaaattgctttaagcaacattctcaaccattattagttcttagctttctaattttgaacccggtttgattctcaattaacttctttcaggtaacaaaggttttgaaaacctcatccttatttttcaaaaggaacacccttactttcataaagaagtcatctatgatgctaataaaatagtttgcacctcctatagagtcttgattttggatgaaccccagagatcagagtatatgtaggctaatttttcattggtagtgtgttgtctagtggaattcaaccctgcaacttttaccataaacacactattcacaaaaataaatttgccactcaatccaccttgaaacaatctctgcttgtcaagttcagtgaggctttctctctcactaacatgaccaaagcctcaaatgtcatagatttgtattgtcatgtttgacattgttaacaacaggtgatgctataagaatgaatattttgttctaaaaattaatattttgtaaatgtattaatcttttattaataaaacaccaactttattaactcagagcaaatcgctcattgtaatggaaatttacaagtttagcagggccatttcttaaactaaactcacaattaacataaaaacgagactgtctcacaaagaaaacatgcatataaaatttatgaaataaaagttcatctgaaaataaacataattggctaggctcgccaactttccctaggcataggcgtgacttggtcggggttgtgtcttcctatatattgcgactcaatttttgctactatgattggtcttggctctgtgaaatgattttgagtgttttagtcttgtctttatggcatagttttgagtgttttggtcttgcacaatagttgagtgttcgaattacgaggttaaatgaacatattgtaacagttttaactgttgtgatttctaaacggcagataaaactaaatatatgtgttcttaaagttaactgttatgctacaatatttttcatcttatttttggtttttttttttttatcaaacggtatgagaataattatatgcggctgattatttaactttgtttttaagcttaattctaatcgtgtttgtcttcaacaaaaaaagatgtcttgttcaattgcatgctattaattcattatattagataattgctaatttgctattaataaaattgtataatttattaaaaaataaacataattattattaaatattagtgaaataaataaaaagaatattataacgttgaataaatattattaatataaataaatatgtcattccatggttaaatacaattatattaatatttatttgacataaagatgagcattgttattaatttgacatcttaaacaaagcgttcaatataattagtcataccaatttttttatattatgtattaaattaaaatattcaattttttttttacatatttgtaaaatatatataattggtagaacaattatgaataccattttcaatgggctgctataagatgaaatcgtttgatgatttcagatgtgtgggctttgttgataactacaatatatatatccttaggattagaatgattcataattattatttgaaaatcaaacttctcagccgccacatgtcttattctaacgtatatatgaaactttttttttgattaattatttattttttattgttattttgtctgggaaagttacataatcatcaatgtttaaattaattaattaatttcggtgtaatttgaatttaatgacttagtattagaaagaaactaaaaatatatataatgggttatcgattatcttagaagaaggttagacatatatacaatagatttcgatttttgttggttttgctgttgaggttaattagcttttgtgaataattaagccacgtgtatttgagttttgacccccatatatatgtgcaatgcaacaaccaacgtactcaaatagaattttggtgtcctaaaataattaatagtgacatccctagaaaaattcaatatgaaaaaagaagatagatttggttcttaagtatttcttactttagagagaaacatgtctataagaaagaaaaaaacacaagtaaattataattgtctttaagaatacgacaacattaatctatagaatattcattgtaggtagataaatgtaatgaacaaaagtaggaattttgtccaaaataaacaaatcatgcacgtgaagaggttacttgctattgattagtactactattactagatatatcatatatagaaaaaaaagaacaaaacaaaagtcaaagatcccatttacaaatttctgttcacactgaattacttaataacctatacttaattattgtctgacactaacctgaaagatcataaatctggattaatatttatttaatgaaaagaatgacgttaacaattttcattttgggtttgaccttcttattcgtagaacatggccctgggcccaggcccacccatatgagccgaagtgatcagctcccacgaaccacttcaccgactcagcaacaccgcgcaccaaagcaaagctggcttaaaagcttcaatggtgggtcccacacggaacggtgtgctgtccttatctccaatatccacgtgtcaatacgtgtttggctaacccaaatctgccctctgtagactctttcctggaaactaatctcaattttctttctctctcctattatatttatataaataccctgctcttatgggtttaaagcttcttcaccttttctctctgttttttattttataattaaagaaattaaataataatgggaaactgtttgagaagtgaatcgacgatggtttgggccggcgaagattggggttcgttggagaaagagagcagccatggcgatctcgaaagcaaaaatagtaattacatggagaggtttaagcttttgggtgatcatgatcaaacaggaccatcatcatcatcaggtaataatattcataatcatcatgaagtgaagatcaagatttcgaagaaggagctggaaaaactggtgagtagattgcgtggtggcgaggatggtatgtcggtggagcaagtgctgttgtcggagttgatgaagggtaagggtgttggtttaagtgttcaacatcgttattataaggagtataatgttgatcatgatcatcagagccactgggaaaatcaacggtcatggagacccgttcttcagagtattccggaggtcaattaacttagcttacccatttgaaatattcttgggttgaaaaaaagaaaaaaaaaatgatgcacatattttgtatttctcttgtaatacgataattaggtacatatataaaaattacctcactttttcatgttaaatttaattttttggtactaaattatgaatttctatcacaattttttttcttaatttttttaatgtcggttggttatagttacaatagtcatgataaactaccatttcagaaactctgatgttaaaaatgttttgaaaatttatagagagaatattatatacctataaaaataggaagttaggatatcataactcacatttttttaaagctatcctctgtttttttttttttttttttttttttaaagggggtttttttttttttttt

SEQ ID NO: 112615 - DNA, 2715 bp, Cannabis sativa
  modified_base (27)..(43): a, c, t, g, unknown or other
  modified_base (1711)..(1712): a, c, t, g, unknown or other
gggattgcacagcttacccggtatttnnnnnnnnnnnnnnnnngactactgactgtcacattataatttatttacatactaaaaatataattaattaattatagtttatttacatactaaaaatgtaatcaattaattatagtttgtttacatactaaaaataaaaacaaaaataaaaatacagtacaatcggtcaaaacaagtctgctgtattgagctttctgaaagaggaaatgaggaagcgtatacaaagttagaatggtaaactcttgtcacgtgctggtaaggaggccctagttcgtaatgtgactcaaagtcttccaacttttgctatgagcatttttcttttgtctatggaacgtgtcatgatttggaataactaatggctaattttggaggaagtcgtctccgaattcccgtcaaggaatttcatggatgagttgggagaggatgacgcatagtaaggaggttggaagtttggggtttcgctctcttcatgattttaatttggctatgttgggtaaacaagcttgaaggttcctgaccaagcctgattcgttagtttctagagtgtacaaagctcggtactttaacatgagaactttctttcagtagaacttggttataatcagggccggccctaggcataaggcgggctaggcccgtgcctagggcccacacttttcgggggcccaaaataaaaaaataaaaaaaattattaagcttttatttaagtaaaatttaagtgtattataaacaacaaatattcatagcttagttggttgaggttgaagccataatattcaaggtcatgggttcaaatctcataacactctttttttgatatttttttttatgtatttttgagagccccaaaatttaattcgtcttgggcctatatattttcaggaccggccctggttatagtccaagttatatttagagaagtcttgttgcggtaaaggatttaattcgtaagagggcaaggagggaaattggtaatggagaggagactcttaaaattgatgctccattgcttctgaatgggtcaattctgaatcaaggtagtttggatccttatttggctaatgaaaaggttgatagtctttctgtggtgggtgagaaagcttcggatgttgatgttgtcaaagatttgtttgatgaggaagtggcggtcaatattcttggtatttctctttttaattcagttactaaggattactagtattgtgggtttgaatcttctgacaagtatacagttaaaaatgcgtttaaattattacaggcaaaccgtgaggctagagtggatggggaggttgtggcattttggaagaagttttggcaattaaagcttcctctaaaggcaaaaaattgtgaatggagggcgggttagtgtgtgtcttcctatgagagttcaatcgaagactaaagatgtcgatgtctctttgttgtgttcgatttgtcatggggcaggtgaatcaattttgtactgtttagttgcttgtaattttgtgtagaattgttggcgggtagcgggtttggcaatgattccaattaatgtagggtcgtttaggggctgatttcttcatttgttttcacgattgggtgagaaacaaagtgttcatgcaatgatgttggtttgggcaaattggtttgcacgaaactcttgtggaagggtaggaaaagttaggtggagttcgttgtcaatttnnctcgtatcactcttgatcagtggagaaaagctcaagaaagaagtttgtttcctgcgtttgatatacttgatatcttttagatggggttgagctatggtctaaaccaggttatgaaaaattcaaagttaatattgatgttgcgttgtttgacgaggaaggaaggcatagttttagtggggttgtttgagatcacaagggtcggttgtagttgggattacgagattgtgtattaaataagttcttctagagattgcttaagccatgactctcaagaaagtgttattatggttgaagtgcgattttttaggtattagtattatcaaatttgattgtgtggtattagtacaagctattagaaatgttaatgtattgtaaaatatttttggtagtgtcgttgaggattataaacaatttttatcttcttttaggatgtttctttatattttgtcaaatagtcaactaatcacactgctcattttatggctagagcatcttatttatatattggtcgtattttttcgaaatataatctctcttttaatgttactaatattattgagattgaattaggtcttgttaactgaaatttacagttaaaaaaataaataaataaaataaagataccttacatgtggggtaaaagttaaaatacatttatttatagttttagggcagtcctagtcttgatgcttgaaaccaaaattaaatacaatactacaaaagaatacagcaatgaattcttctgtctgctatatcacccaaataattcacataacgtaaacagtcaaacgcttcataatttttcaaacttcgtactctgatcacacacacatatagagacactattacaattattatattacacttaacggtcactgattcagattcaaacaactctacatattttattgaaatttttacatgaaaaatcctttttacacactttattacataattaccttcacacgcctattactacatttatacttacaaacttattttt

SEQ ID NO: 112616 - DNA, 2997 bp, Cannabis sativa
  modified_base (2962)..(2972): a, c, t, g, unknown or other
ggcggtttccatgcgggcggattctaatgggttaggcggttcccacggtttagcggtttttatgttccggcctacaaaacagggtgggtggcagtctgatgttgatgttgaattctgagatgattgaatgaagccaggtgagttctcaggaagcattggccatggctcgatattctgcttcagcagaagatctagatacagtttgttgtttctttgatttccaagaaatgagagattttcctaaaaaaatacagtagcctgaaattgaccgtcgtgtgtccaaatatgatccccaattcgcatctacaaaagcttcaaattgaagtggtgtaggacctgtggcataaaattaataggccttgtccaggggtagctttgaggtattgaaggacacggttggcagctgtgagatgtggagcacgaggtgtttggaggtattgacttaatttgttgacagcaaaagagatatcatgctgagtgatggtgagatagagcagcttcccaataaggcttcgatattaagtaggattgtcaagtagggatcctatttcattgttcagtttgatattaggctccatggatgttgtgactggtttggctcccaaatgtcctatttcctgtagcaattgaagtgtaaaagggtgttgagtgacagagatgctattattatttcgagctatttcaaggcctagaaaaaaataaagtgggccaagatcttttagttttaaatgtgaatcaaagttattgatgaattgatttagagcagggatgttatttgtggcaacaataatgtcatcaaagtaaattaagattgctaaaaaaacattgttggaatgtttgatgaagagtgaatggtcatttttggactgaataaaattttgttggagaagagtggtgctgagcctgacataccactgtcgtgaggattgttttagtccatatagactcttctttaatttgcatactgcattgttaggaatagggccttttggtttatatccttgtggtaatttcatgtatatatctttaattatgaagatcaccatgcaaaaaagtattgttgatgtccatgtggtggagatgccactgttttattgtagctaaggcaaagaggagttttagtgtgttaaattttaccattgaagcatatgtttcaaaataattgatgccttattgttgtgtgtagcctttgactactaaacgggttttgcatctttcaacagatccatctgggttatatttaattctataaactcatttgttgcttattatgtgttgtccaagaggtaatggtataattatccaagtattattagattctagtgcattctgtgtccatggcttggttccaaaccttttctttacatgcttgggcataagaagttggctcaagtatgtgatatgtggctaggactgctaccctaaaagcagaagacaatttattatatgaaatgtaatttgtaatggggtagagagaactgcttgtatggttactgttattgcacctgaaatccttgagatgagcaggagtggaaatggttctgcctaattttgtggatatttttggggttgctggttttgtttgttctattgatgtatttggatctggtgtagtgatataatcagtagaaaaaactgatctatggatgcatttggagtattgttgtggaaaggatagatgtcctcataatatataatatctcttttgactgaaatatgttgtttgtttgtgtatcaatgagtgtataggctttcatatggtcaaggtagcctatgaaaacacatgattttgctcgaggagcaaatttatggttattttgaatgggggaaacataggccaaccatctaaagtttctaagatggttgtagttaggtggtttttagtgaagcagttcataaggagttttatcttttaatagaacagagggtgttctattaataagatagacaacaattttgaccatgtaattccaatatgataaagataggttggattgaaaagcaagtgttgttgctacatttagtatatgtcttggtgttttctttcaacaataacattttgttgtgggctagtcacacaagagttttgatgagttgtgccttgtcttgcataaaaacttttaagattaagttcatttgcattatttgtcctgatagatttgatattctgtttgtagtggacattgacaaaagtgaagaaattttgcattatggttggggcatctaatttaacctgaagtaggtatatccatgtgtaccttgaatggtcatccacaatggtgagaaaatatttgtatccttctgtaaaaggaatgggatatggccctcagatgtctagatgtatgagatcaaaaattgatggtgaaaaattattatttgatacaaaatgtaatttttttttatattttgagaaatggcaagtgagacagttatgtacattagatgcatcaaaaggaaattgcaatcttttattcaatttgtttgtaatcaatacagaataatgaccaaggcgtgtgtgctattggtttttattttgtacattttgagagactgatgtgtaggcttggtagtgagttgcatcttgatacaggtagtagagcttgctaattcttctagctgtcccaatcgttaatgtttgagaatggtcctgaatgtaacatgtattagatgtaaacgacacattatacatgctttcataaattaatgaagtgatagagagtagatttagttagaatttgggtacaaatagcacataatgaagtgtaattgcaaagtttataataacagtaccaatgagttcgatctgcatagtattgccattaggaagagtgacagatttgtgtgtggtagatttagtgatgtgagaaaaatgtctaatattgcaaaaaacatggtgagtagcactactatctaaaacccaagaaattggaggttgaaagttgttgtaacaccctaactaacnnnnnnnnnnnacgtgattttcaaacatactgtgca

SEQ ID NO: 112617 - DNA, 1443 bp, Cannabis sativa
ttttttttaatttgaaaaaattataaaaaattaattacttttttttaaaaaaaaaaaaaattaaacatcttcttctcaatctgatccccaaatgcatcaccaaacatccctccacacctctattctgacctgcttaacctcagcctcagaaaaaggttttttaaggtcagaatagaggtgtggagagatgctgctggaaatgccactaagggtaaaagcaatagcttcttggtcctgtccttgggtggagtagagttgagtatagaaatcaacaaaagggggaagcagggacgatgtgacactgatgatggaaccatcaataagggttatggatcttatgaaattatttattttcctagtcatggctttgtggtgaaaaaaatttgtatttttgtcgccagatttaaaccaattaaccctagacatttgtttccaatagatttcatttttaagcagaagagcatctaacttggattgaaaggttttgacctgggccatgtcactaacagtagggttattggagaggagaattcggtcaagatctttttgtgtggcaatgatttgctgttgtaaagaactttggctagatctccatctcgaaatattcttaatgcactgattttggctaaaaagaatgtagagagataggaagattggtttgcttagattttttctaagaagtattgacaacttgaaaaaattgaccatccttaagccaatggttttcaaaggagaaggacttggggactctagctttgctaagatcatcatcaagggagactattaaggcacgatggtcaaaaccatagaatccaagatggaaaagggtggttctagggaagagcccatgccattggttattagcaaggctctagttgatacgctcaagggcagtaccatgtttccaagtgaatttgttgccagtatgtgggaggggaagaagattgtgtttagctataaaactttgaaagtgaataatggcatcagagggaggtttggtcgtagtattcttgtcattgatagagagaatcattaaaatcaccacatattaaccaaggaagagtaggagcagagtcatgaattcgattaagaagagtccaagttaagtgtttattgctaggatatggagaaccatagaaactagtaaaatgccatattatattatcattaagatgaacaatacaatcgctatgactaagggagtaagttaaaatatttacattaatactattgttccaaaacaacaaaagccctccccctaaaccgctcctaagaactttaaaaacattgtcaaaagaaagactatgcttaatacgagttccatgacaagaaccaagcttggtttctaaaacaaaaaacaaaatggattggtgctgtttcaccaacagggagagataacggaatgcccgaggactccctaaacctcgggcattccagctcatg

SEQ ID NO: 112618 - DNA, 970 bp, Cannabis sativa
taggtgggccctaggcacaggcctagcttccctgtgctcagggtcggccctgcctaccgatagagaatttttgctagatcctaccatagtattaccttatatatatggtgcatttataaacaattaaacatttgactaggctttaattccacctttaattgaacaaacaaaatagcccaaagcaactcttgattactggttagggtgcattaattgtactttcaaacatcaaacaacaaaagcaatgaattgtaaaacttaactctcctttcacaattttagctgtaaagctttattagggaccatggagtaaaataatggcaaattggtgaaaattaatgtttagtatatatgtattaaaaaatgaataaagctcattcataatgcatgcagccatttattattattataaatcaagagaaaagtgaaaaataataattgtttttttatataatattaatagtactgggacattgaatgatttactttaatttttccctccctttcaatctctaaaatagtatataaatagtttgaaaattcaacaaagcaaaaacaatttaatgtatataaatttccaaatgttgtgtttcgataatgtttagctttgataaagaaagaataaattgtatttgctttcacatccataaaaatgtcgttaactatttttaaaacttatcacaatcatgatttttcttactttaagtttgttttacaaatacatttatcgacctattaaaacttccttcatgtatacagtgaatgttaataattaatatatatatatattgaagaggttttaatagttacatttttattgtaaccatcatagttacatttttttaagctattcaattactattaaatggtcgtgattaatttgaaaaataaataataattaacttgtaacctgaaagtaacctaataatttattttttttataaaattttaattaagattaattatattt

SEQ ID NO: 112619 - DNA, 3101 bp, Cannabis sativa
tcgctgtatccacaacctgggccaaataagctgatttgcaagagaaacgaccattactttccaaagtccagaaccaactatcatgttcgaggccagcgggggaaccccctgccagaatggctgaaatagtttcttgatcaaagagcctgttaagcgtttggagattccaaccaccattttccagaaggagctcagctacctttacctccctattcaaatcccgacccaatggttgagggataaaaccttttaagtgagcaacccaaggatctacccagatattagtatccctaccatcagccactctcttgcaggcacctttgcagagtaaagcttttgatttcactacattcttccagaaccaggagtccgaggctttcggctcacagtcaaggaaagacttacccttaaggtatttggcttcaagtatacgacaacataaggacttatgtcctgtcagaagattccaaccccacttggcaaggaaagcctggttcatctctttagatttccggaagcccaagcctcccaaagacttggggaggcacattttgtcccaggctttaagataaattccgtgatttcctttctccgaaccccaccagaagtcacgcactaaaccatcaatcttagaagcaagcttattggatagtttcgtagtttgcatagcataaagaggaagagataagcccacagacttaataagagtagctcgccccgctttagagagagtcttcaccttccaaccatgcaatttcgtagttaggttatccaaaataaagttaaaatcagcatccttttgtcgagatctgaacagaggaagccccagataattaacattaccctctggcgctcttaaccctagcagctccctgatcctttgcttaatttccctgggcgtgttcttactaaagaaaatagaggatttcattttatttaccctttgtcccgaccaagagcagaacttctcaagacactcccaaaaccccttagcctcctccacattggcttttccaacaagaatgaggtcgtcggcaaagaaaatatgagaaataatagggcctcccctactcagtctgatcccgtttatggtccccgagagttgggcctcttcgagaatccttgacaacatttccgcagcccaaataaaaagatagggtgacaggggatcaccttgacggaggccgcacgaggggaaaatcttacccactggacccccattaaggcaaatattaagggaagtagtagagatgcactgggatacccaatcccgaaactcatggggaacaccaaaacaagtcagcacatggtcaatgaaagtccagctcatcttatcataagctttcattagatcgatctttattgcaaacaagccttcccgacctttctttctattgaaggagtggactatttcctgggcaatcacattattatcttgaatgttcctcccgggaacaaaagcagcttgggtggggcaaataagcttaggtaacagaggcttgatcctgttggcaataatcttggagataaccttataaaccacattgcaaagggagatcgggcggaagtgatttggtctcttcggattctggactttgggaataaggactatatttgttgcattgacgcctctatgcatacgcccagtgtggaagaaatccaaaattgctgcacagagatcactctcaactgaatcccaatagtgtttgaagaaaagaacagacatcccatcaggacctggggctttggagttactcatggcgaagagagtatccttaatctcctgaggggatggcttccgaatgagctccgcttggtcgtcagaggataagcgatcacggacaagctcggtgcagttaggttctacaccatcctcaggaccagagaaaatgccttgaaaaaactccaaaaattcctttccaatgagctccctactagagacccacatattttctttattgagaatgctctcaatggcattccttctacttttgatggaagcggttaggaagaaaaattttgagcatttgtccccttccttaagccaagagaccctggccctctgcttccagtacacctcttttctgatccgggcctcattaagggagttccgtaaggtcgtttcggactcccactctctagatcccacagacaacctctggacgtgatctagacgacattccagatcacgaattagagtatcaagtttcccaaactgggatctattccaatgcataagcgccactcgagtagctccaatcttcttgaaaaccctggctggggcccaggggtagctaaccgacttccaggctgaatcaaccactaatttgctgcgctcatccctagtccaggcttcctcaaacttaaaacatctcttgattttctcccccagcccatcagagtacagacacagcggacggtggtccgagttagaagtctggatggaacagaggacagccttagggaataacctaacccacgcagcattaataaggcctttgtctagagcagacttaacatggtttgatccagaacgatggttatcccatgtcaacctgtctccctggataggcatattaatcaggcccttagcattaaccaaattggagatgaacggaatgaactggtctctgcctctggatccaacacgttcagaattacttaagacaaaattggtgtcacccaaaataagccacgggccaccaaacctatccccaagcttcatgagattctcccagaagggttttttagcatgaaagtacggggggccgtaaacacaggacaggagccaaggatgagactgggggtccgaaaacactagacccgagatgtggttttgggagcaagctatacattcaaactcaaacccaattttccaagccaaaataataccacccgcagtaccaacaggcggaatattaatatgaaaataaaaatggagagaacgaagagtacgtaccaatgaagtagcatcaactttgatctcggtcagaaaaatgaaatccggagaccgcgaccgaatcagggacttcagctcacgaactgtagaggtctgccctaaccctctacagttccacgcaatacctctcatggctcctgtg

SEQ ID NO: 112620 - DNA, 3389 bp, Cannabis sativa
aaacgacttattagtagattaataaatcatttcggaatgacatatacatctcacatcctagatcaaataaagactttggggttccggtaagcgactgctacatctatttcattaggaattgatgatcttttaagagttcgtttagtataccgtattatattatattgtattagtattatttaatacaatactatgtttagtgtattaatagattacgtaaaattataatatattaattttaataaatttgactccaataccgattacgggccaggtcccagtcttggattcgggttcgatcttgggactaattagtttaggttcgggtcccaatcccaatccaatccattgggtctctaaatctaggtgggagattggaattgactccgaatttttttataaatattataatataagtatagtattaaatagtataatatattattttatctaaagacttatatcatctatcaaacgagccgtaagaaaaacacagcaattttttttttttaaaagctgtattcactacctttcggtaattactttagggacacatgatcttgactccgatcacgttttacaaaatatatcggtagaaaattttatattatatatcctagaaagatattcctacacatatgcatatagagaataaatattaattgtaattggctaattattgatatgcatgatgtataataacaatatatattaatatttctttgctatacatatatatgaagcatattttatatagagtaagatatgcatataatgctagtctcacgttggtcggtaatatttacttataattttcttatttggtttagtttctataattttttttttaacttttagaattaaaaaaatccttttaagtttggataaaaaataatttttcttttaatttaaaaattattttgaaaaaagttaggatttgtaactttttctaaaagaacttttaataaattatttttaaaattaaaataatttactcacaattaaaatatctattttaataatatccaaacattttaaaataataattatctaaacggtaaaaataaatcaaaccttatacttatttttacttctagctataaataaaagtaaaaggttaattaagttaatgagacataagataggtaatcctcttcaataagccaattttattaggttgggttaagtctataatatctttcataacaatatcacaatacaaaaaaaaaaaactcatccatctttatttaattaatttgttttccgaagattaattaatttagactcatcataattatatattagttaattaattaatgtatagtactttggttcgcttcttatacaacattatacggttggtcgataatgaaaaagtaccacaccttaattatatattacatataaatgtagaaggaatattatgagattaagatcgatggtatcattaatatttcagataattaaaagaagactttgaaacgtttcatacacaaacaaatgcatgcactcaaagaaattatggttagtttgtataattaattttcttatatttaccacctaactgaactaatttatctattatataatgattaattaactgtattaatgatgttagatttgagaaatatatatatatatatatccctgccacgtagacaaaaaatattctagaagggacgtacgtacgagaaagccaaattagggcaaaggctggcgataatcaagctatagctaatcataatgattggattgggaaagtgtcaatactgtaacttattttgtaataattacttctttgaaaaacttttaataattaatttcatataagcaatcatgagattttccatcaagaaatgaaaaggaagaaaaagttcacataggaatggaagaaattcatagtatatatgtatagtatggcacaccattataataaagttaagaaagaaaactgaaaaaaggtacgtaggcctaacttggtacgtgtttcacgtggagcttattattataacctaattttgttcccaaaatacactcttgtctctcccaattactacaacaattctgtgaaattatttattcaatatatatatagctccatatatttatatatattattcaattattttctgaacaaatatatatattattcaattatttatttaattagttatatactttgaatatatatacgaacttagagaatgtatagatacgttcatttttctttctctctcttttttttttttgaattctgttacaacttacattgtactttagaatatgttataatgattcttatttttattggggtttttacaagtatatttagaaagttataggacttgtttggtactgtaaatattttattgtaaataataaataacactatatatgtttggataaagtaatgtattgtattaattattacgactaaattttttaatatataatgtattatttaatacataacaaatggtccgtataagcttgtgttatatatttacaaaagattcagggtcaacaccaatattcaacccaaacccgaaaccgaacccaaacccgagacccggacccaaccccagacctggaaccaaactcgaaaccacccagaccgggtcccaaatcggacctaaacctaaacccgagacccggacccggaacccgagacccgaattcagactcagacccggacccggactcaaacccgaactcggaacgggacccagatccggacctgggactcaggacccggactatattttaagtttgaatcaggtatctatatgctgatctcgtggcactatatttttaatatttattttttgagatatttttataattattttgaatttgatgtatgtttatgtaaaattccctttctctcttttttcttttttttggtaagaattaaataactatatttaatataaaatatatatatttatttagagaagatttcagtaattacatttattttagttattattaaatagttgtgattaatttataaattaattaaaaaattaataaattaaatgtaaaatgtttttaatttatttccttataaataaaagaattatcaatactaattactgaaaaatttattaaatattttaattaaaattaatttattttaattaatttgactttaaaaatagcattaaaaattttaaaacctccaacaaacaaagaaaagtgaaagaagcacaaatttataaatacttgtgtaacattattataaatgtaataattgaattaatttagtgttttgtgtaaaatctccaatttttagactaattttgtcccctaaactttgacatgtatcaaatcatgctccctaaatttttaagatcgttaaaaatatcccctgaactattgagattgtt

SEQ ID NO: 112621 - DNA, 1958 bp, Cannabis sativa
tacgattttttgttgcaatttagattgcagcactagttgcaataagagtttcgatgtagaattttgtaaaaatacaagaaaaaaaaaaaacaggtttgaaatataaaaatgaaaaatccccttgatcttaatatggtagataattataccgaacctaagaatattattaatactgaaataaagtaatagtaatccatctctctctctccattatgagcataatatatatgttttctccattttaaatattatataatattcattatatatgagcaacataaaaataaaatattttatgttttgattatttattttagtaataatgcaagcatcgttaattcaaatcatttaaaattaaggatgcaattacagtaggtaaagaaacactactaaaagtacgatcagcctcaataaaagaagatcacatcaaaaaatatgcaatcttattaacagatcgtttaacaaaattacgaaaaaaaacattatcaacctcgacaattaacacttacactctgaaataataaggccaaaaggagaaatcatatatttattttattttgattattgattttctttctttttttcaattttattattttaaaataaaataaatcaaattatactattaatcaggcttaacataaatatatatatatataaaactaaaaaagataattaaaataaaaaataatattttaatatcttttataatttattaaaaggtaagtaactaattgaactttaaatttaacaaaatatcataaactaatttttgattacttattttcattaattactcttaaataattatttcaattttaagttgtaatatattatctattaaaatacatatatgtatattacttcttagttcttttaaataattttttgcattacattataacttagttaagaatatatataatgagtttaagcaacattttttttttactttcaaaatgtttaaacacgtgttatatagcttattaataaaattagtatgtataaaaaaatttattagctaattcattctattttgtttaaggtactattttgttactttttaagttttttagttagaaacatatggatattattttattaaattgaattgttcatattatacaatcttgtaacttttaaatataaattaacaaatttttttagtaatttatgaaatagttgattcatttaatttttagttacttattcattaactaggtgtttctctttttaaagttaatctctatattttttatatattaaaatgatatcctatgtcgcgtataatttttaaatttaaataatgattattagtaggccaaaaaacctttttaaaattattataagagagagagagaaggagagaaaattaatattacaatttacccattttctaagaataatagtttaattataccttcatttatagaaacatattaaataataaaaaaaacaggataaaagattaaggattgacaatgtgtactaatgcctatttgagcaatacaaatcgatattgagagtactatttaaatgttcagggttatttgagtaaataaatagaaattgtaattttcttatatatataaatgtaaccacttttataggaggatatagtattattataaattttgaggctaatgttgtgttttttctatcttcaccgatggacacaaaaatactgcataaattgttcatactgcacctaaatatgcaatttaacttattgtactagtcttacatattgtttcttaaaatgtatacatatatctatattttttcctttgatgtgtaattgatggttttaataattaatgttaccaaaagaattgatatattgtaggcaatatagtaattgatgctgcattaagtttcctgaattatgaagctgatatctctcacttcaacacaactctcattacttgtaacgccctaatgctaaggcacgctacagt

SEQ ID NO: 112622 - DNA, 2923 bp, Cannabis sativa
  modified_base (2855)..(2862): a, c, t, g, unknown or other
gagagcgtctagccacaaaatgggccacccgatttgctgatcgtttaatataacgtaaactaatattaggtgaagaagataataaaactttacaatcgttagtaatcaaactaaacacagaagacatttgttgcttgctaaagattgcttgaacaatgagaaaactatcagtttccacctcgactgtgttccagcctttgccctttaaccagctaagagcctcctttacccttaaagcttcaacgatctcagctgtgtatgacccgtggtaatatttggcaacaaagtcaataactttaccgttcgaatcacgagcaacaacaccgaacccataggcattttccttctcaaataatgcaccatcaactgctctccacatgaagttcttcactttaggtggtatcttaagatgccaaagtttgtaccagaacccagagttattctcaccaggttgtgtgtgtctctgaagttgcatcatggaataggcaaatttaactgagtagtagcctgttctttcaccagtccacgaccaacaatcttcaacagcagctggactaaggggaattccaaggattaaagatgcatcccgaatattaaagatgtccttgaaagagagacatctcagcttctgttatgaatgtcaaagagtgagctaaccgtgtgatcatcgagtcccgttctagtggtggatacgtatgggttgatgggattagggagccaaggttgtttgagaatgctagttgaagttcctgtgccaatagttcttctggccccaaggcaaaccaagtgttgtgcactccatatatacgtcagacaaagctaggattattacccaattcagcattaaggaaatcggttcgagagtagtactttgctttatagacctggctagcaagagaagatgatgaacataaaagtctccaaccttggttagccaacatagcaatgttgaaatcatggagatgacgaaagcccatacccccaaaatacttgggagcagccatacgatcccaagacatccatatgattccttggccattggagctttttattttccaccagaaatttgccataattttctcaagatcttggcaaatgcccaacggaatgaggaacacactcatagcataagttggaagggattggatgacagttttgagcaaaatttctttaccagcacgagaaagaaatttgtcatcccaactatttatccagttaatgatcttgttcttaagaaacccaaggataacagtttttttccttccaataatatttggtaaccccaaatagaaagagccatcagtagcttcaggcattccaagagttgagcaaatttgatctttggccgcaatctcagtattgggactgaaaaaaaaaactgaagacttggtagcattaactcgttgtccagaagtaagctcgaacgaatggagaagcatgttcatactcacagcagcaccatatgcggcttgatagaagagataactatcatcagcaaataacttatgtgcaatagaaggagccccattagccacacgacagccttgtattattctgtcaacttcatattttttgattaaagctgaaaaaacttctacacagatgataaataaataagttgacagcggatcacccagacgaatcccacgagaaggagtaataggacccgtaaataaccactgtgaataacagaatatctaacagaggtgacacactatataatgagattgatccatttgctagcaaatcccattcggtacatgacaactttcaaatagtcccactcaactcaatcataagccttactcatgtcaagtttcaaggccatgaaaccttttttgcctcttcttttctgttttaggtagtgcataatctcaaaagcaaccataatgttatcagaaatgagtctgcttgggataaaggcaccttgggtggaagagatgatatgatcgatcatgcctctcatcccgtttgcaagaacttttgccacaactttataagaaaaattacacaaggcaataggacgcagatcacccatagttgtgaaattattctttttcgagatcagcactagatgagtatcattaattctggggggtagctcctcaatttcaaagaaatcataaacaaactgcacatgaatatcagggccaacaacatcctaatgttgctggtaaaacccgggacccataccatcaagacttggggccttgtcaagatgcatttgaaagagagcttgcttaatctcttcaggtgtaactagctgtagaagaacatcattatgataattagaaacagagcaatttatacctcccaccacagagtcacaattagtgccttcagcattataaagagatgagaagtattcaacaagaacatgatcaagacccgaagaccaatccttccactctccattagcaatttttaattggacaattttgttactgcactttcgagcactggcagtatcatgaaaatatttgctatttttgtcacccgcatggagccaaaattgcttcgatcgttgcttctaataaatttcttgttgagctaagatctcaaagtaattacactgttcagcagagaaatcttgagtagaggaagacaaactagccgattttaaatgagtcattctcttcttgcttttattcaaacgttgcttttcataacttgttacgaaatttataaaacaatacgcaagtgcacgtaatcaagtagtaaactcacacgagtgaggtcgaaccacaaggaattgaactgaataccattaaattagatttatgattctatttggcaaaccaatagttttcgagattttaaacataatagaaattcaagaaacttaaagaaacaannnnnnnntaatcaagatgagaagatagggaagagaatcctgttgttttgtttacccaattgttaatgc

SEQ ID NO: 112623 - DNA, 4956 bp, Cannabis sativa
aatgagatacgaagagattaattaagatacctaattgttccataaaagaaatattacagtaaacagagaatcattcatctctgaatatgagttattacaataacaccataataaataaacattatttcaccagttccactcttttttcatgtatatatttgttaaaagagtgaaaactagtttattggattggatacacaatatattagtgattgaatatatatatataacatgatatatgtaacaccatttgagtattacacaatcaaatttatgagtcacaattaatatataattaattgaataagatagtgtgtagtgtttttggttcactcgaaaatgcggttgtgacaagtgggattgcaagggtaaggacaatcaatcttcttgaatggacttcgatcaaaataccagtctccaactgccttggctattgtctgttttatcaaaatcaaatcatttacattaacatatttaattgatagaatcaagtaagatgatgagttaagttccttacagtcttttcaagaagaggagagtctgctctcatccatgtttcttgcatttcggtttggcaatgagcatagcatgaatctatgaacattcctttcgaaacagagtccacacgaccattgattgcacttaagaactgtactctaaaatctaaaacaacagggtagaattagtattgaattgagtattgtattaatgtgtttagttagtagttagttaccttgcatggttttgagttgaagtgatgaacacttttttatatcgagtttacagtcgtgccatgttccatgaggatcagcaacaccaggtgccaaaatgttctttatctgaacaccaaaatccatgaatcatatattctattctattctaattctattcatatatatgatgaagagttatatattataacttacctgccatgaatcataggctgcatttacaaaaaatatgggtgtttggatttgtgctaccacattttgtgggaagaagcactgcaaaaccaaaccatacatttaaacacaaaattaatgttgaaaacaaacaaagagatagacaattaagtagttaccaggcctgggttcaatcttgaagtgcatgattggggcaaattcttggcagattgatgtgttgcaaccacttgactatagaaggtttcaatgtgttgtgttccagccaaatccttgctgttagtttgatagtcattattcaatgattagtagtgaagtgagtaattgaattttagattagtagtaatagtaattaattacgtacgcattgatgaaataaccagcatcggaaagacatttgactttggtggtgggagggaggagagctctgaacttatcacagtgaagaatagagctcaatccaccagcagagcaacctgacaggattgcattttgagcatttttcattcctttggctaatagatcctccatgatggcaagccacaccctttgacctctaaagtgaagattagtagcctgatcaacatgattaactaagctagtaagtattgagtcaaattaccatgattaactcaagtgttaacactacttaactggattaactgcttcaacatcgccagtaaatgatgacccatcacagtacctcaccttgatcttattccaattgtagaaatctgccaattcaattcaattaaaacagagttagaccttaaatctaataaagactaattaagatttttgtcccgaactttgacatgaaccaaatcatgttctttgaactattgagatgttggatttaaggacttttgtcccattttaataaaaaaagtctaacatgaaattttaggggaacatgatttggtagatgttaaaatttgaggggcataaaaattataattagccaataatttgaggataagataagataagaataaggtgtgatgtgatgcctggattaaatttttgtttgttgctgagaatgccagagaatgaaagagtcttgaccatctgcttagatgagcccaaacgagtgttcttacggtcaagacaagtagttacattgttacaccaacctcctccctaataataaaatcagtaacattcattcaatttgttaatttgttaccttttttaataaaataataaagagtaaataaatgaatacctccattgtgatataccagttgttgatgccagcaccaaatcctggagcatggtgataagctggggggcttccatccaagcaaactgccacaccattattcaatctcatttcatttcatttcttttctttttttgatttgatagaatacataaaaatattgttagcatatagtataaatatataccagctcctttggctactgcattctgtaccagagtaatttctactggaaaggcatctgttgttgttggtttgaatattgatgatattaatatgagtaccactaagcctaataaccttattgctttcaccatctctttctcttaattattactctgtctccctctgcatacataaaacaaaattacagatctacttatacggcaatatgagtttggttagattgatagaagagaagcatattacaaatgaaaaagtactaacattgcttaattagttaataataaacttaaaaaggcaggacagacaccacaccaaaattaatattgtattttatgtacctgagattgagaaagagagaatctgaataagaaaaaggtagtagaagtttagtgcattaagaaacttgaaaaggaagagttgagtttgaaagaaagaaagaaagaaaaagaagaaacaagtggttttatattcacaagactttggtttcagtacagttataggtattagttaaaaagaaagaaagagagaggagagagcagccgacacatattgatgagatgatagatagtaagttaataaggaatacagctgcattgcaatgcaaaagagcaatgttccaagaatcttaattaatgtcttatcttaccaacatacatacattttcattcatttatttattaacaattaatataccctacacttattggcccatttgccattgtccccaatacatccatccacacatattcaaccaataaaaatatatagagaaatgctaaaaggtactagtggtgcctagcactctcttatgtgtcaatatcgctattggtctaattaagtatcgggtcccatacaatttaatatagggagtatcgctagccaatcgcaacacgacatgtctagaaggtgttaggggtgcctaatagcaatactattttataatactattttacaaccccaatcctatgttctatcactttttcttccaatagcaacacgacatgtctagaaggtgttaggagtgtctaatagcaatactattttataatactattttacaacctcaatcctatgttctaaattatttactattatttctatcactttttcataattttttcttcctttcacaaattatataatgttatattttaatcaccgacttcccttagtcaataacattcgtatgcctcctataatcaaattaatataaaaattgaatagagttggaataatattattgtcaagatatggactgtttttttttctttcttaagaagttttgtagctctacccaaaatgtatatgacaatctatcaaatacatcatccttataagataaaacaactcagatcaacccttatgcaccaaaaggaatcattcactttataattgctcagaaaaaaaattgatttaggaaaagtgtttttgctgtaaaagaataaaggaaaaaagtgttgttgggaatgttctaaggcataccatggcattcactttataattaattaaaatattcaaataaataaaatagaagtcgctatatagatagagggatccactttataattaattgaaaaggaatgaatgaataaggtgcggttctaatattgttatctgaatttattaattattgaatagaaatctcttaattgagtttgaataaaatcacataagctccttttagtacattgtattgtttgtataatattatatattaaattgtattattgatcacatttttatatagtataacactaggtttgtattaatctataagataattaattacctaaagtattattttttgtaaattttttatattttcatgtttaaagattttttttttatatttttacgacattctataaaaacaacaaaaaaaaaaattatataaatataacaaaataacatataaaccaaaaaaaaaattataatgcaatacattattataatgttatttgactatattatacttttttttatcatagaaagcaatgatgaaatggtgggctgtcacttattcattaatgaaatctaatgtatagatctagtagtagtaccaaactataaatgtatattgcattatttaaagaaaaacaagacaattgataatgacaccgaaaattatccacataaaaaaagttaaagcaagtgcatgttaaagtctacgtaacacaattcatatattttggtatttcttagtagaactcaaattatctttagaaaaatttgaccaatcaaacttcttcaacgaacataatcatatacggttgaaaatagtagctgtaaaaaataagaaaaaaatttatcgaattaaaatttaggttgagtcgcgaactaggttattttctttaagatgttcacaatactgttcagaattgtacaaatagattatcagtctcgccatttccaggataaaacaatccagtctaaaacactgtataggagttctattgtataataaagaaccggtgaaataccacatccaataatcgtactattgctcgaaatacataattgtatatattgtatatgattttgttgggaatgcaaccaaagtcccacattagctaggaatggaaagaattatgggtatataaggatggacactactccattagtatgagg

SEQ ID NO: 112624 - DNA, 1542 bp, Cannabis sativa
taggcattctgtttgatgtgatcagactaactaactaactagctgatgtgatcttaaggaactaatttgaaaattgaatgctaatgagtacaacagaagatagtggatctttttgagcattaatctcaaattgggtctctagcagatcttttggggagctgttgagctattgggtttcttctgatacatgttaaaaatccataggttctgactcaaaaaatgaattgataatgagtggagtaacttgtggcattataagtttgttgatattttttagtaactaaactgtccagttgatattcttataatgtatacatagctagatcacggcctctttctctttttcgaaaagaaaaaaatgtatacatacatagctatgtacatatctgtattggattgaaggtgttgagtttgtttcattcttgattgttgttcaagtaagctagatcattgtgggctggccaaattgattgctgcacatgctaagccacccaactacatgtttttctttgagttttatgagtccccgaatcttgcggataagttgcacgtcgaggaatggactccaagtatcgatcaagtcctcatgatcgctattcgcttaggtattatgcccttaattttgcatatttccttgtttttagacattccttgtatatttatttcacatttaaacaaactggaatgataacaaaatagaaactatgataacttgatgtagttgaaaatggaggaaaaatcttgatatgtcatgtctaatttctttatatttattttaatattgatatattttctgctgaaggcttagttgtatgattttttttagacagtcttacatttccaacttcttcatttcttccagccaagtccttgcaatatctacacaacctcgggattttacatagggatgtgaaaccagcaaacattcttgtaaatgtctaccataagtttcaaatatttcattcgagttgtttttcggttttcatcttatgtatcacacttgtaactgaaagcaacgtttgtgcttattatgtagttggataaagatcttactccacacctagccgattttggtttagcagagcacaagagtgttttgaaaaaagtttctgttgagaattggagatcatccggaaagcccactggcggttttcacaagaagaatatggtgggaacattaatttacatggctcctgaaatattaaagaaggaagtacagactgaagaatcggacgtctacagtttcggtataacaatcaagtaagaactgatttattacagtttgctttttctagcagaataccacactctttttttccaaacaatttttatttctgtatgaatgtagctttccaaatgtttctgctgtttgttaatgtgaattataaaacattttgacggtgcatattaggctttgttaatgtgaatttgtgctgatgtgcatgaaattttgaatttggacaccatttttgctgtatgatatggcaagctttattagtgtttatttatcatagaattgggaatatagagaaaaagcattag

SEQ ID NO: 112625 - DNA, 5315 bp, Cannabis sativa
gtttattttcatcgttttagaaatttatattaagatgttaaaaacatacttgttagtaaatctaaatcctggtaaaatatattccaacagtggcatcattcccaattctccaatggagtccaactttgagaagagattttccccaatgtagacttttccagacatacgagggggagtgtccaagcggagcttcaagaaaagaagacctggggaagtatttggatttaaaaagagtggctagaagagaggtttggtttgcttggattctccaagcttgtttggcaagcatggcctgtttgtaaggttttagggatctaaatcctagtcccgcatgagacttggagttgcaaagggcccgccaatttttccagtgaattttttgttcacaattattcgatctccacaaaaatttggccattttttatcaacaaagttgcaaaaagaagttggaagtttgaagatagacatggcatagatagggatagcctgaatgacaactttaagtagaatttccttgcctcttttgtagagaaattttccttgccatttggaaagataagaccgaattatatccttgatgggattgaaagagtggtcattggatctgccaatacactaaggtaatccaagatacatgtcaagatgattaggggagggaattttcatataatcctagatgagagtttggtaggtaaggctggtattggaggagaaaaagatggaagatttcttgaaattcaccaactggcctgagatacttccatacttggccagagcctctttgatagcattgtaatcctagatgttagaccgacaaaataaaatgttatcatcagcaaaaagaagatgtgaaatttctagggtagttcgagcaatctttaaaccaaaagttgtttttgtgcttttagattgcttaagaatagaagatagacctccagaacaaaggagaaaaaggtatggtgaggggggattcccttggcagagccctctagaaggaatggcattcctaagggcatgaccattgatgttgaacttaaagtaagaagttgacaggcatgtcatgattaaagagacaaacttataagggaaaccaaatttcaacataatcttattaagaaaattccatttaactctgtcaaaagccttggccatgtccaacttgactgtcatccatcaattcttgcctttttttctacatttgatggagtggagaatttcttgagccatgagaatattgttatagatgagtctgcctttgaggaaggcactttggttggggtaaatgagagggtttaagattgacttgatcctattagccaagacttttgaaattattttatagacagtagtaaaaaggctgataaggcgatagtctttgagggtggagggatttttaactttggggataaggtaatgagagtggaattgaagtgagttatatcaaattggttatttagaaagttgagagctgcctcagttacagcctgccccacaacatgccaattttttttaataaaattgattgttgaaaccattaattcctagggacttgtcaggggccattcgaaataaggctttcttaacttctagaagagaaaaagcctcctccaggatctggcagatattagaattgagatggggaaaaactccagttaaggcatcattaatagctccatcatcaagagtgagagagttaatatgattggcgctttttctattagaagcaaatttgtggaaaaatcgagttttcttgtctcctggatggagccaatgaattcaagatctttgcttccaataggtttcctccttgtagaggagattgtctaaattttcctgcaaacctctcttaagatgaagggctgcaggagagtcatcctaagagtttctggcctgttcgacctctttctgagctttctttattttcagttgaaaacataagaaagttttgtgcttccactttgaaaggtaatcagcacaggcactttgggtaaagataaggctctggattggtgaagcagggaggggtctgacatccatgcttttgagatcacatcatcccaatttagttcagtgagccaaacattttcaaacaagaatcttctgttcttaagggcatgattagtaggatggtgttggggcttaagaagcaactggatggccctatgatctgaaccagagaaatcaagatggtttaaactactgctagtgtgattaagatgccaatatgtgttccctatagcccaatataacctttctttgatgtttctaatcctaggatgattgttatcccagatcattcaaggtccaaaggggtctaagacttctaactaaaaattctcaataaattgtcgaaaatggttagagggtctatttctactgtttccattatttttatcgttccaagttaagaaatcattaaaatcccccataattaatcagggtaacaaagtgaacaaatggccaagcctggtaagaattttctaggtattgagatgattaataatattggaggcaccataaatagcagtaaaattaaaaccaaaataatcagcacacgagatataatcgtgaatatgattaatagaaaaactagtaaaaagtacattcaagtctgagttccaaaaaagcaaaagtctcccacctaatcctactctagggacttcaaaaccaaaatcaagacccaacttagtcctaacacgattacacgaaaccttacaaagtttggactccaaaacaaaaagaagagacgacttatacattttaaccagaagggagagatttaggaatgtttgatcacttccaagatctcgagcattccaactgatgagattcatgagtcttggcaggcctgtgtgtccacagtgcctgcctcatcactggaggccacttccaccacgtcatgacatggttgaggcctatgtctctttagcatttctctctgctcatttccaacagtagtcaaatgtctcttgaaacctgatgagctagcaagttgattctttcttgttagggcacaacggggcgggccatcattactgcgaacagcaaaagtgaagggattggggagtcttgcagtgtggagggatagctggttctcggcgatgtggttagaagacgagatcatcaagggagcatttagctggctaggggatggggaagttgagcttcgcgagccaggggtagaggattgttggggggaaacagaacatgaaatggaacctccagtagcaactgacatgagggcagtaaaagtgggaccaaggggacttgaacatgtgggtttaaggggtagtaggcaacgtagcaataaggaaaatttttgggctagtgttaaggtttggggctgtgtgtgatgacagaaataggcaagcagtattagtgtaatctcctatagtatgttgaaaagagacgtcctgttgtaggacttggccacgggggtgggtaacgttgaccagattgatgacattgggattcggcattggtttatctgagatggagatggtaaagtagacagatttcagggctggttcgggatcaataggggtccaaaagggccatgatttgggcgtgtagctcctcttaaaacattctcataggggagtggtggtggaagggttgactcatcagaggctctcatatactcggtgcaaccagtataggagtgtctaaggcggccacgatggtaacagtggttaggaagatcttcatatttcaactccaaccaagtaggtgaagccataccggggaaaaggatagggatccctcgagggaggggtttggtgacatcaaacataattcagactctaaggtaagacccccaagtctccaacagggaaggctaatgaacttctaaaagagtgcttgtaatttggcccaccagtctggcaagggagacaaaccttcgagaaaagggtatgttatggatttggacccagaaatgggatttttctcatagattcagggataaggacattatcgtggttagggatttttagtaagacaggacatttatcaaatatccaaggctggttgagaatggctgtgggtttgtatacgtcgtaatggaaagcagccaaataaaggttcaaatttggtgctctttccttgacactaattgggaaacgtcccttccagtatttttttaggaaattcttcagagcactatggttaaaaaattttgtggtctaaagagtaaccatgagatgaaataggggtggggctggtggaagtccctcatttgggtcagcatgatcggtgagagaatggacagtattttcaattttacttaggtggagggctgtagaaaaagagcgagctaagttttccattttaagcaaaacataatctaacatggaggcagtacgttgaaaaaaacacatgatgaacaaaattatttacagtttagtacttaaatagaaaaaactataaacaacagtaaagaaaggagaagtaatggttctcacttctcgaagtacactcgagcaccaaatatggaaagaaaggatataattaataaccagattaggcgggggattacccaaatcaaactcgtgactaggctggtagacaccacaattaaacttcaaaaccctatttaaatctgaaaagacattcgtaattaaatacagatagggttcatcattagagatgttctgaaacgagatcaaacttgcaaagatctcattaatgttgctccatgcttgcttcaatctcctatataagcaagacgtggagtggagacggttgaatgtcattcgacataaatgctaaaccaccacaatacaaagatgggtgaagaaaagacctagagaaacaaaaaagtagataatcatgatgatgcctgaagtttgagtaggtaggcgaagagatccttgatgaaagtatgcttgttgaagatgaagggtattctcgagagtgtgatcttaaagagaaaaataaaagttattgatagttgtatcttaaatgcatctagtttggttctcgtttcatatattccctatgagaaatgctaaagggcacgagtggtgcttagcatcctcctatccgtcaatatcgttattggtccaattaagtatcgggtcccatataatttagggtaaatggcggcaaaacccctaatactttcgttttggtttcattaaacccccacaacccaaatttctgcgggtaaacccccaatactcgggttctgttaccaatttaacacttccgtctaaatttatctgttaattgctaggttggattgtccacgtggacacaatatacacgtggcacaatttaattggtccacctaaaaaattatttaaaaaaattaa

SEQ ID NO: 112626 - DNA, 1445 bp, Cannabis sativa
gttgaagacgacccattcttgataagtgaggaggtcttttgggtttcttcgcatccaaataagcttgacccatttgagtttcaagttctctttcgagaagtcttgaccccttgaggaataatggggggacttgtgaagaggataaaggaataatcgaagtagaattgttgcaggtgtaattaaaggaaggttgacagaagtctaatgatttggggaagctaaacaagatgaaagagcaccaacattggaagttgccaaggaagaaagaccagaagagctagtctgaggtaaagacaaaatagataactgtttcaagtgagctaaaatgttaaaggccaagatttctaattcaatgttcgaacaaaggatgggcaaacaaaaggttacttcttttgttaaaatggtatcaatgtggtaagacactttcttaatatgttggataattctcatgtaaagaatatgtttgtgattttatattaggattccaacaggccaatgaattgcctgtaccaactaattcttcacaataaacttcttattacaaacaactttagggagccaattttcacctactacaaatacaaaagcatcccactcttctttagaagatggttgaccgttaatcgtgtaattgggcccttgatagagatatacaaggtgacgaatcgagccaagcttgttgttttgcaaaagcatgcaaagaactctgatgttaaaaaatttgttcctttgagagcgctcaaggcagctaaacctggaaccgtttcaacaaaattggaaagtagttgaattatagaagctccagtaaaagaaatgacatataccagtaacagaggaatcaggaaacgcaatagttctatgtactttttactgaccaaaatattacccttgtccacttcaaggtttttcaaacctttggacaatttgaattttttcaacatctggaaagaaacaccatcagcaataagatattatgctcgaatcttatcaaaagttgcttcgtattctgtcatgttgttagggtcaatcacaggggaagacttctaggcaattcatcaaaatttacccttagtaactttagaagccataatcgcaagaatatttagaaagaagaagaatagaatagcaggggagacaaaatcaaagggaaaacttggagaaggaaggcaaggtcaaaagtaaagcagcagggaagttcaaactgatgtgatttacctgattaaaaattgtcaatttaaatttaaagaaaaaaaataaactaaaatatttgggtaagttgaaaaagcaacattagtttcccaatgtttaaaatgattactaaactgaatgtttgcgacattaaaagacatgtggaaaagattttttgggttctggttagaggtgttcactaagtatctgatccaattcaatctgtacgattcaatccaatctaatctataaagtgc

SEQ ID NO: 112627 - DNA, 2779 bp, Cannabis sativa
ttgattttaattaattaattataaatctaaaattagactatgtctagccacttagtgtataatttaccattattttatcattttttattttatataatttaattataaccttaagtgaaatagtataagaagaataggatggtctcattatccaattaatcaagtcgtttggaataaacgaagctccactgttaatgatgttattgcttcagcttcttttacttttgatcattggagaaaggctcaggataaaactacccttttatcactgtcgtttgaaaatagtggtgacaagtctgagtcttagattaaccagatatgaatcacatcaagattaatgttgatgatgtatttttattaggagagtttgtatggcttggtttaatagcaagagacaaatcaagtacgcttattgaagctaagactagttatcatgttggtgtttactatgctgaggttgtggaagttttggggatcgaagaagctcttagttagattaagagtaagaactggcataatatagagcttaaaactgatagtttgctttctgtccaagccattcaaagtaatcaaacaatgtcttttacttttggtttgattattcaggattgtcaatctttattatcttctctacattatgtgaatttatattttattagatgatcaacaaatcgagtagctctcgttgttgttaaatactttcgattttctctgatcgtagtatattttaccaaaatgtttagactaatttaaaggatgttttgtattcaaaatactaatatttcaataaaattaatatttcataaaatgataataataataataaaccgtgataataaaaattagctaaaattattttaaaattctcaacttagaccatttctcacaataaatttgtattatttttttgcatgcccggcctatttatagtcggtccctacaattattatatttttaataatttgcaggttgtaggtgctttttgcatgtgaatttataaggatgacacagtcaaaaaatttaacatgtctaacgttataatactatacatttaagttcatttatgtcttttaagaaagagggggtacaatctataaaaagttaaaacatttgatctttgaaatttagggtaaatagtaataataccctaaaaattatatactacatagtgattaatttttgctgatatttacttgaaaaataagcatcctaaattcctaataaattatttgttgtgtgataattattaattattaaaaaatataatgcaacaagcttaggctaatgatcataacttgatggctttattatggcattacacattggtgacatttgatggcactcataattaagattatcacaaagataattaaatccacaattatacttaatgaatcaaagtaaaattaaaggagacaaaaaagaatgctaatcacaatgatgcatacatgacaacactttagcggtagtggtaacgtgatggtgaggatatatgataatgatcgtccatggtggtgcggccggcttagtattatcctcaaaggccaatcattttattacaccaccatgtcatattatttttatattctttcatatttaaataataaaatggtgtagaattaaggtcagagctcacaaaagttaaaatttgtcagaaataacacgtgacaattatctcgactaaatataaaatattttactggcgcaaatatacataaaaaaaagtgaccaaagttgaaacgagctcacgccaaatggcggttaaaattcttaattttgttaccgcaattcacaaagtgtgttggtataggctacttttgcaggcgcaatagtgtgccgataaaagtttaatttgaatgctttagcccttccttgggcctctttatgcatgcagcttttttcggcgcttttagccaaatgcactggcaaaagtcgcatttcatgtagtgcaagttgacttcgaaaactctaaaatgggtgcttggatctcggcgggctgtttccaactcaccatctttcagtattctggaccatgtagacatgaagcatccaagtccagggcccaggaactgaaaatacatgaaactatacctcgaaaatcaacccaggtgccaagtgtttcacctagcgcccaggctgacaacccaactagggtttcagcttccgagatcgttttagtgcaaataagtcaaactttgcactggaacatgaactagacataccatgaatatatttggggcatcattatcatattaagagaaattttatttttgagcacctgaagcgcccaggttgacaatttatcaacctaggtcacttccaagcctcaaaccaaaaattttgcttgtttatcttcttcgtcttcatcgaaaatggggaagaaataaaccaatctggggccaaaacaagggaccaatgcccaggttgatattttgtcaacctggcacaattttgatgagtttttctgaaaattcttctgggcatattctacgaattgatcaaagatttagagtcaaacatttcaaggagtaaatggaattgtcctagggcctgaaactagatccagcgcccaggttgacacttggcactgagcccaacgcctaggttaacatgtgctgtttccaatcagtatttcgagaaagtgttccagccccttttcttccatcatcggaaattagaaagatacaagtaaactcaaggagaaaacaataattacaagggcttcaaaactgagcctaacgccaaggttgaccttgttaggttttatgccttgaaaagc

SEQ ID NO: 112628 - DNA, 5576 bp, Cannabis sativa
agtacttgaagttgttatcttcttctgtttgcatgtgtacaattgttcctggattagttttctgcagcatgtgcaaaaaacttggcagcaagttgtatgattcttttacttttttgcataattcttcttgcgcatgctctttacttctccatgctttcatgtagttcatttttacgccatacttgtgtttcatttctcctctgatgtcttgtggtgtttgagttgtttttatgttggtaaaccttggcctgatgtagtttctaatcaactttattgtagtctgtcttttgcttacaaatcttatgtttagatcacaagtgtgtatcacctttctgtcatatttacggattatgaaagacttggttggtccgtttctagatgctgttagtgcccacttgcattttggatccaagcaaaaattttgtatgttcttgcgcaagactttttgaccttgtattggaagttgtttttaattgcatagaaactaagaaaactttatagtgtttctttgtccttgtatatttgtgcttcttctatttcaggatgttgtggatctgtgattagtagttcgtcataatctgtgatttctgcctgtctgtctgggttgttttctagttgcttaactatttcgtctaccacaagttttgcatagtccatgaagttgaacattatttcaccatcttcgagtattatgccttgcattgtctgttgctgagttgttgattcttctattggtggtgcattgtcttccattgttactattgcatttgtttgtgcaactaatgagttactcatttccaagaattatggattgttggttgttattgtattgctgaccacattcacacattatggatatgttgtgaagtcaggttccttcagttttagttgtatgttacaagtataggctttgatcgtcctttatcctcaacggttggtatccttctttcacttggtatttcagttgcaagtcaatattttcttggttgcattccatgacttctttcagcttgtgtatcagtttatcatatttacaatcaattgagatgtatttcccagtagcttcataatttgcatattcattcgatcatcaaattatccattacaaaagactaggaatagaatttcgtctttttcctgagattatgaaagtgttattattgtaagtcaacttgtttgaaactataataaatttgtaatgcttctattatatatgattccaaccaattttcataaaaattcaaaaaacaaaaattaatataatctacatgaagtagaaaaaaaaaacttctattaactttcttatgttcaagtcatgtattgctaattctgaaccttgtatttattatacattttttttttgtatctcaattgttatgcaactacaataaaactaaaatgtaactaaatatcaactagttgaatgaattcatataactaaccatgttgtagaagtttttttgaagtgatttctctttactttgtcaaataaaatacctacaaatttgataaacaccattatcaaatgataatgcaaccataacgcaacctaaaaaaccaaaagtatacttctatctctgtggctatagatgcattcaaatttttcttttcttaacttgattataaattaatatgttcactattggaaatctgaaaatcaatatcaatgcaactagataaacattagatctattattgatgcatttttttttatttggattatacttgagttggattgatggggagctccatatctgtttgttagagatctacattatatgaatctaaaatttgtattaaggggtttggttttgttcaaataaaaccaaaattcagtgttgaatttcaatttcaaactagtttttgtgctctttttttcatcaatacaaatcaacctttggtttgatcgattcctatcttcttttctagtgaattcgctgaaattaatggtagtattcctcctgcttgggtttccttttggttgtcttgctgggttgaacgattgaagcttttgttggtgattattctgttttgtgcggttgaagctttggaagaggtggtattttttctttgttggttgcctcaaggtcattttctagctctgcagtagatggagtgttagcaatcagttgagttaattccttaaatttgttcttttgctcaagaaaatcctagttaacttgcctaaaagcctcttcttttgcaactaggtcctcctgaaccttctcaagctcaaccttttttttttgtaacagactgtttggatagaaccttggtttgagaataaacatagctgacctataggttcagctagcaaaatgaagcaaactcaagttagtaacagtgtaagaatgaagtatgaagtgtccaaacaaaaagatatgaagagtaaaaaataatagctttgtaaactctatgaaaagacctgtcatcatgaagtcggtcagaagaatatcaaatcccctcagcacctccccagtttctgctcggtgcctttccaattaacagttgcacacctctttgacatgtttcaactttacgggcaccttggtcactaatttatccttaggtttctgggtagaagtagcaggaatttggggcagattttttgagctcttttaagccaaagatttggtagtagctgagtcacgcccataatcgatgacaacatttcccaaatctatcaaagtgggaactgagatctgggaagaagccatggactctctccttgaaattttacttgggctctctttgcccattgtaccgcccaactttctcttgtagaaagaagttaatttactggtcatctctgcacggataagaaagagaagaaaaataattggttagaatgttggtcaaggctataaaaatacacacaattaattaatattctaccctaatcttctagaggcgcaccctcctggacaagaatagaaggggcgtcatcatcaaaagattcatcttcaatttcttcaacaattgcctttccctttccttcaacactctgtgggaacctacaagcagtttcttccttgagatccctgagatggataggtttttccctagacagagtcttctccctattggcttttttcgttttcttcttgggataagacatcttggcaggtgctgattttgctggcttcttgggaaacagactacctagcctcggatagagcctgtatttgaggaaagttttggttcccagcaaaacaatatgtcagtcacacacggacaactttaagatggcttgggctctatctcttaggccaagtgtaaatgcaggtcaagtgtatgttttggaatgttggaatgccgaaaacttactctccatcttggtgactatgtaatagtcatggagaaatctaccaattttattgatgcacttattgttcctgtcgatcagccatgaacacttgagttgcaaaaattaaaagtatcatgaacgctcatggtaaggagaagaattcattgtggccaagtatttaattctcttcattgtgaaaggcgttgatgaaattttgtagtagtctgccaacttcacaaagtatgggtgaagtggcaagatggcgccatgttcatcatgcgagtcagaccacgcacacataccctctcccgggtcattagccaactatccatcaaagggaagaaaaacttgcacatctctaagaaggccctttttatccaaattcttaaggcgtctcactgtcagttcagatggaaaagagacccacattgggccaatcgcttcttggtgcatagatgatttagcctcatcgaactcttcatcaatatattgaatgcccaggactaaagaacgtccccgagcatcaattggttgtgtgtccttcgaatagtcaccaacaccttcgaaaggcatgagggtgtatctatcatatctacccgtagcctcgacttattggacctctaggtcccctacgagcatctcatcttctccctcggagcttacttcaccctgttcatgtcgcatagccatcaagcgaacaaactccgagtcgtctgggcccaatctttcagacaatttattttgtttgagccacatttcttgagcgaaaggaatggcttgaagaagggtgatctgtaatagtaacggtgatttccacattgctctaggccatagtgaaggctccaggtctacttctggtaaagtatttggaacccttgtttgaacaatgtacgtccaattagagggtaggtattgcctccaacctctgttatactcccagatgaatctctcgtgcacactaccttcgatctttcacggtaataaatgattctggatgggtggtgtagtaggctaagattcatcacttgatacttcccactcttcaaaactagaggaagaatctctagtagaagatgaagactctgcgtagacccttggctggtcctcaaaaagtagatggagtagttcgtcgtcaataaggttattaccttcccaaaagtcgtcaagattcatctacacagaaggaaggggaggtaagtactagtcagaagtgaagaggcgttcaaatagaaacaatctactgtctaggttgacaatttgtcaatctaggcaccttctaagtgtccaatcagagatccaacttttgcatcgtattggtcttcatcaaaaacaaagcaatacgcccttctagaagaaaaacaacaattcctgagcacaaataaagggccccagcacccagattgacatttggggctggccctgcacctaagtggacattttgtcaacctacccatttaaaatggagttttttaggagttctttcgagaaccttctatatcttcagaaaatattgagattcaactatttttgggcaccacacagaatttccaaagggcgaaaagagtaaccctgcacccaggttgacacttggggctgggcccagtgcctaggttgacattttgtcaacttgggctgtttccaattgagttcaacaaaaaagtgtttcaggcatttttttcgtcatctaaaataacaaagattcaagtaaacttcgggagtaaaccacaatcctgagtccctagaagaaaggcctagcgcctaggttgacaatgaacctgggatgcttccttcaattactcaaatgccaaatcaggtgtgaccattgaatctagaatgagcaaaaatggggtaggagacctcgtcctcaagtttagaagccttagaagtatcaaaaataaaatcccataagcttgggagaaagggcccagcgcctaggttaacaaatggcctagtgcgcttggttttcttatcagaatctaaaaccgtttcgaccgtccgtctagtttttcacaattataatcatctatgaagtcaaaggattcaaattaacaactttgcatttctcatttctagcacacccagaaatgaagagtttcgagcctctcattttaggaaaatagaaacatctttgagaatcggtgaccagctttgctggaacatataaatggactaagtggtgtcaaactatcacttaggtatcttaaaggacatccattggacgtttttacatgtacccaacattcaggttgacgtcaaatgtcaacttggg

SEQ ID NO: 112629 - DNA, 1145 bp, Cannabis sativa
ttagggtgttaatcaacatacttatgagtagatctaagatcctggcaaaataatttccaacactcttccccctcttcccttctcttctcacctcttcccttcttttctctttttttctatccttggcaccatgcactctcccaaggagagtggttagcggcaaccactcttctaccctctgcccatctctttttttatttttcccatttccctcctttgtgtcaaggaggtcttagtgccaaagaggcttcccattctttgattttatcattaaataagataacaaaatgctagtctcctaccatgaaggggacaaacctaaaatctagcagtagtgaagcggggggaccaaaaggccaaaccaatgtccttcagagtgtgtgtgtaccctcctgacatctgcacccaaaaagtagtggcgaaaaagccgtgcacaagggaatcaaccgctgggatcaccaagtaccccgacaaccacaactctgcaaccacgactatgacatctaagagttagcaggtgtaccatgtattgattgtcactgaggaccacgagaatcaatttgtaacataagaccagtagagccctactataaataaccttctccatttgagaggggtgggaaattttggatgtaacagtaaccaaggaaatagaattaccatttttattcttgagtattccattaaagctactgaagttatattattttcctttaatttagattattactttgattttccaacttaatcatcgttgacgagtcctgaccataaacagtcacaaatatttttctattgttcaacccatagttcgttttcaagaaaaactatttgttatataaatatatatatttaaattaatatagcctaagtgggagaatgttaaacttttatttgagattataataacttttattattttttattaaaacttgggttgttggatagttttttttttgtgttacctcatattattagtgatctataattaataggtttagcatttgtgtgtaagtccaattgaagtaaaagtgtgtacttttctagtttactgaagcctttgatgagcaggctcaccccaactaaagttatgaagctaagttcttcctactctataaatacatattgtctcatcacaattgtat

SEQ ID NO: 112630 - DNA, 4067 bp, Cannabis sativa
cataccccatcaatcagaatctcaaaaacacagtacaaaaggggaatttacaactggaggggccaaaaggaactcttttgcattacgtacattgaaatgagcatttactacagttatgtgcaaaggctgtggaacaaaatcactacccacttgatacaagaaacggtggacatagaaaaccaaaaatggtgggattcaaaattgttaaactcaactcaacggctaggatttgtcaagtattggcaccaaaattaactaactccccatttgaaatctcataagatgtattagtattgagtttagattttatgatctaaatcactgagctacagatgtgtcggtcaactggggatttggggttgcaagctcctccggaggaatgcagacatcttttcgctagtggcgcgccctcgttctagacagtgaaagtagtctcccactttgaacaaattaagcaataagaaattagaacctttagttatacaaataagtaagattctctgaagaagcattcaatgagtacaaatgaaacgatgtttaacacaagacattgactaaacagcttgttcctctatagtccatgagataaatttaaagcatcacaagtaattagagtgaagaggtcaagaatagaagataaggtggtgatggcaaacagttgtggaaatgtacagaatgtttaatatgaatataggtaatatatgagacacaaatgatgcataacaacagctacctgccattgcaccctgtgtaacagatgtgatgatcccatgttctagaggttcatccttcacttctgctgatccttctggacggactgagagagctgagtttgggaagacaagatatgcaaaagccttcattttctgtcattatgaaacagaaacagaaacacgttaacgatcaagctttcgtgcatgaaatgcatcaatgattatgatcagaacccaaacctgatataaactagactaaaagaaggaatgccaaaagggaatgcaatgaatcttaaggaaaaaaaaagcccatatagtctagctaaaaataaaaacaccacttcctactgagaaatatttaatttaattataaagttacaaagatataataaggagctatctcacataataaaggttttaaatattttaatcctcttctttccaacccaatcaaattttacaatttatgtccctgactgaatcaagattctgggtactagacttaatgtaatcaattaaaatatttgagaataaaaatgcaaaaaagttatttaaactaattgatttattggtaattttaacataaaaattcataataacctgctcttctagcttggtagggtcaagtattacatatccactttcgacaagaccacaacatattgcaactgttcaaacaattatacacagtcagcaagcatacatcaaatgaggggtaaagtgaagaaaacaacaaatcttattaccagcaagatgttttagaggaattccagcatcaacaaaagcagcacaagcagcattaatggcacaagggagaagctatacagggattaggtcaaggtacataaaaagaaatgaagatgataaaaagaaagaaaagggaaggtaagggtgcagaatctcttttcacgtgcacaagagaacatggttggaatataaacataaaagacttcttatgacttgcagaactaaaagacagtataagaaagtcatgagcaaaaactgggggtatgatggtggagatgcataaagactagagccaaaaggcacttaaccttcagaagagttcgaagtaaaacagtaattttataaaataattactcattcagcagacaatctataagagataactaatgagtattttgtcaaatttttgttttattactagatagattttttttgtcaaaaaaataattttttcttttttaccaaaagataactaatgagcattttttccaaaaattttgaagatagttagcatgtaatttgatgtaactactacgagaactttgtcatttaaactatatcacagtaactttatggaaaaaacttttttgaagagagaaacaaaaaactattcctcaaaataaaacgttacaaggtctaggcaacatcaaaattgcatggttgaaatgctgcactctaatctaatttggattagaatagctagaagctacataaaagggtaacctgtgaaggatactgcaccgtcatcatggacaacctgcagcacaaacataaactgattgtattaggaaaaggaaaacagccatttactggaacaacattttcaaaagctcagcctaagcatatcaaaaggagaaaaggaaaatgatatatttcgttcatggctttagtagcaaactagtagtagtaacaagccatcatcaatttaagaatgactcagagaatagttatctgcctaacattaccaaccaggatgaaggtaggaattttcaatctcacctcaacaaaacccatctgtggactcttacatgatagtttaaaatatatacgatgtgcaaaacacaatctaatacttgttcaatttcatgacaccaacaaatatacacaagaaactatgaaatcattatgaatcatatcaataaaatgaccaacaaacaaaacaagaaacaagcagagcagttaagatgatacaaaaacatcaacgctcttagattctaacaaaatgttagggcattaatatggggagaagggaaataaataacttacttgtattatgagggatgttgttgtattaggattgacgtttaaaagggttatgctttgtaaggtcctcttcaatatcatctcatactccttttccatttttcctaatacataaagaagttattcaatacaagaaggaataacaaactaggccctattgtcatggttcatttaatataacaagcatgtgtgcaattcctccaaaacgtttgatcattgccaaaggtttaatagaaacagaaatgaactgattccaacttgtgaaggcaccaaaccaagctaccaatcaagtataattaagttttacgtatcttttaaaaaccgactatgacaaatccatagatttgcaaaagtcattcttttcataatatatttagccaataacaaacagagaactttccctgagccattttggattcacagggtaaactcaaaaaaatattcatccattcattctaacatataatgtaaataaaaaaaaaaaactaaaaattaaaaaaataaaaatacaagcttaccaatctgcccagttttaggtttccaaataacttcaatgcaagccttttcagggctttcattcttcttagttccagcttttggtccataaacggcagcaagaactttggtatctcctattgaaacaacccaaataaccaagcaaaaaaataaacccattaacgagttcgatccaatgttacacatacaatggcaataaggaaaaaacaacaataaaaattgaagacacaaaacacaaatgggaagagaaaaaccaaagatgataataccttgagaccaactagctgagccatgagcgcggttaagtacgtttcgggaacatgctaatggtctcaactggttgggggttcgaccgtcaattctgtcgacttccattgtccctctgaggtggaaggttgttctaaggtgaaatgaagagtgagaaacaaagaaagactggaaatgcgaggaggagtgagagagagagagagagagtgaagtgacctccgggcggcggcgtgtggtagtggtgactgatgaggctgaaaggaagagaagtgtgacacagaaattgattgttgtgactgaaacagcatagacgggcttcgcttgggcttcactcttcagggcctcggcctgtctctattgtaccccactagcccaactgaggcttctaagcccagtgaaactagtaaaaattaagaaatcaatataatataaaaataattaatatttttgctccctaaagtttcgacactatttaatttgggaaatttgataatatatgcttaaaaataaatggtacactaaaaatatgctagcatattttgcatcatacaaaatatactt

SEQ ID NO: 112631 - DNA, 2973 bp, Cannabis sativa
ttggagcaatagatctacttgaatattagcccctccattatttcttggctgttgggtaggtttttgaggattcctttgaaaaggtagcctatttctcattgaactaacccttgctaaagttgaggttggccaattggctgcacttcaatgtactgaaggactcaatcaatagaagaatagtcaccaattccaagaattctaatggcttgggcttgctctactagtagattgttaacatttacttgacaagtatcataggggtgaggccccccacacagttcacatactacctgagcttgcttgacttgagctgtcatcatctttgtcagtgcttctacctgagttgtaagctttatgatgacatctacttcatgcatatcggctaccttcttggattggattctctcactcgaccactgttggtttttcatggccatttcatcaagtagctcataggctttaatagaactcttctttataaaagctctaccagaagctgcatcaattagtgtgcagtttgtgctagttaacccattgtagaagttataaacttgcatccacttctttaacccatggtgagggcactttctaattaagtccttgaatctcttctaggcttcatagagagactcactgtcttgttggatgaagttgttaatttcagatctcagtctggcaaccttggtaggaggaaagaacttgaaaaggaatttcagggccaatccctcccaagtgttgatagaatttggtggtaaagataccaaccaactcttggctcgatctcttaataagaatgggaacaacctcagtctgatggcatcatcccctaactccattcatcttaaatgtctgacacaactcttcaaagttatcaagatacatgtttgggtcttctaatggcagtcccccaaactggattgtggattgaaccatttgcagtatgaccagcttgatcttaaaattgttggcttcgatggcaggtggccttatacaggatctagtccctgtcatatttggtagcacataatctctcaggcttacgacctttaacctagtcttctatgacacccagatttttaccattgttgccgacattggcattgtcagccatgactacttcatgttcaacccccactacactcctttctagactcttatttcttatgtttttctacatgtcttctctatttcaggatcaacggacactattacactttgtccttaacgtcgcataaactaccaatacctgaaatatagtaagaaaaattgaaaagaaatcggttagctaaaagcaaaaagaattaccaaagtataatttaatctaattattgtaatatcaatatttattcaattctccagtaatggagccaaaaaaacttgttgcttatttttatagtctacgcaagtgtacgtaatctattgcagttaaatactcacgcaggtgaggtcaatctatagggaattgatattgagtaccactaaattggatttgtgtttctatttggtataatcaaaaatagagttgagcaattaattattgaaaattaaaagactaaaaataaacaataaaaggtgtagttgactatggatgaatgattaagaatatgaatcctgttatttcagttacccaattgttaatgtaaattattaattttctccctttaagtgatgacaaattatgaaaataaccctagctcttctcagattattaaggtcataaatcatatattatctactttcatccctgaagtaaattaatatataattttgcattaattacagaatctaaatatcacataagttatgtaaatactctcattttacattaaccttataattgttctattagagctttcctaatattcacttctcagatttcatattaggatcatagatcacattcaagatggctagtctaaaacatttagttaaagtaaataagaactaatcacacaatccaagaaagaaaaactaacaatcacattaactaaatcgggaaaacattaacgaacattcatcatatcactaaattaggaatttagttcatgatatccgtgttcatgcccataataaaactaaaaatagaaattaacataaaagaaataaaaggagaagaaagaaattgattgtggaatggattcgggttgccactctcgctctagctgtcatcctttactgcttctaaggttaattttttgagtccccactttctaactcaaagtttctttaaatagaatcagtttaaactcaaaatattgcaaaaatacgaaattggcctcgagttatatgcactctcttgtcgcggccaccaatagcctcacaacggcgagatcaccgtcatgaaatcatgccttctctacaaaagtgtttctgcggccatgtcatctcatcgcgacggtgaagaattagtcgtggccacagtaagcctcaccgcagccactagatcaggccacaaatcgttcattgtgccaaaatttattggcaaccataagcatctcgttgcagccatgaatggctaaaaatcaatttttcactttgattcatctcgcctcagttctttattagattttgatgctctagacttatacaaactacataaaacttgaaaatactataaacaaatatagttctgtcctaaaaacattaaaagcggctaaaaataactctaaatattacacaaaacctagaataaaaatagcctaacgacacacccaatcctttgatagttaaagcttgggttggccacggatttggtttgtccaagagtatttgatgacaaaccactttattgtaaaaagcataacaatggtcaaaagttttattgcctatcagcacagaatggtcattagatgaaactaagaattgggttttaggaaaacttatatcaaagttagcatcacacaacgggctgatactcaagtggtttgctttgagaccttatacatgttgggaatttattttaccaggatctta

SEQ ID NO: 112632 - DNA, 1337 bp, Cannabis sativa
ttttttttttttttttatgatgagaattctacattatcgagagtacagacgacagcatgttcataataattaccttgattgtgcgggtaaaaagctgtgatttaggaaaatttttcttattcatacataccaaaaattttatgaggctaaaacggaacaagacatcgattgcacccttcaaccgtgaacacgaaattcgttctcgattaaggctcaaaatcgtaacacctgtttcaaaattggaaaggccttattaagcaccacctcctcaaattatgttttgaaatagtatcaacgtgttcttgcgattaaaaataatatacctatatttgagttaaataataaaaataaaaataaaaaattggataatataattaatttataaagaaaataaacttttacttgtcatatataaaagaaatcatgtatatgcagccaaatgtttttattttgtcaactggcttttgatgatttattatggcacactattgggtttttctcttttctcaatttaagttataggctcacatcaagcttatataaatatataaatgtatatcagtattattattggacacaattattggatataagtagtttttagcatcttctaaacgtattattttataattaattagtgatactttctaaaaattattaattaaattatatgagactaaatattttaattacacaacgtttgtatatatatatatatacatgaatatgatatggtgtgggggccacaactaaattatgaatgactaatttatttgatgaagcagccttgttctaatcttgatggtttgacttctatgtatgtaaattgactacattaatattcatcaattaagtaatattttattgatgcttgttcccaattaaaaaaattcaattagtgaagctttcttcaggaataaatcatcttaacaaattaatctaatccaagtatatatgatcatgtatatatctaactaaaagagaaccatatacttttattgttatttatttttaaagaaagaaaaactaattaatgttgacacttgacacagtaccaaattgttgaccctaattataacaagttggcctgctaaaacagattatatattatttcaattttcatatccattctgttttatccgtatatgaatagttgtaattttaaaataaaaattacatataaaataatttattgtagtgaaaatataattccaacaaaaatattaatgtgcatatatataaaatagaaaaaattcaacaaattgactaaactattagaatatttctaattaaggaaataaaataatattattgattctgataaatgaatattttat

SEQ ID NO: 112633 - DNA, 1737 bp, Cannabis sativa
ttttttttcattttgccttaatggatacccgatgggttccccataatcgatgggtattcccctaccccgaattcgtaggttattagatagggatgggcgaggatgggggtataaataggtagcgggaatgggagcggagattgcattccccatacattaactactagtcaatttccatttctacttattatcttaaattttgtttcccacatttagtgtaatgtgtataatgtgtgattatgtattataagttgctgaatatctatatgtgtaatcatgtttaaatgcaatgtgtaaaatgtttgcatatgttttattatctcagttttgctactcacaatacatttaatagtggtatagctattaacaataaaacacaaaattttatcctaaaaaagtttgagaacctacttgtagtataagttatcataaaagtatcaataaaggttatttataaattggttcaatatcacatgaaaattatatcccatacaattgaataataatatgtaaagagaaattacatctaatttttaataagtgggaactcatgttaaatgcactttgaaatattttgcttcataaatgtgtctagtttatatataatttatgtgtgtattactcatactaataattaatactattcgtgttgtgtacatacacgtatatagctgcgcatactattggaactacagcatgcttcttcatgaccaaaaggttgtacaacttttttcccagaggaggaggatccgaccctgccataaatcctagtttccttccggtgttgagggcgagatgccccctgaacggtgatgtgaatgcacgactgccgatcgaccaagggagcgaacaaacatttgacatccacatcatgcagaacatcatgaatggatttgctgtgttggagtctgatgctaggcttagagacgatgtcaccacaagaactgtaatggactcctaccttggtctctttaataatcctctctttaatcgaccattttttcaatctgattttgctgactcaatggtgaagatgggccagattggtgtcaagactggttttcaaggagagattaggagaacttgtagtagattcaactgaaaaaatgatgatgaaatgatcatcatataaaatattatataagatctgtatgtacgtacctccagctagtattatgtttactgtttaattaattaataagcttaattaaacaatggtgtcacttatattcatattgatttgagtttttgtattacaaacaacacactataaatattttatgactatatataaaaagtctaccgcatcatctcagagaaacattattgctgtaattattccatacttacggggcatctgatacttgttctattttgtatgaagtaccaacaaaataattaatgctattggaggttttctaagtgaaccaaggcagcattatgaccctgttcgaacacatataatgagggatagtagatcatcatacaatatattttttttatagaaaccaacaataagttgcaccaattagaccacttggttttaatttttaacaaatgcctcaacagaactatgcacttaggcctccacaagcaccaccttactgccacacagagccaagtaggcctgaacataaaaaccgctaaaccgtgggaaccgcctaacccattagaatccgcccattaaaaacccgcaaaaattggattgggttaaattttaacccgctgtttggcggg

SEQ ID NO: 112634 - DNA, 4373 bp, Cannabis sativa
acgctgacttcttggagcaattggactaagtctagtgttaggtcagctgactttgatagatagatcgacaagaacaactagtctatggttgcttatcctttttggacaccactccttaattcagtaacactttggtatattgattataagtacatggctacattaagtaccgtaaattgttcatcaaaacttcaaaccaaaaataaacaaaaattatcttacttgtcattccatcaaacattctctaatcacatcaagccgcgtaaaacattccaacacatatttcccttttttatcattatcacaaattcgaacaagtaattgtatttggtcgggataagtctgaagaatatttaaatatatagtttgacccaaagttgaacttaaaccagtacagcgtgagagactactcatgctagacttatttacttagagaacttacaaattaaagagcaatatgtccatgaattttatgttttttattattagtattattaagatatttattttcacttgaggcaacatttgaatgaagtccttgttggtttaccaaataacatcattcctcgaatgaggttgtcttacattggtggtaggttggaaaaagaagttgcatggtatgtcagaagagattcctatacaagattaaactagcttataacaatgtcaagtttatttgtattataaacctcaacctcttctcttataaaaactccccaagttttctatgatttcctctcattaaaactcagcataattcaacagagtaaaatatatagttcatcactacagtcacaagagccttctcttaacaaacaatctctgattctagatctctcggccaatcttttagttaaacacaactcctagaaatggctacaattacaagacaattcttaatgatcttgcttcttgtccctcaactgcttactactttagctcaaacctgctcaaatcataccttctcagacaacaaactattcgattcttgcaaggaccttccaatgttacaagcacacctccactggaactacataccatccaccaaaaatgtccatgttgcttatagagctgctcaagaatctacaggatggattgcttgggctataaacccaactggaaaaggcatggttggatcacaggccattgtcgcctttcaaaattctaacgggagcatgactgcctatccaacagccataaccagttacagcccttctatgcagccaagttctctcagctttcaagtttcaaacatctctgcagaatataccaaaggtgagatgactatctttgctatcgttggtccattagctaaagaaacttccaccaaccttgtctggcaggccggaacttcagttttgaatgacatccctcagggtcactcaacctccgggccaaatgttcaatcaatggacacagttgattttcattcaggctaaaattcaacccaagtacctatcctgtgtttctattaggaatctaagtttgtcagttcagtccttcatttggttgttacagatggtgggttgagtgttatcaacttagtattattacgagtgtttacatgtatgctatcttagtttccaacttcacgtcattggaattactttcgttatatgtagtacattttacaaatacatttctaactacacttactgaaaaaaaaaaaaaaaatctgcgctttctcaagttagcagaaggccacaacacgcataataattgagaactagttaagaaaaggcagtagttttgtcaataaggatattaccttttttttttttgtcaggaataaggctattacttaagtagtatataagtagaagttatgattgtccagcaagcaataatcatcacttgccttggttttgaatattattggaatccttgtattctaataataatctttgttatagaagatgcattgtttaagcatatatctaaggtcaataagcttcaaacctctcaaggagaagatgcaggggtagatagataaatcagataggagcttcaaagctacttatgtgtaaccacattatccatcatacataacagctcactgctcttggcctctgttacttttagctctaaagtcacctgccaaacatgttatgaaaatagacaaattaagcagatgatatacatagaaatagtcaaaatccaagtcatccaatttaaagtcccccggaaaatacgtaaaggtaaagctaaatatagatggcacaatttataatatacgagacgtgttgtggttggtgattaacagataatattatgctcacctcttggaagatttcactgtgggagatctcctcaaaaccctatacagagcatattagacttttgtcagctgaaattcttgctgtaaaaaatttgtgcatctaaaaaaaagccaacactaataatatgtagaaatacaaatttagggccacaagggataccaattttcggaacataataagggacggtgtattagagtctccaattttagctcgaaaggtgtggatccccaagttcttaattgcaaatgccatcatgattaaaactgattcctttccaatgcctttaccacggctatgctagcaaaagaaattgatgaaacataagatttaagtggaatacatatgaatccatcaagttgatataagagttaataactgagggtgggagaagaagggattgtatcacaactaatcatctagaaatgcaaggacactccgaagaagaatttggtgataactagactgatgtaagaaaaaataaaaatacacatttctgaaaatgattcgcatcaataactggcaattttccacaacaaatacttctctagctctctatgacaaagaaccaaaacaaaatgacacaagcaaagatgtgctagattttaattgcaatcaaaggagcacttagctatttttattgtcagaagaaagtagggaaaaataccatttggattcagcaatcattatttcaatctctgccatttgtggatcatccgggtcattcatatagatattcacatcacccaccatggctgacaaaagggaaagcgcacatcattcataacagttggtttcaggagagcaaaaagatcaagtacacgacagacaggacaacaggtgaacatagaatacaatttaggataggataacatttcatattgtaactcaatttaggataccgttcctatatttaaaagatacaaagatagactaactcatcaacataaatgaccaccattcatggttaaaaaatgactgcttttatagaaaaattatattgttacgtttcattcttaataatgaagtgatgagtgtgaagaaggtctcaacaaattgactgaggaaagctccatcttcattgcccatatcaactaagaacatatatatgtgttatgtacataaacaaatactcacaaaagtactcctaccgtgatataaaagtagataacataagaaaatccttccaaaaacaaattaaacaagaaaaagggtttgatcttttaaatgcaggtgatcaatattttccaacaaactctgactgttttcatgggccacaccaaagaaaacaatattagaactagaaaatttatttcacaaatttagaatgaaatttgtcttaaaacgaaacaaaagaaaagaatggcaaaccttcaacatgaggatctccatgaacaaactctccgacaaccgaatgcttctccaatacaatgaaagttctttctgcaaaataaaaaaaaaaaatcaattaattaatcccagcaaattcattagagatccaatttttttctttttgatataatcaaacaactgtgctttttgctggaacataatcaaacaactgtcgttgtatatcaaaagtgagggtagcccaatattcaatcacggtcaggaaataataaaatccaaattaaagaacagaaattttagagtgggcagtaagtagagagagataactgtaggggtcttggttccatgagagctgcatctgatactcctggtggagagtgaggggctcggatccagtggcttgaagcatagctgggtcttgcatccattcgtggtatttcggcacgtgttctgccatgtatggaaccagaattaccttctctcccaatagactaactcccatttttcaggctttgatgaacttttggggttgaatcgatttccactccaaaaccaaaacgtaacgagcagagtgaaaagaaagtgccagagcgaacgaacgacatcaattcaattgtcaaaaatcataaacatactagttcagtcacgtgcacggatcctacttttttttctaaataaaaataataaaaaaaaaaatagtaaattgctgcataaatactgaggcctttggttgggaggaatgaaaat

SEQ ID NO: 112635 - DNA, 1943 bp, Cannabis sativa
gattacgctttagtaaacgtgccattatagttaattggttttgagatggaacctcatacatcttatcccaaattctaacatggtaacaaagctgcttgttatctgttgtgagcttaataaagtattgtcggtctaaaaagacgagctataaaagagttgtttatgatatgttgtgagcccaaagtaccgactgtccaaaaaaagatgagccaaacttaaaaacttccgtagtctcccctttaacttccatttgagaccttttggccaatgtgtgccagattttagtgttgggtctttcacctgtttcaaaaatccacaaattttctcacatgtacacctacaaatttctcaatatttagcattgtgggattctttcaaatgtcacattcagccatgtggtctctttaaggttgttcctgatatccacacttttcaggcccaaacatgagaaaggtgtattagaattagtctcacattgccaatgtgtggaaataaattaccatatataagatgaatgggctactcctccaatagccaattgattttgagataaaaccacatgcatcttatcctaaattctaatagcttgtgaaaggctacatgaagagacttgcaagccgataactgaaaaagaaactctactagacaaacagaggagattggggctcaaagcaagtgtggacgcgtgagacccagatagctgaagctcgatcattgagagagtgagattctgtaactaaattttcttagactttgaggaaaactagaaaaatatataagggaaattgtaattaatttgagattatcatgaataaaattagcatttcatttgttgtggcagattaaccttgtctcgaagaaggcacttcaatgacattgattctttcattgatttcttctttccttaggatgaagaacgaagagatcgtgcaactattccagaacatgagtagggaatcaaatcttaagctagagcagagagatacatcacagatggagaaacccaaagctattcttgacgagcgcttgtctcacctttcacctccaccgtcgcttggccgtggtggtgagaatagcccagctttgtctacaactcgagcaatgggtcgacactcagatgctgaaacagattatcgttatgagaaccgagaaaacaaaagacaataataatattatattagtggtgggacccacataagtcaaatgactctttttcttcttccctcctccacaaccttttcttctccttttactattcataaacaccatataaaccacccgtgcccaagctcagagccaccaccctccatgccaccaattatgaaatgcgtttgagctgcacgaccaccgaccagtagttatctcacacctcaagtttggtggcaatcggagctgagacacacacacacacacacaaggtgcaaatttttgatgtcaaaactttgagtcgacattatgaccaactctagtgaccatttgatgaatggttggtaccattggaattaacgtcatgaggagagcatcgcccactaagttttgtcaactcaatgcttttctgtgatcaaagcatctctgccctttagaagcattttctggcaaggtcgtgcttctttgggttaatgggttgtaccaccaccgattgtcattatacagtgcttagacaaggtttcagaacttcaaacttcaaatatagtcatattatatgtcatggactcaatttgaagagtaaattacaatgataataattatttattcagttggggagtgtaggaaaaagtgacttttgaagtcactaagcttattggagcttaagattgatggtttaaaagtgtctcctttgcaaaaaatttgacgattctaaggaggtagggactcaacttaattgtaataccccaataagcctaatagttaataattagggtttataattatattatgggtta

SEQ ID NO: 112636 - DNA, 1595 bp, Cannabis sativa
  modified_base (1030)..(1044): a, c, t, g, unknown or other
gccttagtgctagaaagtctgttgatgagatggtgattactcttggggtggagtagtgtaataaccaaaaatatttagttattattttctatagtatagatatctcgatgtggtaatagtgattgcttggaatatgttataaatgtcgaaagttactattaaataaattatagatttatagttatttaagcttcataattttgtactataattttgtctagaatccaatatagttttaaagttgtaatccatattattttacataagatatatgtgcctttacccttacgaattgagaccaattatttctattgctagacgtaagtgaattttatacgcttttaggcattatacactatagcttaataagtgactcaaagatactaaaagaagatttatcttgagcttgtggcattaaatgacgagatatgagaagtaaagactaagcttagatttaagtgtaccacgtggatgaagtcttagtctcacatcaccttagatgtgtatatgggaagtgtttttgcattatctagcttaattaaatacataacattaagtactaaaagtagtagctattttggagatgttgtattatttcataatatagcttaagacgggtaagggtgaatgtgcataattcaaaaatcaaaatttagtttcaaggatagaaacgttggtccctaatgaagtggttatagaagttataaccatgatccttgtgtgttcgtgagggtatgtgtcaatatataatttactaagaaaatatgtatgatttattcaaacttgagtctttataaggagtaaacgactaccatcgaaagtggtgagcctcaactaccttgaccgaataaaaagggagatattaacatgggcttaaggttgattgagtgttagtgcagagttcacaatataggttagtggggtacggtaggatgagtatagaggcctacatatagtgtaatagtcctttcttgtattggatcatttaaaaaccaacttaataaaccacatactctctctctctctctcnnnnnnnnnnnnnnnctctcgctctctctctctctctcgtcctagctaaactctaaagatgcttttgccatattcatttgtttctttatttcatcaggagccaatctcacaccatcctcttcatatattatcaatattcatctaagaaaaagtcatatataaatcaaacaccatttccactctcaaatcttcaatctcattgtctctccaagtagtgaccatcatctcccttgtatctcacacatgtcttctctcaaacactaagaccaccacacaaatttctttggagaagagatacatgtttttgccatctcttgcctattctgtagatcaaaccatcaccataaatcactatctttctctcatacatatatatatatatatatttcactttattggtgtcaccatctccatcattttgtagtgctcaactagatcttatttgaaagctaaggtttatcataaaacaattattgcttctcaaagatctctctcattgcaatcaaggttaagactccacattcgaggtaaggaaattaagtagaaaaacataagttttctgtatg

SEQ ID NO: 112637 - DNA, 2519 bp, Cannabis sativa
ttttttttttttttttataaaggcatgctttgtggagtctagttgaagattatgtcagagcaaagttaatatgcttataattttgtgaatggtgatgtatttgaacttaaatctgcatagccactattattcttaattcccatcattttattttgaaagaaagtaaagcacttacctgttgttttttctaactttcatattcctgtcaatcagattcatatatattacctttttgtgttgatcaattcaggcctttgatgaagcaattgctgagttggacaccttgggcgaggagtcttataaggacagcactttgatcatgcaacttctccgtgataaccttaccctgtggacctcggacatgcaggtatatattaattgatcctttttcttctgtcatgagcaaatagtttcaaaattgtgtttataagattaatttgtggaaagaattatgtagttattgaccaaatgatacttttccaaacgatttttgaatgtatatgatgttgataatttgattcaggatgatggggcagatgaaattaaagaagccgccccaaaggctagcgaggaacagcagtgagcctagttctctgcaaagttagggttcaacttctcctctatatgtttttaataggagagggctctctcattatctgatttcgggtgttattctgagattttaggcatattcttgtcttttgtccctgaatgattgacacactgagtctttattttttcttcttttttattagtttcttgtatcagtttgtgtttcttactgcgcttattgcttgaagatattgaaagctttatcctgttgggcgtatcaacctttgatattcatgcagtgtgctccttaatctcattataagtaaagctctattaccatcctattaaaacttataaagaagcaatcaaatgagttgaattcattgaataattactgagctgaactgtcgaggcagagatgaaatattacataggacaacttgtttatttaggtcacgtttgtttttataaatgtacaatatgtctgttagtaggcccattgaacatgctcatagagatatataccaaacttttcaacgaacatgttaggttttctgtcgaagtggacaaatgacagaccaagccaaacacttatcattacaagccaatgattatttaaagatgtaaggaggaattaacaattttaagcaagtataatttttcttcctgcattatgacttaaataatttctaggaactatacaaatcattacaaacatctcatttcagttaactttctctttattttttttatatgaatttacttatgtggccatatgttataggtgtagatgttgtacaagagttcatttaataactttaaactattagaaattcaattatagacatacatacaaacattagctctaatacattctcataattcatcattagattgatatttatacattgttgtttgggttgttaaagtggatcaaaataacgtcatattagtgctacattaataaattatttaaagaaataagaaatacgacgaattttatagttgaagggaaatttttacaaatcaaaaaattaggaagcaaaactctacaaagattataatttaaggagaacaaatcctatatattcaaaaataaaacaaggatcaaccatacctatgatcaccaacaagacgcaacctcatgacaaaccaaccctaccacttatgattacaaaccaataattttccaatctataaggagtaaaatcaagctaaaattatgaaagttcaaacaacgatcaatcatgttaatgaacacaaccacaacgcaacgataaatcaaaaatcacaagcaccctcgtgaacaaattttttttgaaaagtaaaaatactaaaattaaacaacatgaaaatgaaaacaattcataatcaaagcatataataagatctctcctccaactctaaccttgcgaccccaagtgcaaaagtaatagcatcactgaagtcatacaaatctgaatccaaatttcgcaaacttaaagatagccctttgaaaacccacagccagtgaaattcaaaccctaaccaaccaataacccagacaaaacacgccagggaggtcaaccatgttgtgatcctatcgccacccgcactattcgccaaggcacaaagccactcaaatcaaaagaataaaaaaaataagaagagtcaggccaatgccccactcaaaacaaaacaaagctagtcgaagacccaagatggacaccactccactcgcgtatgatcggtcgagtgcaaataaagtggtgctctgaccgagcgaagataagtcatacaaatgtgaaaagaaaagaaaccctaacaaagctctatatttaaaataaacaataagagaacttagtagcctattttacttcctatatggtgttggaaattgttgtgctccaataaaattatcaaatcaacaagattacaactctatgacaaataatacaaaggacaaaatcatagattaaataatgtta

SEQ ID NO: 112638 - DNA, 3236 bp, Cannabis sativa
  modified_base (1420)..(1423): a, c, t, g, unknown or other
tgttgaaaattgagctcatgatctcatttttatcattttagaaaatataaggtccattttgtcatttaacaaaatagagtgtccaattagtagcttttataaaatgtaagatccaaaatgatatttacccatataaacctcattcatgtatccagacatttaacactccaaacatatgtgagtcattggaattctgacaaaagtgtaatgtgtatcaagggtagatatagagtattgatattgcagcagtagtatttagtactttctaaatgtgttatcttataatgaattaatgatattacactatatggtatcacttaattgaattaataacgatattgacacgtaaaagcatactaacatttcttattcatctcggtaatacatttgacctaaaatggtaattgggctgaattttctctttcattgtaacacactatatttaaaaaattgagttaaattgatagagtgaaaatgcaacaaaaaaatacttttttttaccaattattgaagaggtttttccattcctacacgatgaacaagccatccttagcaacaatgttagcaacaattgtattccacttctaattaaaaaattatgtatatattgatagagcaacatgtctttacatgttacaacattctctctcttctctattgtctctttctttgcttttctctcattttttctgagcaacactcatttgaaactttcctccttaattcacagaaaacacattttattgaccaaatagttctcttttctcaaacatgtatgagttatctgaattttgattattttgttttattctttttgtaattatattcttcaatcaaaatatatttgaggattacctgtaagaggcttccaatacacatatagtaatcaatctccataattagcaaaagtgaagtggaaatttgttagatatttatttgagtttacattaatttttatttattttattaagatttaagttgattgtcctagtggttagtctccttcctaactctataaataaaaattatttcatcacaattatatactctttgataatcaaataaataaaattacttctcatgtcatagattaataaggtatgtatatctaattattatatatattatagcattctatattatatacaattttatatcttgggattattaattcttctaataaaatcgagataatggaatcggtagaaactaagaatattcaaatcatcatccccttcacccaaaaaaataaaaaattctaatattcattattgtaggtgtaaacagttaaatcctgatacagggccgtccctagatataggcgagctagcccgcgcttagagcccactcattttaggggcccaaattaaaaaatacattttaaaaaatatacacattttttaataatttttaaaaatannnnttatctttatagtaagggtccaatattttttttcctatgatccatttcaactcaagcccagccctgcccatacaaaaagcaaatatcttcttcaaactaatccaaacaatagaatatacaatctcttgcaaattatacattatggtttaccaacaacacatatgaccaaaaacactctatttataattaactgtcaaataaaaaaatatattaaaatattgtttctttcaccaatttatatgtatcattctatatatgtataattcagctatagaaagtaaaaaagagatttgccataaaattttatttgtctcatttgaaatgtgtgaaatttcaaagtgaagtgacgttttacataacactcctaaaaatattccaagaagatgaacatgagcacaacatgattatacagtaccgaagctcaaccaaatttttttatctagctcttaaataaaacatagctaaaaaactttacaacaataagaaaaaattaaattactcgcatattccttttaaagaaagagaaattgaccaaacactctaacagcttgatgcaaagcaccatccgtcaaccttaaaggatacgttgtccttgagggagcataagtaaaaccttaagattagcactaacagagaataaagctggagttggtataattgttcgagatcaccatggttgattggttgaggctttcacaataaataaaataggttgtgtccaactcgagtcagcaaagatcattgacataaagaaggcattaagttggatcaaaaggaagaattggaaagatattgtacgtggtggagacgactgattgtcttgaggctcttcaaactttggatagttcgatccagatgccttttgtgtttactttagtgatttttaattgtaaattgttattatcttctcttgttaatgttcaaatttgttttgtgaaacgatctactcatagagtcatacattgtcttgcttaggattcccatttatggtcaggttgaaattttacctagggtattgcttcggttgcccttcagtctattgtgttagtcaatttggctgcttaatgaagtttttattagggttgttcatagaatttgtaatctgtagttccaaatcacaatcaatctggaccaaaagcattcgaaaccagaccaaatgaattcattgtcaatggtttggtcaatctgaactgctaataattctccagtttagtcacaatttttataattctcgctagaggttcaaccaaatcaatccgcctaattctttacatatacttgatatattttttctattatgaaatattgatatttgggaacaattttaactaatattgaaacaaaagtattatactttaaatgaaatcttccaatgggttaaaaaaaaaatcttccaattacactcatatctaagttcaccctatttcatttttaaaaatcttattcttcttttttctttcaaaaaaaaaaaaaaatccaatattattacaaaattaagtctaattgaaataaagaagtaccccatgttctgtttgaaggagaccatcttcctcccttttaatctttctttctttctctctctctctcaattgaaaatcctccaatctattggaattggaaaatcttttaccttccgtcgctcctgatctccccctctgttaccatgatctcttgggcatttgatatggggttcggaattgatgggaatgaaaatgtcaaactaaattaaattttagtaaccatgttgagaatcatggggttccatctcaaaaccaattggctatgagtggagtagcccatattcttatatatg

SEQ ID NO: 112639 - DNA, 5402 bp, Cannabis sativa
cttgctcctttgtctcaagaaactgtgatacatcttttcttgggcattaaattccatggcatcctctttctctgccagctggtaggacatatcatgaatatgttcttgagcttgcaatctggtctccctataatactccttggccccatgattcttcttaccaacatccccaattctctctttgttaatcatcctcttgatggtgttgtgtttcaaatgcatgagctttaagtacaaagttgtcattccctctctcttcatcggtctatgccagttttcaaccaccacatctttaaacttaggatgttttgcccagaagttgtagtacctaaacggtttgtgtccaattttctcattagaagccatcgatataacacacaagcaatgatcagatatagtctcccagctatagtgagctttagccgagggaaaattatctgtcccgtcttcatttacaagggtgtgatcaatccttgagtagattctcttgtccccatcttgattgttggtccaagtaaaacccgatccagtcttaaggagcttttccatgtggctttgtgccagccaagtagtagcatctctgatgtcattcaaggttaccatattaccacccttcctgtcttccaattcaaaaagagcattgaaatcccctcacaatcaacggtttggcattgaaactaagattgagcattcatccaacatcccttttctttcatctatagtgttaaaaccatacacaaaagtaatgctcatagcttccccatggccggccatcttcacatagcaatgaataaattgagggtcctctctaacaacaataattcgagtaaaacttttcttccatatgatcaaaatacgtttctcaatggtattactcgtataatactcccaattagcaaatttcctatccatcatttctctaattccactattctttaacttggtctccataaaccacaaacccctattttattcaaacaacacaaatcaaacactgtgttctacttttccattttattcaaccccctcacattccaacaccctatattaatgctatccataggcatcaaaaacaataacatagtcattattttcaatagctacctgagaagctacaccatcctccttttgttcctgtagcattgtgaaagagttgcttgagctttcggcattttctctagacaaactaggttgtgttgttgacagcactttagtcttctttggtatctcccattcttgttggtgttgaacattgcttgctgcaatttccttcattcccttcttctccttctgattgttcttgtcttgctgttgttgttgtttctcggtcttcgatttcataatttcatcgtgtctacaagttgctttggtgtgtccatattttgagtagtgagtacatttggccggcaaccattcgtactccacattctggtcttgaagcttcccaaactcattcaaaaaaggaatgaatcaaggtggagcgtctgtaacttccatttctaccaggattcgagcatattgcaacctagttcgatccttggtatgttggtccaccattataggttttccaattgtgctaaccaaagcaattagacttttagtgccccaatattgaagcccttggtcatgtaatctgatccccaatggaacagtgcgaaccagattcatagcgttcaaatccgcagaccaagggcggactataactggtttctgatcaaactgaaccactcctgcctccactacttgatcccgagttgcttcatcattaaaccgcaccatgattaatcccatggacaatttactaacctggataactccaagatgtccccagaccctttttacaaagccttcaaatattgtaatgggtggattagctcccagaactttacaaatcactgctgattttcagcaattctcctcttctcggacctcatctagatcgacctttgctattttgattccgtctcttatcaatggttctgtaaacaaaagcctctgatcacgattactcaccttctccttcatgaatgtctcacaggtcctcttagctgattctggtgagtggtggacatccgacgacgtcttttcgttatccacctcctcagcccaactctgcgttctattttttccagatcgattcgcttcctctgtttcgattaggtctggagcttcgactatctcagcaatcaattccaatccctccatcgagtgcagatcgtcacttccctccttctccccttcaaaacctacaaccgcatcgtcaatcgtgagccgggtgactggtttccgtccaaccttcttcttcctcaccacggagagagagagcaggggaaacggaaacaaaaatatgttcaacaaaatacttcttgatttagaaaacatcgatattaagatagaggatgaagatcaagccaccattgtccttaactcactcctcatggagagctacgaacatttcaattgaagagaaaatctaagttggaggaacaccctggaaaaccaaaggaaaacacaagaagaaatgttatatttaccataagacaactcactacaaaagggattgccccgaactaaaagaatctattttaccataagacaactcactacaaaagggactgccctgaactaaaagaatctgaatttgaaccaaacactatcatcacgagaaccatgggaatgttgatgtggttggtgattaggatggaagtgatggagatgaaagtgttaaagtgatggtagtcacaaatggagactcaagggtagattggattattgatcctagctattctttccatctttgtcccaaaaaaaatcaattatgtgattacagaaaaattgatggaggaacaatataattaagtgacaatagatcatgttctattgtgggaataagatcaataaagctacaattattaggagaaatttaaagtgagttgttacaggtgagacatataacagaaaataaaaaaaaatctcgtttcaatggccatgctaaacaaagagggtgcactgtcaaaggtggaaaatggaattctcaaagttcaaaaggggtcaagaattatcatgaaagactcaatgatgaatggtgtttacatctggcaaggtagcacttcaaacaactcaatctcagttgcttcaagagaaatgcagaattcatttactctttggcacaaaagacttcaaggggttagaaatactaaacaatagaggcttgcttagaaagaatgtaattaaggatctagacttttgtgaacagtgtgtctatggaaagtctacaaaagtcaaatttggaactggtctatataataccagatcaaccttggattgcataaactcaaacaaatgaggacccttaaagataatgtctcgaggtggagctaaatatttcttgacctttattgatgatcattcaagatatgtgtgggttcacatacttaagaataagaatgatgcattcaacacattcaaagattggaaaactctgttggaaactcaaattggcagaaaaataaagaaattgagaattaaaaatggtttagaattctgtgcagatgactttacaagcttttgcaaaaagaatggtattgcaaggcataaaaaatacctataaacccttaacaaaatgactttgctgaaaagatgaaccattcttgagttggttacctaaagatttttgggcaaaggctatcatgacagtttgtcatttgacaaacagatgcccatcctctgccataaatttcaagaccccagttgaggtatggacaggacacactattgactatggaaggctcataacttttggatacatagcatatgctcacatcaagcttgacaagttggaacaaagggctatgaagtgtatatttttgggctagcaaggatgttgcgtttgatgaaggtagcatctataaggttaccttaaagtctacagcaatgactatgaaagtgcaaaattgaaataggtccaagtttgaggtggaacttggttcaaattctgaccaataaatgcatcattatgagacaggaaatgatgacgaaatcggtactcacactatggatgaataggttgaagaagatgaaaatgaagacactgagataggattgcagcactaccaactggtcagggacatagtcaagtgagtgtcaaaagctccaagcaaatttggttatgctgttattgttcaatttgctttaaatgttgcataaataagtgataatgaaccaagatcaaacaaggaggctatgaactcagctaatagtagaaagtggggaacttcaatggacaatgaaatggattcattagtaaagagcataacctagattttggtgagaaaaccttaagacaaaaggataattaattgcaagtggtctgacagacacaaagactcaattccaggatgtgactcagctagattcacgactaggtggcaaggggttttacacaaaaagagggtttaaattacattgaaatcttctcacaagtattgaaatcttctcatctcaattcaaatgttattagctttaacaactataaatgacttagaattggaacaaatggatgtgaaaacaacctttttgcatggggaattggatgaggaaatccacatgaagaagcctgaaggttatgaggtaaaggggaacgaagactatgtatgcttgctcaaaagatcactttatggtctcaaataatctcttggacagtggtacaacagatttgaggaatacatcaccaaatcaagattcaaagagaatgtttatgactactgtgtttatgtcaaaaacataaatgtcaaatctatggtgtacctacttctctatgtagatgatatgctatttgcgagcaagaacagtgaggaaaacaagaaggtaaaacagttaatgagttttgaatttaaaatgaaagaccttggtgcaactatgaagattctaggaattgagatactgagagataggaaagaaaagaacttgctgctatctctacatctcaaagtactttaaaggtttggtttttaagatgcgaaaccagtaagtacactcctaataggggtggacaacatctaatccaatccaattgaattgaaccaacccaatccaatccaattatgaaaaattagatatccaattacaattagattggatgttaaaagttaaattctaattaaattggatcggttattagatttcaatttcaaaattcaattaaaaattgatcaaatctaattacatttatatacattaaaaaattatttatatttatttatataataaaaaatatattcattatatttttagtggattttttttgtgttgaatttataatacttagttgttttgtatatttattttcataattttttgttctatttaattacttagcaatgttattgttttagttatttcaa

SEQ ID NO: 112640 - DNA, 2459 bp, Cannabis sativa
  modified_base (26)..(26): a, c, t, g, unknown or other
  modified_base (73)..(75): a, c, t, g, unknown or other
tttaatttatcgttttagaaaattcntatttagggtgttaataaacatacgtgtgagtagatctaagatcctnnnaaaataatttccaacaaaaactaaggttctagaaactacccaaacttgtaaatcggatttccaaatggcaaattggttcttagggtcctgcctggagaaacagttaaccggttctctgcagaaaaccctaacaactttgaatctcactcaaatttatcccaccttcaaataagctttccaaaatatttgtaataacaccaatgaattattttcaagcagtagcagcaacaaacaaacgcaaaaactcaaaacaaacaagcccagttcatacaggatccaaattcttgaaatagcatgctataacctaactaagagcttcaaaatctcgaagattaggatttctagggtttaccttgtcaattcctcccaatttctatagaattactccttgaattctagctaaactagatgaaaaattagaagtggaaccctagattcctttgggttcgaaaagagagagagataaaattgatttttcttatttttttcttcaaaggactttaattattaaaacctaaccttatcttaataataataataaaactattcagaatataagtttattaataaccaagggcaaaaattccacaattaccttcacaattacccctttatttccaccttaaatagtcaataggtctagagggaaaatggtcaaaaatcataacctcacctaaacccgatatttcaaatatcacatatatttgtccctctaagtaaaaggttctaaactcacccatgtcactctaatggtcatccatcgcattttccatcattaccgagtaaaagtcatgaaaattgtaaatttcacacatagcaagaataatacacttacagtttaataaaatctcaagaattgagaaattataactctcatgtctattttctaaaaataaagcccacaacaacatatatattattttgttataaataagatttattatttattctatcaataaataataattgattaattctcattaatctcttatttcataaggattaaaagaaatattattttttctaaaataatatatttttctctttaatattatttaaaaataatattatatttaagtaatcaatataactttatctaataaaattaaataattaaatactattaattatacaattcataattatcataattaatcaaaacaataatttcacaattactattttgctcgtaagaatttatttttcataaaaaataattctcactcgaaatttattcattaaataaaatatttccatgtatagtgttgtagaggtgactcggaggcgatgaacctatatttcgaagcttcaataaatacttaattattatcgatctcattaatagaataatttaatttattaattctattattactcctctataaatatggaattgcactctttgacaatatacaattatatttacaaaattcttatttgtattccattaatataatcaatataagcaatccaccctccaattattagttcataattagagttggtcaaaataccattttacccttctaattatctctttattccttatgtaccattagttcaatgtgaacagttaatctataatttattatatatttggatctaactgttagcactcccagaattaacactataagggaactaatatttaatccgttaggaaagcttagattccactattgtataacatgttcccagccactcatgttataaagctcccaaagcagaagttgtaagaatcatcttctctgagaaactttaataagtgaatcaaagaacttaatgaacacaaatatgagttcatgtatacttaggattcatgttgatctactaatgatcatcattgtaaaatgaataactctttcatggtaagcgacacattaatgaaatatttattacatatcggtccagtcatgtataatcgaattatacacatcacttttactacatgtttatccacatatgtgatccatattaaaattacacacacacacacaagtatctagaagtatagtgtatagtaaaccgtacttagtatttccatattaaagattctcattactttaatacactaccaacttgttttattcttatcgtataattttaattctcttgtacatccttacaagattatacatgatccatatgaataatgaaatttcagatatttaataattatactcttataattaatgtatcatttattttataattatattctatacattctctaacatattatccattaattacttatttttagaacataaatctcaacattatggttgattgtgccaagtatggtggctgattattttgttttattttatatttaaaactcaatttaaatttttggggaattatcttatatactatttttttaa

SEQ ID NO: 112641 - DNA, 2503 bp, Cannabis sativa
tttttacagtttttcaaattttatttacataaaatacggtccttttacgttgtactcttgttatttttctgttcattttttgttatttgtatattatgttttatgttgtttttgtgttgttatgttgttgttttaatattgttttttttgttacttttatgtagtttttttgtatttttatagaatattgtaaaaatatataaaaaaaaaataaatgtaaaaatataaaaattgatgttttatgtaattatctctatcttcaattgatgttgttattggatgtgacacatggtattagtttggttaaagatttcatcaaggagcaagagtgggatgagggagagatccatctttggttttctgaggatgcaaatagaattcttaatacaacaactctcctatgattagtttcttggtggttttgctactatttttgtgtccatttggagagagagagagaaacctactaactcatggaggttccaaaacatatcttgtgagcctccttggtaagataaatttcacacaaggaattctctcttccacaaaatggtatgtactattatatgttttactatcatgtgcaatattgatgtttctattttaggagttttttgctcctacaccaactcaagaaactaattaaaacgacgaggtcaaaaatgacctttaacaattaaaacccttatctttaactttccaaaatgcattttgtaccccacaacaaattgtttaaactaaaatgatcagtcgtacgagaattacataaaactctcaccccgagctaatcctagcttagaaacttagaaccttcgagatttaattcaccaaatcactctcacctgaaccctcgaaccttttcttgatcaatcttgatcaattttttaaatccaaacccaaaaaatagatcatacatgcacataatcaagaaatcacaaagcagaaattagagataaaaaacaaacacaaggatttatagaggttcaccctaaatattatatcaaaaatattagaaagttgccaaaaatagtcaagcgcctcaactctctagagaactttttacagatgcagtgatactttattttcatcaagagccgcaactttcaagggaaggtcgcaactttccatttttttctcaaattcgctctctgtgacgattacagagctgcgattatctatcaagagtctcatcaacccttatttttgaaatttaaaaaattgacttcttagctttatgagtcgcactaactctcacaaaatccatccgttctttgacacaatttcattattttttatcgaaaagaacactcgaaaaataccatttttcaccaaattgcaaaatttcttcaactaacatctaaaattcaactaaaaacaaaaacaagcgtaaacttggacagtaaaacataaaaactactaaaaatacaagctaaaatagcataaaaataacactaacaattacctccttcaatagggcatcactaacacagcaccaaataatctgagtacttaagtggccatacaattcttttgagctaatcatattaaaaaaaattagaatcatcaccaaacagtggcaacagtgctttttatatatctcaaaatattacttctttatctttcacttcaattagtcttgacatgagaccacttctgataaacaacttagatagcatactgattattgttgctctaaattaatgttttttttttccttttgtaatcacttattatcttcttacatcaattgttaaataagaaaaatggataactataaaataagataatagagccttaaaataagtaaaaaagaaaagtcaccaccaataaagtaatacaaaagtttcttaatttagtcaatgggagttcaaataaagtcaaaaccatttgaaactatgtatgtccacacatgggaatccaatgcaaaaacccaattgggaaattgtgaagtttattccattgatatttcataataagagataattaggagattcataagtgaaataatgtgtgagtgtgcataggttgagagtgattcgaatcttaaaacttacaaatgctcatacatttttatttttatatttatttaataaaagaaagattttttttaaaaaaaaaacaaaaaattattaaaatcgaaatagtggatgttgtttcccactctcccaacaatagagggtgataaataaaacttgcatgatttaaagaagctagtaatatagtgttagtgttgtattattattattattattattattattgtgtagaaagcttatggtttaaattaatgatgtaataaaaaaaattaattaaacatttaacaaattcagaagaggatgctatttacatctgattgtctaaagctactttattatggaaatgaaaactcttattattagcctttacatatgtgtgtatatatcttactattataaaagtggcttatttgtgtaatatttatagactattttactcttacaagtttaattttattacaattcta

SEQ ID NO: 112642 - DNA, 2498 bp, Cannabis sativa
tctttaaacgtaaaaatgtaattgtttttttacaaaaaatagtaccttgtataattatcccaaaaacttaagtggcgtttagttgcaagaaatgaaaatataatgagaattgaaattataataggagttgaatggaataaaatttaaaatgcaaaaaaaaattattaaatttttttaaatcttgcattagaatagtatttcattctatttcaaaataaaatagtcagtctattaaaatggtaagaatatcattctattaaattgcaactaaataaaaaaaatagaataaaaattatttactttccattccatttcattttattacctccaactaaatgctacctaaaatttaaaataggaatgtggaatcttctcttgtggcctttatataatatttatatatatctgtatataaatttataaatatatatacatatatgttcacgttaattattatggtatacatttatttttggcaccaaaaattatgatattgatatatcatataaatataaatatatatgtgtggctattatattcttttgtggcctgattttatcttattcctttttaatttaagaaatgttaaaagatacattaagtgtgtattattatctaatatatatattactattaatataattaaatattaataatataataatttttattaaatataactaaccttcctcttttaattttttgccgacctcccttatagtatatagtataatgagaaattaccttatatactatttttttaactttttttttcttttaaatttacagtttgagtttctaaagtggttgcaatgctagttacaatataggagtttctgtacaattttctgttacaatttaagttgcagcgttagttgcaataagaatttctatgaagaattccataaaaatacaaaaaaaaattgttttaaaatataaaaattaaaaagtctctaatataattaccacacatgatttccattatagaacgaatatcaaaactttttttaaattacaacacacatataacactatatattatatataatgtagaataataaagaatattatacaatattatataatatatataacatgaagaaaaagaagattattcagtactcacaaccttgagtataaattagtagagatcatacactatatgaattgaaaaatgcattaatatcacattagtctaaaagattatttcgccttcttcaaaaaaaaaaaaaaaaagattattttgccttatctataagcacttagagaattttttaagaaatattttttctttgagagaactaaaaaaattcttatgtgaacacatgtgaaatgtacatcttgaatccaagatccaatcttttcttgattctatttcagcatgcaacaagaacatttgtagatttaaatacatccagcatcacttcaatttcccttatcgttctaattcttgtccttgtccttgttgttcttgtttttcaagatgtagcattcatcattaaggtgaccttcattctaataggtgaacaatttaagagacttgaacttagacttagatttatttgagctattattcttgttgttgtgattcctatgttgatttctattggagctatattttacctttattctctctcttatcagatcaacctcgagccactaatcctttaccatttgtaccattcttatcattagatttcctttgagtttccttagaattcaaattgctacctttacctcagattgtcaaagtctccttaccatataccatggtgtcgacaaaatgttcatcataggatcttggcaaagaactcaacataacaatcccttgatcctcttcttcaatcttaacaccaatgttattgagttcgagaatgatcttattggactcatctagatgctttctaagttcactagcttcatccattctcaaggtgtacaaacgtttcttcaagtataacttgtttgtcgaggttttcttcaaaaaagattgaagctaattcattccataaatcaatggtagtttcttcattagagacttctctgagtacttcttcttcaagactcaagagtatggcaccgtgagccttggtttgaagttttttaatcttttcttatcctctttgatgtcttgaaaatcatctggttcaacaacttctatgggtcattttgattcataggctgaaatccttttctccagtaaatttatcaatctcaaactttgttgaactcatattgattgagtcttcattgacaattaatccttgaagcatgggcttcgatatcacttcttgggtcccattcttctaccttattgagttgccaactcatcttaactcccatatgatattgtttgcgggcctaacccactacaagaaatgtcacttttgtcagcacatttttgtgctggcaaaagttggtattgcactggtaaaatagaatttacttgtgaagtgtttggaaaagggagttggcaaatcaatgttggtattagaact

SEQ ID NO: 112643 - DNA, 6771 bp, Cannabis sativa
  modified_base (37)..(48): a, c, t, g, unknown or other
aagttcagggggcacgatttaatacatgtcaaagttnnnnnnnnnnnnttactaattagcctaaaattaatttcctaaacctaaatatatctaaagtggtagagtaggttaatattttataaaacccaatactaccccttctataacaactcccgaccctctctctttctcccttctctctcgctctctgaatagacccaacgacaacaacaactcagcttctccatcagcaatgtcgtcaaaggtaagaatccttttcccactgtctattcatttaaatataccatttttttttaatgattttaaggttaaatgtatgaaattattaatatctttatttatatatagagttaaacatctgtgatttttgagtttggaatagatttagggttggaatagtcggatatgtgttttggagaagaacctgggtttttgtcctgcctcgatgcaagcccggcatattttgttgttggaaagagctaaaggttgaaggtgatagctcgatgtaggttcgatgtaggggcccgatattgtgtttaagttatatgctttttgtaaggcctgataaaaataatgtatggtttgatgtgggtccgatagtgtgtattataaattcctacaacacaaactcaacacagacaaacatgcataacaattgcatataacccagatatcaaactaagatcaaaaccagacaagtaaaaggcataattaaagcataaaaacagagaaaaattaaaagcgtgagacaaggaatttatcctggttcggatctcaatgcgagtcctactccagctctcccccaaggagtttcttcactatgaaatattgtttacacacaccaattgagagttgtcgagacacacaccaagagatataagctctcaaaccaccgtgatcgagcagcttaagacaccattagtaccatgattcttcaccttcaagagtttcatactttgactctcattcactcaattctttctctcgctctcttgaactctcttgatcttaaaataagattacaatggttttaatataggctagttatctgctcacaaaaccgagctactaaccactaggagaagtctaactaactttaacaataataactaacttcctaaccagcttgccaagaatagaaagttagttttaaaagctggttttctgtgaattactgatcacaaactccaccttaattcatagaaaattagtgaaaacataagcttcggggagtgaacctaaaagtctaaacaagtccaagattgagcaagtccatgaaataactgaacttactcactggcaacacctttgttcctgcatcagcaggattctcatctgagggtaccttctccaattcaatctctctaaattctatcttgtccctaatccaaaacattcttatatcaatgtgtttggatctttcatgatatacaaggttcttgctcaaatgtattgctgattgactatctgaaaatacagagacctttcccttcaacatgctgatttcttatagaatacctttgatccatgttgcttcttagaaagcttctgtgatggccatgaactcaacttatgtagaggataaagcaaccacatgttgtagctgtgatttctagtttatgcagcaggaattcaattggaagcaatagctagtaatcgattttctggtgtccttgttggatgcgtaatcaacatcaacaaaaccttccaacttcagtgtgttgccagttttttcaaacttcagaccatagtttgaggttatctttaggtaccttagaagccattttaatcctgtccaatgatcttcacgaggattgggcataaatctgctcaaagtgctgacagtataggtaatgtatggccttgtgcttatcattgcatacataacacttccaatggcttttgcataaggaatttcttccatctttttctttgatttgttatcttttggggattgatcaattgtgaacacaaaatgaccagctaaaggaacttgagtctcttttccatcctccatattgaacctcttaataaccttttcaatgtatgactgttgtgtaagtagcagcttcttctcttttttgtctctcttaatttcagtacctagcattttcctagcaactcccatgtatttcatctcaaactcattgtttaggacatactttagttttcttatttggttctgatcttttcccataataagcaagtcatcaaaatagatcagtaggaaagttgctacttgtgaatttagatttgtgaagtacaaacatgtgtcaaatttagatctgatgtaaccaacattagtaaccactgaatctatcttcttgtaccattgccttggagattgcttcagaccatatagcgacctttttagtagaaaaccaattctccttctttaaattccaccttgaacccttcaggctgctccatgtatatagtttcttcaagctttccatttaaaaatgttgtttttacatccatttgttgtatgtcccagtcaagttgaatagctatagcaataatcattcttattgtcttcattttaacaacttgagagaaaatttctaggtagtctactccttcaacttgtgtgaatcattttgtaactaatctggccttgtgtaccttaggtttatcatccatctttcactctaaaaatccatttgcatcctataactttctatccttctagtttcaatactactatccaggttttattcttcttcagagaagtgatttctccattcattgttgaattccatctcttggggtgtttgttgttgatagcttcttgatagttcttaggcacaacttcctttgattctttagctactgcaagggcataagcaatgatgtctgcttctccatatctggcagggggtcttatttctcttcttgtcctgtctctagccagttggtaattctcaagatcatcatattggctatcttcctcaatgtcctgaccaattccaccttgattttgtaagtctagacttgcatgctgtagtggctccacctcaatttgtactttaggttgagagatgtcacctgaaacatcagatagagtacctttctcatttcttttaaatggaaagtcattctcattaaaaataacatcaccactaatcaaaattttgttagtttcaattgatagtagtctataacccttgacaccaatttggtagccaagaaagacacatttaatggacctcttacctagcttgtcttccactgtgtgtgcatatgcaacacaaccaaaagttctcaaatgcattagaaaaggaggcttaccattccataattcttctggagttttgaggtcaatagctctactaggacttctatttattaattaaaatgaagtgtacaaagtttctccccaatattttttggacaaaccagaatcaagcagtacgcatcttactttatttagaagtgttctattcatcctttcagtaaccccattctgttgagggtttttgacaatagtcctaggccttctaatgcctatttctacacatagctcatcaaactcatcattaataaactcaagtccattatcagctcttacagattttacccttttgtcagtttggttttcaacaaatattttccaacttctaaacatattaagacaatcagtttttttgtttcaatagaaaaacccatacctttatgttataatcatctacaacaaatagaaaatattgattacaaccaggtgtcttgaccctacttgcaccccaaagatcagcatgtaggtagtccagcacctgttttgctctataattgctccttgaaaacttgatcttttgttgttttctctgcacacagatctcacagaaaggtaagtttgcaggagtatagttcaaaagtaaaccttatttagacagctccactaatccttgctcactgatgtggcccaatctagcatgccagagcttggaatcaattttgcgcttggtgactgttgtagcttgtgcagggtcattgtttttccatccagaaagtataagccatgtttcttaatggctcacatgactagtaatgaatccttagtgatccccatagttcccttaccaattttgtaatccttcatcatcaagagtgccaagagatgtcaaatttctctttaagtcaagaatgtgtctaacattcctgagagttttgatagtgccatcatagcttctgatggaaatggtgccaataccaacaacttggcacttgtgatcatttcccatcacgacatttccaccatcaatcttggagtagttaataaaccaatccttgtatggactcatgtggtaagtacaacaactgtcaagaatccattcatcgtgatctttgtgatctgaactagtacatgcatcccctgactttgaagattcatcttgagccttgattattacgaaaacatctccatctgaagtgtaatgatcatcaactgcagcatttgaatcactgcatttctcctcttcatctttgttttgcttttgctttttcttatctctaagttcctaacaatttctgatcaaatgacctatcttgccacagtgatggcattttctggtttcttttggtcttaattttgatcttgtcttcccccttggtcttgaattgttcctgaacttagactgatctctgaacctttaatttcttctccctggttgtcttcctcgaattattagggcttcatcagttttggtttcttgttttgcaaccttctgccagttgagttttgcatcccttgatctaagagtgattattacatctttaagagtgagattgtccctgctgtacattataacatttctcatttctttgaactaatctatcaaagcattcaatatgattacagaccttcatctttaattgtttctcccatgttagttagagacaaaacaatcttattaagatcatccaggttttgctccaatggaacagtagcattcatcttaaagccatagaattttcccttcaagaaaatcttggtagctgttgatattaccatatacaattgctccagtcttttccaaattcccaaggctatattctcccctataacttgtctcaaaacattatcagcaagattcattatgattgcggatcgagcttgtttcattatggtttcagcttcacccttccttattgcatctctttccttttcaaatttttcgaccctttcttctagtgcagaatccaatttctggtagatcaagattgctatcatcttctctttcgaaagactgaagtccactgatccatcaaatctctctagatcaaatctggttgatgaagaagccattgatcaacctttcttgattcttggcagcttcaatattgagtcttggatcctccaagaatcgtgctctgatatcactcttgtaaattcctacaacacaaaatcaacacacacaaacatgcataacaatttcatacaaaccagatatcaaactaagtttaaaaccagacaagtaataggcacaattaaagcataaaaacagaggaaaattaaaagcatgagacaaggaatttatcttggttcggatctcaatgtgagtcctactctagctctcccccaatgagtttcttcactatgaaatattgtttacacacaccaattgaaagatgtacaagttgagacacacacaataatatataaactctcaaaccaccttgatcgagcagcttaagacaccatcatttaaaaagtaccttttattaaaaaaagaactttttaaggggtaattgttatacctaaaattcggctacacttcagagtgtgacacgtgtcaattaagtggaatataaactactcgataaaataacgattatatcatttactgcaaaaaggaataacttattaaatacataattaatagagtgtattcataactcgctgtatagtcttaggcgagacaaggatacaagattattaatgtctgtattgacgagacatcaacctactttggaatacgcaatctcgagaacaagattcatttataagtaaagtcattcgaatcaaacacagacaatgtatagcgagacatctatctcgctataaaatagagaatattgacgaagcgaatcggttgttaaacacttagcgtatttttcacattataataactaaagtgtattaacttggaaatatgtaggacatgattgtccagtttgtgaggccatatggtcaaagagcagttcttaagttttcttagtacactggtgctcatgctattatactggaaggcatgtgattagccaagtcatcattgatcatctatagccaaggcgagatgccactacccacgtcagcgtcaaccgccttgaagataagaatgataagtggttatgcagttctcaattgttatctacacgtgtttaaatgaaatgtgatcaaatcccacgtttcatgaaacggttatgtagttcaaatttaaatgtaaataactgtcaacctatactcctataaataggggcagattctacagaaaaagagatggcaaatctttgagagaaaaagatcactaattgtaatattgtatcaaatactcagaaatatcttgaataagatagactcgtggagtatacagatctaactacaaaaccacataaaatatttggtgttattataattattatacctattaattttcctacatatatctgtgttaaatttattacgaaaaaggctcattattagttaacgaaaatctgcgttaacagttagtatagtatacatatatgtatatcggtaatatatatttttat

SEQ ID NO: 112644 - DNA, 2863 bp, Cannabis sativa
  modified_base (44)..(61): a, c, t, g, unknown or other
  modified_base (2759)..(2774): a, c, t, g, unknown or other
aaatgttatttctgatctctattaataagtaaatatgattatannnnnnnnnnnnnnnnnnagggcacaaaacccaacagtgacctcaggaaccacttaagtgataagatgaggggatgtgatcttctcgggagtgacacaaagagattggaggagcaaatagctactctaaccaagttggtcaaaaaacaaagtggagtcctcttagactcgaaagatgaagacccggaaccttgtgtaaggaggatcacgaagacgccactttcggagagctttaaaatgcctcatattgagtgtatgagggaaggactgatttgtgagcacatttggcaaagtacaagaaaatgatgcaagtagcctgagtcagtgatgatgccaagggcttatgcttttccttaaccttgaccgagtcagcagaagattggtggaaactactaactccaggatcaattgacagatggaaggattacagtcagctttccgcaaacagtttattgttgcacgtgacaaggacatggaacttagttctcttaccaatgtcaaacaacaacataatgaaagcttgaaggcttttattcaaaggatgatggaggcagctgccaagactaaggttagtgatgacatgaaactgatggccttccaatctagattagatgttggctctctgctatggggaaagatgtaaagaaagagagccaaaactttgagtgactttatggcgaaggcccaaggcatcacaaaccttgaggacgcctacatacaagcctttggagtccctccaactccaactctgactccttccacgactactcccaactttgcatcccgaattccaactgtttacggacctactacttccgctctcgcccctatgcagacccatatttttaggtatggggcgactcagactggatgtagtgtagctatggacaagcgaagactgaggtctcagagcctactgtaagccattcctggaacaaaagagggggtaaaagccacaattgcagtgattcttcaaagaagccaaggaaggagtatgacctaaagtacactgagtatacaagtctaatagacgctcaagaaaatatctacaaagcaacctgcaacatggattactatagaaaacctccacggatgtcgcacaaagggaggaatagacattatcaaaacaaagaatacgagtatcacagggagaagggtcacaccactaatgagtgtgattatttgaaagatgagattgaaactttcgtccaggcgggacacttgggactgtgggttcgaatccttatcatttatccttgacagggggttcgtgcacggacacatgatcgttctcgagtagcaaaacattgtaaatcctccacaggggtatggcgttctcaagctccaagaacatcattacctaccctctctgctttaccggccttagctggggtagcgttacttgcacggggaccgggaaccccatatcctcctggactcgctctacctccgatggacggacacgtggctacaatctcaagtggaccccatcttgctggaagtacctgaaacccacaaaaaaggtatctgagcgaggtaaaagaaggggaagtatgcgctctggtgcagtctcctgcacaatgtcctaaaacgatgaattttcccatcacctttaccgaggatgatgctaaaaacatgcgcttcccccataatgatcctctagtgatagacacacatatcgccaacaaacgagtttctagggtccttgtggaaaatggaagctcagtcaacatcctgctcaaattggtgctccaggggatagggcttacttaagcggacctactccttgtcctatccaattgcaaggcttcaacggggatgacctaatgctgatgggtaagattcaattgcctatcaccctcagaggggagataatgcaagttcttttaagcactcaacctttgtggtggtggactgcctgaccgcatacaatgcaatactagggtggccaaccctagtggactttggggcggtaatttccatcaggcatttatggatgaagttcccatgtgacaaaggatgtgctggcatggagccattttgatatgatcgagattgaccgtaacaccatctgtcatgctttgaacattcgagaagatgcgagaccattctggcagaagagaagaccgctagattcggtaagagcagaagttgtgaaggcagaggtggataagttgacagccaacgatttcctccgagaagtgttatatatggtatggcttgcaaacctttttttttttaagaaacccaatggctcatggagaatgtgtattgaccttacaaacctaaacaaggcctactctaaagattgctttctgatctcatggagaatggtagatgccacattcgggtacaagttgcttagcttcatggatgcctaccccaggtataatcaaattaaaatacatgtcgcggatgaggaacacactagcttccaaactgacaaaagtgtttattgctacaaggtgatgccatttaggcttaagaatgttggagccacatatcaaaggatggtcaaccgaatgttcaaaaactagctagggagaaacatggaggtgtatgtagacgacatgttggttaaatccaagacttatgaaggagatggccaagatcttgaggaggcctcgaagtaatcaagaagtacgggatgaggctgaatcccaagaagtgtacctttggagtttcctccgggaagttcttgttggaattattttacnnnnnnnnnnnnnnnntaacaagtatgtttgattaacatcctaatatgaattctaaaacaacgaaaataaacacatataaagtttagaaaaccttacagtgggtg

SEQ ID NO: 112645 - DNA, 4645 bp, Cannabis sativa
tcaccccaaacttaatgtgaaacttggctcttgacaagtgagcaattaagttaggacatgtgtggaaaatgcatattaggattgatgtgatatgtatgattgggttgcacagcaaaaataggctaaacggctcaaaaagtgggtgactaaggagaaaaatattcttatagggaagggtagaaaggctcaaacgtccaaaggtggcctaaatcatttctaaggacaagtctagctaggattttgcttcaagaaaatgcactaaccatttctatatcctaaaattacatatgcagcaatcatttgaaaaattcaaagtatggtgggaaaataaaagtataaactattgaggagagactaaaaagaaacatccatgatatccagcaacttaacatgtataggcaacatattaaactaggcagcaacataaatggaatgagtgaaaagccccatcatcgagcagaacactaggccacagaaaaactatcaaaactctcattatcacattaacatacacataaataacatgacacaagagacttaaaacacaaaagacaacacacaaacagtacaacacaaactaaaaacgacacctaacagaaaatataaaatagcttagggattagggaactccctctactcagagtcctcgtggggatcatctagattcaatgttgatggcgttgcccacgggttaagaatctactgaggaaactgtgggaacttgggcacaaatcgtggtgtcactctcttcaatgcgcgctccataaccgcatgtcactgctgctcataggcccacatagcttgcaaatggccacacatggcttcttgcttttgatacatttgttgttacacttgctcaaagtgagcaaagcgatctacaggaggctcagtggctaaggttgaagcgaaagcaggaattgttttaggagctcggggtgggccaaagcttataggacccctgggatgcaatgctccctcctcgacccacattgagacgcccgcctctcgacaaagagcagtgatagtggatggcagaaataattttcctttccctcgatgtgcacaatcagcaatatcttgagctacgacagcccctacatcgacaggcatccctttcttaatacagtgcaacatccacgtgtgatctcggctaacagtatagtcatgtgatgtggggcacaaggaagtttgcacgaatgtgtatagacacttcatgtccggctcgaattctgtttgcctaaaccgaaggtttcaagaatcatctaagtcccattctgactctggcttggcaagttgggcaatcatgtcgtacagtgtctcgtcgctcacttgaccttttagggaagtgtaactgcaggcgaccgatgtcaacccaaacaagttgttaattgctttggctgaaaatgacactagtacttcacgcacaataacttcagttggccattcttgagacaaaaaattagtgtagaactcttttacaacttccattaccgcacgttcttgcttcttgacaaagagctcccagtgtctcacacgaacaatttcactcaccaattcgggtaactcgttaatatcctcgacatttgccactaaccctcgttccatgtaaaattgttgattgtccactttgttgtggtacttattttcggctgtcttacaataaaattaaggaatctcatggagtgacttttgttttgctttgcgagcaaccttcttaacattcggcatttttctttggttaaagactacacagccacaacaaaaagtcccctctgcttttctctttcttttttaaacaaaaaaaatcagtccaacaccacaccaataatttttaactacaccactaattcagtacaactttacctacaacaccaaattaacttcaactcattcacataaacagtccacacatcaatcggccatggaacatttcccctgtttctattaatcacaatccaatcttatccaaacacaacacttccaacactacaccaactcaaaattcaaagcatttacactaataatcaacactccaattgaccatggcaaagataaactccctactttttctttttttttttcttttgaaaccactcacacaccaccttacacttctcaaatcaaagtaataatttcaaattcacaccaatacttttcacactaaaccaaatcgacacaaacaatcactaccttaagcagcccattgctccaagaccacaccaaaattctaatatcacaccaaaaattgcaaagccacaccaccaatttcagattatcaatgtacccaatttaaatcattcccacactaaattcactactcagcagccatagtgttatccaattaagaagaatgaaaattgtacccaattacttttgaccatcctatctatggcaacttggacttccttagcttctcactagcaaaaattgactgcaatgatggtgctgggtggaagtgatgaagatggtgattgtgactggtgaggtcgttagtggttcgaatgggaggttggtaatttgtactggctattgttgggttgggtcgaagaggatgtaatggtggctcgtgggtttcttagagttaggcggcggttcgtggctaaggttggacggtgaagaagaggttacaagttcagtggtgttggagatatgtgtacttcgaatggtctgtggtggctgaacggagatagaggctctggttgtttctgggttgagtcgacttcggaggtgcgactttggacagagatgattcgaatggatggaggttcgggttagcttgctgggtttagtacggttcgaaggtggtgatggcggctgggtgaacagagatggtaattttgaatgtaggagtcgaatatgttgctggttgctattgatttgttgagattgggttgagatggcttaggttggtaatggaggcagctagagctggttagtgtggtttgaatggatcttgctgggtggtgatggtggcgatttgtgctagggacgaaggttgttaggtcgtgagtggggatgatgatgaatgagttgggtagggtttaactattggatcaaaggattaagtgttgggcttgttggtaaatctaaggggcccagtttaacttaattcatggacccgttagactatggggtcaatactttcataagatcaatctacacaatccacccaaaaaaaggaaaacacatagtacaagggccaaatgattggtcctaataaagacgaccaccccaatgattgcatcattaaaataatttttaatctcgtgtttctttttatcaaaccaacaatcactctatttttttcaaaccccaatagcaaaaccctttctaccacctaatatgtttgctgccaaatctcattgttgatccattgctttagcatctgagcatatctttttcaccccaaacttaatttttcagcccaattttgaaaattcatcactccactgccttcttcatctgattttctgcacaaggaaaggaacactttctcaattttaccatgacatttatttataactaattatataatatatattactctttttctttttttttttcttttcttggggtgcctttatggaattttttttctctcttttttttctttttcttttgattttgattctattcttttttttttttttcaattcaatctcttttttttctttttcttttggcacctccaaattacaaatctcaagcatccttcaaggagataaaggtcttttctcgattgacctctgccacctaataaagcttcaatcgttgtccattgaccttgaattctcttcccaatttttcatcttccaccagaatagccccgaaaggatacacttccgtcaccgcaaatggacccgaccaatgggacttaagctttcccggaaatagcttcaaccttgagttaaacaacaacacttgctgatttttcactaaaactctttctttgattctaccatcacgccacttcttcatcttttccttgtacaactttgaattttcataggcaaacaatctcagctcatctatctcaaacagtcgcaattttcgtgcctctccagcaactaaaagatccaaatttaggttctttagtgcccaaattgctttgtgttccaactctacgggaagatggcatgccttcccataaactagtcaataaggagacatgccaagaggagttttaaatgttgtacggtaggcccaaagtgaatcatgtaaccgctgggacaaatctttgctgctgggattcaccactttttcaagaattcctgtgagttctctatttgaaatttttgcttgcccgttgatctgtgggtgataagctttggctattttgtgcttcacaatatacttggctaaaagggcagccaagactttgttcacaaagtgcgtcccttcatcactaatcaatgctcttggcgtcccgaatcttgtgaagacatttttatgcaaaaatttcattaccaccttagcatcattggttggactagctattgcctccacccatttggacacataatctacgaccaccattatataaaaattcccaaaagatggagggaatggccccataaagtcaatgccccaaacatcaaacaattcaacctccaaaatgcaatttagtggcatttcattccttgct

SEQ ID NO: 112646 - DNA, 3371 bp, Cannabis sativa
gggacccgatacttaattgcaccaatagcgatattgacacgtaggaggatgctagtcaccagtggtaccctttagcatttctctattattattttgtaagtaattaactatattccataataattattacacaattaattgcaccggttatctcatagtggttattaggcatgtgctgagcatttctcctatcatttctaattccaaaagttccaaaagacgaccccttaattccatacatcgtacgattaatctggtccaactgggatgtagtccaattatttattattgtctacataaaacacacttggatcgaccatcatattattagccaatgaattgatagtaaataattttacattatttttatatatataggttccaaagggtttgaacagtaataatgagagtggagtagaggtcataaacaagggaaagctatacttgtcaaagagtagctcagagtgtgtggttgaggcctatttggatcagttcgaaaaggactttggtgtgtttttgagttcacgtgcggaggaacttgtgaccaatggtcgcatggtgttgtcattcatgggccgtacgtcacccgaccccaccgccgacgaaagctgctatcaatgggagctcttagccactgctttgatggccatggtttctgaggtaattcaaatttctctctctatatatgtacatacatatgatcccaagatttcttattatttacatatatcttcataatcccatgatttcttcttcttctttttttcttaacaaagatatgcccatgataattcctacataaataagtaattttgtatatataattttgtaccttgttttgtttatattaaaataatacatatttttttgtcaggataaatattaaaataatatataaatttcatttatggtggtgcccatataattcaaacaaatatttgttgcagatatgcttgttttttatttattattttctttttaacaatgaagtgcttgtttattttttaaaatttttaatgtttctggttgaacacaatatgaaatgtttttttttaataatttgccttttgttttgatgaaatggctgttacttaaaagaatctcacattattaatgttgaactagatagtactatataagatatatactcctctcactttataaaattcgatgtatcttcacatacaatttataggatcgggcttaggctatggcagactaggccgcgtctaggcccatccagccgaaaggttaaaaagaatatttttttaaaaaaaaatatgaatattttttaataattttcaaaaatactacatattttttaaaaatttatgaatactttttaataatttttaaaaatactacatatttttttttaaaataaagtatccaataatttttattttacccaatctcaaccagccttcctccatactacatattttgtttaccacactttcaaattctaacaaattgtttacattttactataattgataaggaatatcttccatccactgatttttttttcttcaagacaacatataattattttaatttttgtaattaataccgctccaaagcatatgcatgtatttgtggacataaataaatttgaataatattaatgaaaggcgaaagaataattaagtgaatgaatttgggtgtagggtttaatagaagaggaaaaggtcgacagcttcaacgcaccgtattacgcaccatgtcctgaagagataaagaaagtggtagaaaaagaagggtctttcgttttggagaatgtggaagcttttccagtggactgggatggcggggcagtagattatgatcatcaccaatataccacggttgccgagctgtctagggccagaggccaacgagtggcaaagaccattagagctgttgttgagtcaatgctgggtgaccattttggtactcatattttggacgacttgtttaacagataccaacacatcgttgctcattatttatcacacgcttccacaaagtacatcaatttggttctttctcttaggagaaaggaaaaatcaactactgcaacaatagctgccaaccaataattatatgttaagacatttgtcaacctacctacctatatatagtagctataatatgatgatataaataagagaaatgcaagaattaatgaaccagtgtacctagtacccttctatatgttaatattgttattggtctacttaagtatcgaatcctatatagtttaatgtaataatttttaaagagtatcgctaaccaatcgcaaagcgacatgtctaaaagtgttaagcaccactgatactcaatagcaatactcatatataaataaaaggtactaagatgtattgtggactatctaatctatccttcataattaattaatggcactctcaaccacttttctactctatcctttaaaatataatcaaaaatctactttctctattaggatatgggcggcaaaaccacatggaatatacgagttatgacatttaaccccacaaacttagtttttaatggtaaaactccccaaactctacttttgttttcgatttttacacacgttagaatgttattaaatattagtgtactactaatgtgtacacaagtatacacagagcatgcttttattgaaccatctcatgttaatatttaaaaataaattacaaaaaaaattattccttttctttttttcttttctttttcttataaaacgaacgacaccttcccagaaccccacaccttattcttcttcttttcttcttcttcctcattccttcttctaccattatcaacaccaaatcccaaaaactcgagaccccacatcgccaaaactctttccctctcacgatacttcttcctcccccctctcgacctcaatatcatcattatcatcatcatcaaaaccttccatttccaagaattatactccttgcttcccctacttcttcttcttctttgacaaaaatagtttttggccattaacagattaacaaatgaaaacacgagatggatagagaaataacacaaacaatttaaaagacgtgaagagagattcttctactttgaaggaaaattgtttaggtgagttttgtgtgggaagaacaagagagaagaggttgtggaagtggtagtagtagtagtactctgaattatgagaagagaattcaattctccggcattaaccattttttctcactcaagaaaaactcccactaagatgaactaagctatcaacgagagaggattgggaaaattttcaaaacccagagatctgtccctgtccgttgtcgaccctaagaaccctgagatgtgagacccgagaacctctctctctccctccctccctccct

SEQ ID NO: 112647 - DNA, 1040 bp, Cannabis sativa
gaagcacgttctattatttttaacgatttgattaattaataaagataccgatttgagtcaaaaaaatattactatgaaaaaaaaaattgaaaaaattattacggcatgtgattttagacataaaattgactaaaacttgtaataagaagttgtaattatcactcatcaaagaaaacaaaaatctaagaactaggggttacatttagttttgacaaattaaaatcataataaaaagtcatcaataggttcaataagcatttacttaagaaatatccaaatcattaattagtgatttggttaataaatcttgatactataacagtaacttattaccatatacagttaaaatagtcaactatataattaatatacaattaaatactattataaccgtttataacatcttctcaatataaatacatgaagtaaacaaacaaaaatttacacaattaaaaaaatcatcactcttttctctcttgggtttctactgatttttttactacttcaataatggttagtaacattttttctccttctatattttttttttctcttccattaatttgttttatttaattcttaattattttgcaggaccctaaaataagctacttaataattttagtattatttggtatgattttctcatcaagatgttatggccaaaatatatacaatgtgcttgattttggagccactggaaatggcacaaatgatgattcacaagtaacataataaccattttttttatcttaattattatgcaatttattttaattaagtaattaattaataatatgtataaaattaggctgtgttaatggcttggaaaaaggcatgtggaagcacatcagggacatcagttatgaaattccaagctggaataaaataccatcttaaacctatgttatttgaaggtccttgcctccccaaaaatattataattcaggtaaatattataattgggaaatttacatgatatgctaacttttgtttttttttttataaaaatattgctaggtggtattttttactttttt

SEQ ID NO: 112648 - DNA, 4794 bp, Cannabis sativa
  modified_base (4327)..(4329): a, c, t, g, unknown or other
  modified_base (4753)..(4753): a, c, t, g, unknown or other
ctcgtgctttttgggagaaggcatatccatgaaggctttaatcttctccatgttagtttcaataccttaggagctgactatgaaacctaaaaacttcccgaaggaaactcttaatgtgaactttttgggttaagtttcatgccatacttccaaatgactatgaaggcctcctcaagattatcaccatgctctgtggatgttttggattttatgtgtatgttatctatatatacattcatgttcctcctaagttgatccttgaacatcttattgaccaaccattgatatgtggctctgaaatcttcaatttgaatggcattaccacataatagtacacacctttatccgtctggaagctggtgtgttcttgatctggttgtagccgaagtaggcatccatgaaactcaacaaatcataccctgatgtggcatctaccatttgatcaatccgtagaagggaaaaatagtcttttcagtaggccttgttgaggtctgtaaagtctatgcacatcgtccaggggtcatttggcttttagaccaaaactagatttgccaaccaagctagatacaatgactcctggaggaagccattagaagtcaacttatcaacttctgcctttacgacttccgcccccacctgatctaatgatcttctcttcttgtagatgggtattacactttcattgatgttcagggcatggaaatttgtgttaggtttaatcctcatcatgttagaatggcttcattctagcacatcttgattcttcttgaccgtagacataatcttttctctcactgttggatgtaaagtttttccaatcttgatggttttagtggggtctgtgtcacaaattataactccttccacatctttttagcggttctaccattctttctatcccaactttgggatcaagttcatcttcatactcctccctgacagcttcaacttcttcctgaatgtctatttcgagagcaaacatggaccaaacagacacattgtaacaactccttacacttctttagtcacctctgaccactccaacgcttgcattatcacaatggaacttcatgtacaagtgcttgaaggaagttatggttctaaaatagactaagactcaacatcctagtatagaattgtaagctatgggaaaattcacaaccacaaaggtgtattgcttaaaggcgcatatgttggtttcctctttcagtgtgattgggaggtggacctttcccattggaatgagtgtgtctccattgaagctttgaaattggatgggacaaggtgacaaatcaaccattattagcctaatttcctaaaatgcgaacttgaatagtatgttgattgagcttccattgtccacccggacttggaaaactcttttgttggcaatttaggcttctatgaccaaagcttcgttgtgtggaaagtgaacatgttaggtgtcatccttcgtgaatgtgatggtcatgttcattattcacggacgttgcggtggtgactacactaaggggcatatctcccccacattgtccaattccctcaaatatctcttttgcgaattccttgtgcttcttgcaatgtgtggtcctctagagattgtggctagattaccatcaactaatggtggaattaaacctggtagataggggttccttggtcccaaagtcaatactataactatagtgtgagatggcagagaaggcagggtcggaagttgtgttcgaggagctttagggaaacttactccttatagagaattcacaatcccctgatgtcttggaatgatctgcttgccatgaacaaccccttattcgagataaataactgggatctgcatccattggcctaagtgtctggctttgacaagagattcgatctcatctgtcaaatagtcacactcattagtagtgtgccctaaatcttcgtgatactcacatattttgttacagtcccttttttgcttgcctcccagaagcatccttggaggctttcggtagtggaccaagttacaggttgttttgtacacattctctccaatgtcaattaagctagggtacttagagaatttggattcatactccttccttggtttttcaaagtctcacttcaattttggttctttccactcttattctgggaatggcttacatttgattttggaacttctacttgttgctttgattgttcgggagcaaaaatacatctagtttatgccactctatacctagaaaaatgagtttgggtaggtgcttgttcggatgcagaaggtctataaatagctagagagtactgggttctagggactgagacttatgagatgaagcttggtgaagatggggaaggtgccatagccaaaaggactccaaaggattgctgataagcatcttttatattgataatatttgtgctttggacataaactcagacaaagtctcatccattttcctctacatctctccccataacaaggagccaactatgagtccaaattgaagggctacaagtttcatgtcatcgctcacctttgtctttgttgctgcctccatcattcgctgaatgaagttcttcaggttttcacctacttattgtttgacattggtgatcgatccaacttccatgtcatagtctagggcgattatatactgcttctaaaacatagattttaactctttccaactataaattgatccgggacccaaccttttccaccaatcatttgtggacttgataagcattaatgaaaaacacaagcagttagcatcatcgctcactcttgccacctacatcattttattatactttaacaggtgggttcttggatctataagaccatcatataactcgatttgcgacatcttaaagttctccaggagtggggctttcatgatcttcctgacacacggttgtgggtcctcatcttctgagtctgagagggtcccactctacttccggacaagtttagttagggcaacaattttctcctccaacctctttgtgtcactatctggtcacgttcgcgagccatatcattcaaatggttcccaatatcatttccacatggtcttgccttttccccttttgccttttcatacttaccatcgagacacctttgaaggtccacggtggaccaactgttattagagtactatcccactgtcctaattaacggaatcactggggcaatttttccttgcactgggcctaagtacttttgcacaaggccctttttgtgcaacttggcctttcggatcagaaggatgtccaagcccaatggcattagtggccttttacatttgcaagggccagttggctgcattcacactttttctaggaggtaggggagttgttttgtatgtagggtcatccatttttacctttcccttatcatttgcaggagctaaaggctttggcgttagtagggttttttctattgtcttcgttgaccacttccaccgaggcatcttcctcagatctccctttaggtctccaaacttcacttggaggtgggccattatcttttccattttttgagagacctcttcctaatgagatagattatgttgggtcttatgcaattcattagatactagacctaggtctgggtctttctcataatagtaccggtctttttaataacaattttttatgtatctatcatcgtcttccttctcgtctttgacatcggggtcttcatcttcaacttgtttgtgacgctgtcataaagccatccgactatggcctcgtaagtagcttccagttctccttgcataattggcatccgtcttaggctctttgcatgactccccggcatctgcctgtgcttataagtaagttggtactcttcgggtcccagagcaatggtaaggcttctgagtcctggatagtcattttctttgtaataaatcgcaatgcttctcccgagtcagacctttctgggccagcataatctcctgtgacctctcgcgattaaggagacttaatcaatgattatttgaattttttatttctatttattttttgccatgtgtcattcatccgaaaatacaaataacaataactaattaacataatcacaaataaatataaacatatatagataaccattaaaagtttataaaaagttataattaataggcataacgaaaattacgtgcttttcctttttatttgatgtatataaaaaataaaaaatattaatttatagaataatgaaaaaaaaaaagtaaatctaattcaactctgatatattttaaatatattgaatttaaattaaatttgagtttgtatcatatttaaatttatgggcttttttatttttacactnnnaaacagttttttttttttttcttttgtattttttacggaattctacatagaaactcttattgcaactagggctgcaacttaaatcgcaacaaaaaatcgtatagaaatctctattgcaactagcgctgcaatcactttagaaatctaaaccgtaaatttgaaaaaaaaaataatttaaaaaaacagtatatgaagtaattccccttaaatttaaccatattttattaaatttaatttttatcgtattttccaaaaaaaaaaaatcacattattaattttgatcgttaactttaataaaaatataacaaaaaaattgttaaaataaaaattttccttaaataatcacttggtatatacaaagataaagttatacaagaaaaaaaaaaaggattatttaacaaaaacataaaaacaataaaaaaantataaaaatacagtttcacgaaatttttaatatttttacga

SEQ ID NO: 112649 - DNA, 3524 bp, Cannabis sativa
  modified_base (44)..(48): a, c, t, g, unknown or other
  modified_base (1267)..(1275): a, c, t, g, unknown or other
  modified_base (1561)..(1568): a, c, t, g, unknown or other
tcttctattgataacaaataagattatattgaaatgagttttannnnnggcataaaatcccaacagtaatcttttcaatatagtgatattaataactttttttatctcatatttaaattacaaaaaaggataattaaattcctagaatatacaactcatatcttgagggaatatcccaacttcatggactattggaattgtcccgcaatccgttcaacatatttggagttgtctacacaagttggtcgtctagccctagttttagggcctggccgagatgtgacattctattggtccaccatgtatggtccgaccaaccttttccacacagctctattgttcaacttctttctccagctttgtcatacaactgcttaatacagctttgctctccaatttagctgaccaatcttccttgttaggcgaggccttttttgtcaaacagacctccttggtctgatagcctttcttggctggccaacttattctcaaggcctgcccagccacccatggttgccggagtcttgatggcttgccgaactccttttgcttattcttggttgattatcttgaaactttgacaattaatggactattcaggataaccctgtccggttcttgacacgttgtatatcacctacattctgctttgactatgtgaacaagtcacgtccaatgggtaaaaattaggataacacttagtttaaattttaaataaatattgtgaaaatttctcaatttaagttggtccaaaattaattttcaactcaaattaattatctataaatatatttaattaattttaaaaaactcaaaatatttaaaaattaaatatataatttttaaaatttctgaattaaaataaaataaaataaaaattctaaaaattttcttatttatgttggtctaaaattaattttgaaaaaaaataataattttcaacacaaatataatttttcatttaattaaatataaaaaattatccaatatttaagtattttgaattttaacgaaaattcaatttaaacattaattttttatttaattaaatacttagaacacaaactggtttacttagaaatcaattatcttaaattatttctcaaactaagtgcatatttctctaaattaattcaaaaataatctattaaaaaattaatttcaaatatttttaaaatcaattatgttgctgattaattttggttgggttaaatgaatataattatgtagcgtttggcaacactttttaatcagttttctatttttnnnnnnnnnaaagtgaaaatatttttcaaaaaacatgttttgtaaaactgtttttactttttaatattttaattgagaatcaattttttttttttttaaaaaaagacactttcaatatatttttgaacaatctttttttcttaatcaatattttagacttcgatcagacctggacccaaatccccccacgaccctggcattgaacccgtcctctgatctgaacccaaatccaaccccggacctagacccgacgtaaataaaataaaaaattaaaaataaaaataaactttacagnnnnnnnntttgttttctgtttttaaaattaaaaaacaaaagcggttatagaacgcatttttgtttttcaaaaataaaattttaaaaaaaaaaaaatttactttcattttgtgattaaaaaattagaaaataaaagtgttaccaaacggtaccttagcataatacaattatttaaacaaggcaaatgggtcttcacaataggggttattcatgtgagggagggcatggttcaatatgtcgcacccacaactattgatcccctgactctcacaaaaggcccaaaagagaggaatttaatctttattaaaatttttgttattcattgaataagtccaattctaattgtgtccaaattaaatctgtcaatgtgatccaatttaattagaaactttagtctatttaaatatccaaaaattaaatgggcttctataggcatctaagccaataagcaaaatataggcttacatatgcattgagtaatatcatgttactaggtttatgacacggatgaaagaaatgtgaaaaacacttcttacaaattattttattgatttattaataattgaccatgattaatttggataaagatccactaacaagttaatcataactatttaaattaattgaataatattttttaaaaaaaaataaatttaaattaataaacaaagaaacatgtaacaattgtgaattgagatatttaataattacatgattaaaattagagttgttaaaacaaccaaaaatatctttttcaaaatttcaaatttgaattataattaaaaaatttaggttttattagtattattttataaaattaaattaaatatctaataagataaatgatatgatataactaaatcagatattttctatattattttctaatcttataattttataaaattaaaataatcaaataataaattttaaaatagatatagttaagtgttgatgctaaaaaatatccaacatcagcttgctagattggcgagatgattcataagtttaaataaataatttagataggcacacaaaatttatagtagtttacccctatatcgcgatagtaatggggctacgtctacttcgagtttttatttctcaggagatggtaattacaacaatggactaagtatcaaaaactccaaactctagagagagaaaggctagagagatgctttgaccatgtgggtagttttctgaatgtgtaaaatgagataagggagttcttattttataggtgaaggaggccaacaaaaataagataaaaaatacaaataagttgttttctactgttgatgatgatctaacggtgaaaattagcttctagtggtgatgtccaatttttggtccctggcaggtcttgttgcgggttacttggagcttatttttatagctcccttagcagtaaatttttttaatgatatcttcagaactacgactgcggtgtgagacatgacttgatagatcatttaaatagcttcaaaatgcaagttgaattgcatgagttatgtccattttactgaagacaacttaggtctcaacccctaggttgacatctaatgtcaacctagacattgtataagtgaaaaacatccaagggatgtccttagagattcctaagtaatagattgacatcacatagtcgatttactggttttggcaaagctggtcactagttcttggagatgttgttattttgcaaacacgaaagactcgaaatttttaatttttaggtgagtcaatttgccaaaaaattgaatttgtgaattgcattattctgacttcatggatcatttaacttgtgaaaaaatagatggacggtcaaagcggcatcagattcagataagtagacctaacgaactaggccatttgttgacctgggcactaagcctgtaaagcccgcttagttaatttggaaattagcagttgtttataattaattatgaaattatttatag

SEQ ID NO: 112650 - DNA, 3204 bp, Cannabis sativa
atatatatatatatactacctttcagtttttttaatatattattgcacataaaaacgatatgctattgtgcaaaataattatgccaaatacttaattattcaaggttataattataattttatcatccaatttttaactgaatggacattttgttaattttttaaaaaaagggacatttattaacttaattattagatttagggtcattttgcatcgtggtccaaattagattgtatatccatttaactttgtttgttttaatttttatttttatttttatattccttaaaatatagttacttttatagatgatgtcttcattatacttcttaggttaatataaattatttgctagacttaagtagagagtggaggtatattggacaacccactcataaaagtgggtacattttaatggaatataatatgaatgtatttttgattaatggatacaaaaaagaagtattcctcaacttagaagtgaaaaatatcaatgtatttaaaaacaattaaaaaataacaacaatataatacatcaataagaaaataaaaaattatctatttaagacccacaagtacatggagtaatcctcctgaaatccaggagtactggttctttacttttggatttcctttaaagaagcatcctactctcctgcttgattttaatcgaactggtaagtgtcatccctccgctttccattggccttatctcagggttttgaaagcatctaacccaaaattctctttatcttcgtgtcatagattttatttctcgtccctgatcaactcatttcctggaggaacatcagtcaatatactttaacttgcctttggcatagctaaaagtcggggatttggtgacaacgaagaagttgcaggaagtcaacttgatttctcgccacaagaacatcgactctcccaagttttgagggatcacctccaagcctgaaagggtgcgagaagctatttttgtgataatcacggatgaggtggcaaagattgttgagaatgacaaacgctgaatggaggagtagcaggaagatagggagattatgaacgaagccgcataactcgagatgtggtttggtgtgatcttccccaatgagggggctgacttagacaagtggaacaatgtcatggatcaagaaatagatttcatccgcaccaacaaaatctaggagtatgtaatcctacctgaaggggttaaatctatagggtgtaaatggatttacaagaagaagaaaaatattaacggaagattgagacttataaagcaaggctcgtaggcaaatgctacacacaacgagaaggcatcgataatgatgaaaccttctctcatgcggctatgcttaattccattcacatttgattatgagatatgacagatgaatgccaagactgtttttctaaatggatctcttgatgaaactatttatataaaccaaccctaagggtatgtgctagatggggaagatcaaaatgttcgcgaattgctcaaatctatttatggattaaagcaggtctttagatcttggaatatcacttttaatgaaacaattaaatcaagaaaaatatggatgaagcctatgtatacaaatacattaaaggtaatgtagtggtattcctcgttctatatgttgatgatattctacttattagaaacaatgtagaaatgttgtcagacgtgaagaagtggttaggaaaaaagtttcaaatgaaagatttaggataagtgagctatgttctcaacatctatatctatagagatagaaagaggagaatattatcactttctcaaacaacttatatcgataaaatgctagaaatattctcaatagagaattctaagaaatgatagttactgtctaaatatagaatttctttatgcaaggatcaatattcaaagactctgcatgagatggaagacacgagaaagtatctgtatgcattagctattgcaagcttaatgtatgcagtgttgtgtacaagacttgacatatgctatgcagtaggaattgttagctgttattaatcaaatccaggtttgaaacactggatagctgtgaagcacatctcaagtatcttcaaagtatgagagatcgcatgcctgtctattttattagagagttaaatcctactggatatactgattcttattttcaattagacaaagatagtcataaatcaacatcgggatcagtatcactcttggtggtagagttgtagtttggagaagcgttaagcaaactagtattacagattcaaccatggaaattgaatatatagtagcttgtgaggcagctaaagatgcaatttagttgaaaaagttctacactgacttggaagtagctccagaggtagaaaaaccactggtactttattttgacaatagtggagcggtggccaactccaagaaactaagaaaccacaagataggcaagcacattgagaggaagtaatatctactcagagatataatacaaagaggtgatgtgacagtttgaagattgcgtcgaaacataacctagcagatccattcacaaaaactctaacagcaaaatcttttatgggtcatgtaatgaataagggactaaggaagatgcttaactttcttttagggaaagtgggagattgcaagggtttatgacctgaaatgcctgtaaagacatttgttattctaatttttacacagggtgacatgggattcatctgggatgacacgtggataacatttaagacctggatgggtagtacggtcctcggtatgttatccatagtgatttaactatgctgaataatttatttgaagattaagttggaacattcaaacaaggtaaataggatggttcgaccaactttgattcttccacttgatcgcatacaccgaccagggtcaatgcggctgaacgaaagctttagaattacattccttctgtcaattgaatccaatttcagtggaatttccccacattattgttgtaaaatagaaaagtaatcaagtttccccttttatttcttaattgttttgagaaatcaaattgatgtaatttttttcctataaataatggagccattcaattgttcagggataaaagatcatattttataggagagctcttatgttgtaaaataattgtaagcttttcttgagaattcttaagaaactcacttggcctagctccttgtgatcttattaattc

SEQ ID NO: 112651 - DNA, 3460 bp, Cannabis sativa
tacctttttagatcagttcaggccactataataagataaacaagtactgcttaatccaatctaatatggccaattcactgttcaaaattgtccaggtcttgggtggtatatatgctgggaatgttcccggtatcacagcacaacatctagaatgggtaacttttccttttctcgacgttctgctctctttaccccgtcaaaatattagtacttcataaaattctagatactaattgacaaaaattcctcaggttcttttttctttctttgattaggtattctttatggaagttgttattgacttatatgctcaacaatctttttctttggaaccgaccttatgtttttctattctacgtttcctttttcaaacgattcactctgttgctttatctaatccaggttcatgaaaagacacttcaggtgcttgaggaaattgcattctagatgtattatgatggtaggttccacatcatccttattccttaattacaatataattgcatcttaagttggaaatggaaattgtgtaggtctagttttgtcaataccttaatctaagttagtacactattacaggatgccataaaagcagttgttcagtcttaaatagacctttcacaaaagaattaaacatagtgtttactctttcattgccattttttgtgaatcaaagatttatttttagtaaacactaaatcaaatcttcaatgattataggaatcaatcgccaatatcctaccggatcacactttagttagggatcagctgaagcaacaggatgaagattcagagtacttgtttaaacaatagcaaaacaccatgtgaatgaagggtccccacaaaaacaaggtatttctattagtaagtgaggtagggccttgtgatgatttgaatgttgtgagtagtagaagcatacacagcaaggatttgttatacattccttaattatataatctacagccttttccacccccatgacctcttcttcatctcattccataattcccttttgtttaaatcgaaaaacaagaaaatgtgcgaaaccttccaaccgacttggatttggcactaagcaatctcttcttatggcctctctaaccccacattttggcctagaaaatatatgcctaccccccttatgatctcttctccttaagataaaaatttcttttcagaaagggagaaagaaataaaaaagagggcatttggaaaagttttgagttgcccattagcagtcttttcaaacacaatagtgcctcacaaccatagaagatatggaaatgatgacccacatgtgtctaaaatgatattattcaagtctcacttttgtcaagggatcaaatggttttttgggtcactgatttatcatcttatgggtgtttttattaatttattaagtgtaatgattttggtaaaaggtgatatcaaagtatggtctgtaatgatgaatgtgttgatacccttcacatgagaaaattaaaaaaaaaagatgatttttttttcacatataaacgtaatggttagttcttagttgtgttatgttcattcacatgcctcatttacttgagttccaccattccaacaacttacccatgaagaggaaaaggacatttattaaatattagtgggttccaataatttcaccaatttttttttattttgtttggattttgaatacactccaaaattttgtcctattttaataatttttatttcatataaaatcttattttttttggaataaagaaatatttcacatgccttaagaaacattttattttattataaaaaaaatattttattttatataaaatatatattttttaatttatactagtttttgttttttttcttccttctcatattcttaaaaaagtatatttataaaataaaaataaacatattttaaatattatgacaaaaaaattaagataaaattatgtaaaatttattaggaaaaaaattatacatgattttaaaataaaattaaaattaatacaaaatatttttttaaaaaaaacattaagagtgattttttaaaattaagttaagtttttttttatttataaatattattatggttttataattgtgtgaattccaaataattttttttttttaaaaaaaacaaataaaaaagggaagggcataatgtaaagcttgattaagaaagttgaaagtaaaaaaattggaaagagaaaataacttcaactacaaaatctaaagagttggaagtattatttgactgactggagacaaagacacttgaattacataaaaggtttaagatgctttttttttccctcttgacttggattgatctaattaatggtgggtcacataatattctcatctctatctgattttagtaaaattgatcttaatttaataaagaataattgttaaattagtaaaatcaacttaatataatctaatctatgtagctctatttttgtcagtgaaaggtacgagtaaataaatgccataggtgaaaagaactgaattgttttaccaaatcttttaatcacatttatttctcttataggcattaaatcactacatttattgacacccatgtctaccaaatgcacatactttaatgggttttttttttgtttgaaaaaaaaaaagaagataaaatttgagtgaaactatagtaaatagtaacaataaaccaatgaaggcatgagctgtctctgaaaacatgaaagaattgttgtaattattggtgtaaaaagatgatttaagtttataaattgtatatcaaaagattgatcttaaatctttcttacaattacgtacaagctaatcgtagagttaaatcccactttacttacacgaaattttatttgagggcaaagaatataataataaacaaaattttaccaacatttggtgttacataattagtaagcttattatattatataatatatgatatattcatacatagtatatattttgtaggaagacttcaaaaacaaccattctataatatatagaactttttaaaaaggcacgcaagcttttatacactagttagtggatctttgctttttttttttttttttgaaacaaaacctagctgaattgaccattttgcccttttaaaataatggactttctttttttttattggtagattagattgatcttctagaactcatgaatacattattaacggtaaagaatgatttaaaattttaaatgctcttaacttatgaagctctcgtaaacatttatattcaaactaagtacttaaacaattcaaagtaagtgagattattattatattattataatataaattaaaagttgagtattttaagttcggattactttagattctttgtaaatctttaaactctaataataattttttaaactaacttataattatatatatttttttagggtaaataccattttagaccctgtgttttgcaaaaattacaaa

SEQ ID NO: 112652 - DNA, 5416 bp, Cannabis sativa
  modified_base (2435)..(2437): a, c, t, g, unknown or other
gaacaacagagttagttattaacattatgtatagtgtaaataaaactttactatttcattattattatggaatctattattattatttttgtaaagagaaaaattgcgaaaaggaaaaagagtgattacacttttttttttttttttgaaacaaaaaagagtgattacaaaggctaagaagaggggccattccactaaaatagaaagcaatgaagaaatgggctagctagtatagtaatagtagtagattttccaacgacaccaaggtgagtgcttgtgctcctacaaaaatcactctatcttttataaagtagacccagattgtggtggaacccactttccttattattcatataatgtttttttgtgtattgtattgttatttatttaataattgtattgtagaaacatttttcctttttctattaaggatggacgaccttgtttggagtcttttgattccctctctctctgtctctttcaacctgtttttatttctttcatttaattttatatataaatataaagtttttatttacatagatatgtatatgtgtatgtgtatggttttagttacaggacaaggcaattttgatcattgtcaagcataacaaacatatatgttatgacaaaaaactttatttattcatctacacttttctctctttctcccaacttgagccccttatgatcaatatgtacaatggctataaaagggatgaatctagtacgagatgaatgattttgacttgtttacaaaaaatacatctttttccaattttatttccctctcaatagcgatttgttgatgtttttgttcctctctcatctcatctgatgatgaagaaatctctacatggcaccaaaattccttccatactctttttggttttttttttataccttatttgataaattttatttgggatacatgatcagatattacatgttgatataggagctgagtatttcttgttttagtgaaagcatggttagtagtagaaagaagtgatggagtttctgtttatagatttgttaataataaaattggcaggcttatcattatttgataattgaaaatgaatgcaatatgatttataaaaaagttgaagataatgagaagataatattgatgggatggagagagaatgagagagaaaatttcacttctagaaaggcaattcttttttagcaaggttgcaattgggatgaagaaaataatggagtaccacatgagagagaggttcctaaagtttcactattgagataaatgccacttaataaagaaagaagtaataattatattggaagtttatgagaaattgtctccaattccactcttgatgtcccacaacacatataattaatttgaacaataattgacaattttcaatcaaccattaaaattaaagaaagaccctataaaaataatcaagtaatctaatttaaattatttaaattatatcataatatgaaaacgaataaaatttaacattgcaccactccttatatatatattttgaaggggatacatatttataaattatattataaaatttttgcaatcatatatttactgagctaaaatgtgaattggctcaccatcttatattcttagagctaagatgagaattgaattattaggatgaagagtgcgttgcttttggggagcaaatatggatgggcccttttctcttccaccaaacaaatatcaaagggatccaagaaaataaattttaatcaaaagaaaaatgaaaaaaaaaaaaaattatacaatcttattaatttcttcttgaccacaaattaatatcaatataagctaaaagaaaagtaaaaaaataaataaataactattaaatacaccgaacaaaagggaagaatatgaaaaaggaaaaagaaagtgataatattttagaattaattattataataaaataaaaataattattataataaataatgataataagaatttatattttggttaattgtagtattgtataactcttcagttcagatactacatatatatataatgtttggtttctcaccaaatacaaggcctttctttctctctttctatccttctctctacagaagctataaggtagcttctctcttactaaatatagttactctctctctctctctggagtggagacttgagtagattactcattgctgccctctaagcaatggtggaaattgggtcttttaaaaggtgtgatttttagctgaaaatctgatcgtattcaatgatgggtgtgggaaatctggactagggcatgagtatattaaagggattttgtttggacacctctatcacagctccgccattgtcgatcggttagttctttatttgaatgcactgtcaagctttcttatctcattttcttcttcttcttcttcttctttcatctattattattattatnnntattattattattattttttaaatctatatttttgtgctattgattttataaagacttctttttgggtcgagcctctcttcttactagtaatggcgttttgctcgtttttccgctacccattttgtgaattgactttgtgttattattgttatttttattttcaattgcttagttttagtataacctctcccctgttttcttaccaacttcatttgctcttgcttttgcttctagatttgtgtattattgattggaatgttcagttttcctgtggatatgcatgtacacatatattcatctgaagtttttgtagaatagtatccttttgcggttttggagcttaaagaagtgtgattgttcctaaagaaatgttagttcttctaaaattgcattcgattttataataatttcaatttgcatttacttcatttgaaaaagttattgatttaaagagcatggtttgctatatatggaagataaagaccttgttttgagctgagaggtacactatgagcatgatgccatgagtgttgtaagttctttggggagtgtgaattatatctttttggaaacaatctcaaatacaaatgaaccagaaggaatgctgaaagaaaaacactaagagaaagagattaacaagtattgtttcatttttgttagaagctatttttgcttggacagtctatgtggattttatatcttatatatatatatatatatgcatacatattgttgtgtttgaaattttggatcttcccccttttggtttgtgaagcaaggcccatatactaagcaaaaagtaaatcacaaggctgcatcctatcccagacatgctctctgaagtggtcgtctgaaggttgtgctagttctttatgagaagaggtagcgtaaagtttgttgtagaagcatctttatcacaattttaattgtagtgttcagtatggattaatgattttatcagtcattgtgagaataaatttgatatggtgttggaatagatgtcaacttagcatatcatttgttagtgaatttatgatattctatgttcttcagtttaaagtttaaacaccattttgaaatatttaataatataaagatagatgtgatttatataatatgtacatttataaatatatacttttggtagctgggacttatgatatatgtatatgcagattcattttttgataaatgttgaatctaaatcacacaggagagctgaatgatggacaggatcagattagatttaagatttcatccctctggatcaactcaatcagaggaatctgctcttgatttggatcgcaattactgcggtcatcctaatttgccctcatccagtcctcctctacagccttttgcttcagctggtcagcattctgagagtaatgccgcctacttctcatggccaacttcaagtcgattaattgatgcagcagaagatagggccaattattttggaaacttgcagaaaggtgttctgcctgagacttttggtttgccaaaagggcagcaagctaccaccttgctagagttgatgactattagagcatttcatagcaagattttgcgtcggtttagtcttggcacagcaattgggtttcgaattcgaaggggtgttctaacagatattcctgccattcttgtctttgttgctcgtaaagttcacaggcaatggctcaaccatttacactgcctgcctgctgcccttgaggtattcttattgttattatgtacctgccttaacaaattcactcagtttcctttaatgtgtcaactattacttctaattttgttattcactttaaacataattgtacatgccccaatcatcaccaactacaactaaatctagacggacaactagtttatgctgacagcttaaatgtcataaataaatagcccttttttcttttcaaatggtttttaacatgtatacttatttcagtcctttgtaatgttgcaagtttctctttcgtttctgaaatgaaatgcaatttctataattgggccaggggccaggaggtgtatggtgtgatgttgatgttgtagagttttcctattatggtgcacctgctgcaacacctaaggaacaactatatacagagcttgtagatggattgaggggaagtgatccttgcattggttctggttcccaggtattccttctcttcttctccttgacaaaaattccggtttacatcttatgtatttaggttagtattgttggtggaacagtcttagtattttgatgggaattgtgtttcattttaaatcataatgtatgggctttcaatctgtacccaaccttatatttttttgtcacacataatactattatggtttaatgaaaatgcttaatgatgagagttatgcaagatatatgaacgttttgaaaagtgcttaatgaaacttgcctgtaaagagtttccattgcctttgccttggcagttggcagtaaagaattgtattataattgaaagaaatttttgtttgatcaataaaacagagtgtttttgcttagagttcagctttttgagtcccctctcttttgtatacaactatgcaccaaattgtgaactctttgctgacataactaggactgctgtggtaacctgtaaaattataatttctgtttttctattgaattttgtgaggggatgtagtcaaagaaagagtacatttgggaataatgtttatttttgatcttgtttgtccatggatagaaagaatgaagacctattttattttatggagattgtttgagaaaagaagagttctttgaggcaacatcaaactttgaggatgttgtgggtttatgccttgctgatctctattactttcaaggctgatttgttttaattatgtgctaaattaaaagaattgggtgttttttatttttggctaattaggatttttgcctctcgaactttgacatgtaccaaatcatgtctcctgaaattttaaggtcgttaaaa

SEQ ID NO: 112653 - DNA, 5078 bp, Cannabis sativa
  modified_base (42)..(45): a, c, t, g, unknown or other
taacattttgttgtgactaaattttgttgtgactaaaagtcnnnnttagtcacaaaaaaattatgttattaactaaaaaattgtcactaaaagtaactttttttatagtgtatttttaagagtgttactaggcatgaattaaagagataaagtagtcacgcacccattattctaatcatgaacaaagaatattaagtagccatcatcttcatcttctcgagagttgatgagttcatgaactttgggaacaaatatagcctcagatccaaatgtaccatgtccaagatcatagatacctttaatatttccaccaacctcatcaagactacatattctgtgatcagtactctgatgatcaggttcaacattattcagatcaaacttgacaattgcggtgacttttccaagacggtctagtctattcccatacacataacgttgtttcctgtgaaaaactcacacatgcatgcaaagatgtgacatattgttattgttggaaaaaataaaaaatttcaagtgcagcgaaataatgaagaaacgaaataaatcaatttactcactttggtaaaactaccaaacccacaaagagagatatatttcactaatcacttcaaaattatatacacactctatctcaatttctctacccaaatcccactatatcctttgtttcttcctcagcgcccaggttgataacctaacgctcaggttgacatcaagcttcgaggttgacattatgacgtcaacctggatgctgagtaagtgaaaaaaatatcctagacttgtattttttgaaggttatgttaacatcacttagtcaaattctttgttatagtaaagttgttcatcagttctcgaaaatatcgtgtttttggtgaaattgggtagactcgaaacttctcaattttgccgatatcccaccttgttgaaagggtgaaatataaaagtgggaattcgacatgtcacaagtcataactttcgtttactacgaaaaaatagtcggatggtcgagatggaatcatattttgataagcacaatccagcgcactaggtcacacgtcaacttaggcgttgggtgcttcccggggctcgttttgacacttctaacccattcgagattgtgaacgaggtctcctaccctatttttgacaaaaattaagaaaaatgctcagagcaaaatttgcgtttgaggagtggaaacatgcaaactataggttgcatgtcaacctgggtgcagggcccaatgtccctgttctaaccccctattaattttgtttgctccttgagatcacttatatcttcattatttcgtactaggcccaacacctaggacaacttgggtttcaagtcgatccgtttctttcccgaaagcacttgttttctcattttggatggagaaaaataaaatgctcgagatactttttcaatattgtgaattgaagcgcactaggttgacaatatgtcaaccccagattgacaatatgtcaaactaggcgctgggtgccctaggcacttggtgccacgggtgctcaaaaataaaagtgatctaattttgattatgatgcctaaaatatatttgtgataggtcttattcatgtcgaagtataaattttgagccatttacactaagacagatccaaaaatcgaaaccctagttgggatgtcaacttgggcattggttgaaaaccttaggcgcctgggttgacttctaggatgctttttcgtctcttttcagtttccaagtcttggacttaattcctttagtcttcttgattcaaaatactgaaagatgctgagttggaaacaacttggcaggatccaaacatccattccggaatcaacctggacgcagggctaaggaacccttctaggtcgactgctatgatcactcgggactactcaactccaggatattttctttcttaccacgtgtcaaacagtaatgtccacatcaccatagtcagttttcagataaataataaaagcttatgttaccactaaaaagtttatgcctatatacatacctgccagtgtagctctcattcaccttaggaaaatctacatgtgatggtgaaagtcttttttgagaagatacacctgttttcatgttgaatctcatctcatacctaaacaattattagagaaaataataaatatcactatagataaaaaaaaattggtgacaacatactgtaagggtattttctgtttttgttggttcactgagaaattataaattattttttatgatagtgtacattatagttatactaagcatatcttgcttgttttcaagaatttttatagtgaagaaaataagattcaaacattcaactttactcgggcaatagactacaacatacaacgtcatattaacaaaattagaatataataacttctcaaagtaggaaaataaaaagtgacaatatatataaacttaattacttttgcccataaaatgtgaaaaaattcttacaaagaagcgtttatgttaagcttttgtttgatatccccaccgtacatgctcaaatcaagattctcaatacgacaagtgatcataacaacttcatcatcttcttcctcccaagcatttgctatatatatataattaatattacacaacaaatacaaaattagaataaacaccaacataggcatatgacaatattggttaagaaattaataattaggaaacagaaaaatgagcaccaatatgggatatgaagcaatttggaagctcaaaccatttgatcaaaagctcatcctttgcataccgcggaagcacaccgaatcgagcctttttggtggcgtcaaatgaaattataaaattctttcccttcatcatttcctatgtgcacaatttattaagtacgagcacaaacatgatcatgatcagtgacagagttaagtttatcaccgaaatactatatttcttttgataattttgtattttacttcttaaaaatttgacggggagcttgagtcgctctggagctaatgtggctttgtcactaagcctcacatatgatgacacataaggaaaagttgtgttcgatgttaattttttttataaatatttggatgttttatgtgacaagaatataactataagaattatggagtttcatctcaaaattaattaaaatattaatgatggagcgtctatccatacgtacctctggcctgaaaattaaaggaagatccatgaaaatggcataattttgagtaatggcaaagtcatgcatcatgatgggatttggtattgttataggtattggatcatgcatgaaaccatctttggaaattactctataagtgatatatggatgagtaataagtgaaaaaccaaatgtaaacatttctcctgcaatttttaaaacattgtaatgataagtaatgatgattaggtatataaatatacatgaaaaagatatgagtaataaaatataagctcttaacatgcatgttgataatcattgattattgatttaattcttttgtgtaatttatgtataattttatgttttgtgtttcctttctactacttttatctcattttttaataattaatattaattaatttattgtaatcttgatcattagatcttaataatttatgttaaaaaaaaaacaatccctatatcactataaaaagaatattcttttacaaatttttagttataactttttgtgactaattaaatgtcaaatttaataacaataaaaaattattttaaatataagttgtcactaatttaataatataatcacaacatgttatgactaatatttttaacctcgtttattttattttattattatatttttttagtgtatataaatacctgtaaatggatcgatctttggatgagctgtgaatgaatgtgtcaatctcttgtgataatcaaactgcccaagtgtttgaaaatctccatcttccaacactttaatgatatctacaaacaaaaatggttaaacatgattaagtcaattaattaattataaataaaagatgttcttaattaattaagcataatattaagtgcaagaaattaacttaggtaaaaaaagtttacatggtttgtctgcttctgacagtgctaaaagttttccatgatgatatataagagctgtattagctatacattatgaaaaatatatagttaatcactatttattagtaactaaaacaaattctatgaatactagtctttgttagattgagggttataaatatattgggattattagaaaaaaaaaaatatatatatatatatatagttgtattgaattaaaatatttctacagttacataaaatacggtcttttgatgtatttttatgttacactctttttattttgtattgattttttgttatacttttatgtaaattttttttgttattttttcatatttttatagaatatcctaaaaaaaagctttaaatataaaagtgtaaattttttttaccaaaaataaccgtaattttccctataatatattgggatcctaccttttggacaacaagatttgattggattatttgggattagactaaattattgaattatgatggttttatctatactaaattatttgagtgtgttattaatatttaatattatttgttaattattattattatattacaatatactactatatattaaattcagtggaattataatgagataacatatccaacatgagtggggtaaagacacaataatattaaacagctatcttattatgtttattttatttatttatttattataataaataatttacgggataaataattaagtttaactctcaattatagataaatacttaagtttaatttttgacaataataatgtctaagttatatttttagaattttcggaagtacctaatcgttaagtgtcaagtaaataattaaataacagtctctaattgatccatgttatttaatgtttatttttttatttaaatatactaataaaaaattaatatcacgcagataatgcgacagttagtagtcccgtggtccataaggggaaatacgggtaagctgtgcaatcccacatcgcct

SEQ ID NO: 112654 - DNA, 4910 bp, Cannabis sativa
gtaaaataatttccaacacaatgtcccttgcctattgcctgtaggggaaaagtaaggggtgagccaaaagcccagtaagaaaatacgttaacacacattaaaattcaatataccatacatgtcttaattcacaataatacaactatataaaataccatcatattcttaatgtattaagtatttcaatatcatactttaactgataacgataagtaaataattctattcatggaaaattatattacatgcatccatgctaatccaaaaccataacatcatacgtagagatcataactcttatagcatactcatagaataatcataatactatgaaataaccatatcccaatcatattataccatttatcatattatggacactacatacataacccgggcctattggccctgcaatatcctgggcacatttagccctaccactgctatgaaataaggtatctctacattcaatatcattgtcaccgtatcataccttaccttaaaaatgtcacacacgaatcagacaaatgcagggtagggtatctctatattcaacgaccttactccgtatcatatcctaccatggcccctcatttgttcctgagacattagcaaacaacatacaacatacaacatatactaatcataccaaccataatatacatagattcacaaactcatattttatccataccacaaattctcagtaccatatacacattaataataatacatcacaaataatattccaatacacaaatagtttaaattatgcagttcaaaatatccaaaactatctaatttccttacctcaaattccactgcttaagacttgttatcctgtcactactccctataataagacataagtcaagacactgacattaaaatttgtactgttacagtacaacagaaagaatattatttttttaccatcaactatacaaattcagtgaaagttaccttcataaatactataaacaattcaattaactttctaatgatatgcagatcattgaaaatagattaaaactgagggagttatcatagttttagtgaaacaacttttgagaaggaatatggagtaacaaattacatgactcaggaaaaatacaagcttttgacatagaaatatacagagctagagaataatattttcatgaaagttttaggaaatttaatttcctttccaatgacaccaaattttttaaaattagaattatattcagagatattgaagttttaccaaaacagtttataaagcataacattcaagatacgaattacatgatacagaaaaaaattaacttttcgacataatatgactccgaattaacaaaaggtttcttcataaaacttatgaaaaatctaatatgatttctaaagataccaagatctctggaattggatcagtattcaaagaaatattctaattttatggagaaaacttttataggagatataagaaaatgatctatgactaacagaatagatattctagttttgacaaataaaaattctgcatcagtaaaatagttcttcataaaaattatgaaggattcaataagctttctataggcaccaggatcgcatgcattggataaatattgagaaagatatgactattatactacgacaataatttttagaaaaaataaaaaaagagatttcaataatttaaccgaaaatttgacaccaaaaagtggaagaactcatcttacctcttgatgactcttattaataagatgctagagcttgaatctcaattcttataacggtgatgaagaactcaatcctatgttgatgagaaacatgagtgatgtttgttgaagagaacgaaacaagaagaaaacaataaatttttgatagatagcgagatgaatagcttttagggtataaaatttttatgagtgtcttctctaagaattgtgcttcaggctgaaaaaaaagagattgagattgagtttttattttcttacactactacaaaaagggctttttgcttcggtttgtaagtgacatataaagtatttgctttgatcggtgtaaccgacattataatcatagacggaaataataattttttttcctttggctataaactgacactaattggttttttttgcttcagttatgaactgaagcacaaaaaagtatttttgcttcgttcataaccgaagcaaaaaccagtgcatcgacgctaattgttttttttttgcttcggttatgaactaaagcaaaaacatctaataaaatataaaaaaaaatctgaaaccaaataatttcgaccaaaataaatacaatatcacatcaataatttaacataccaacaagaacgtctctttttaatcttataatttttttgacaaaaaaagaatcataaatttaaaatatatacatacacacatatatatacataattatttatacatattatcaaaattaaagtatcaacaacaaaacacacttaagtaattataaaagatcaaagtttgaaccaaccataaataatattttatattgtccccctgaaccacatagtaaataagtatcagcaagagttatattaaatatgtataatttctcattagtttgtaatctatctaacactatttaccaaagtacaaacttgtgttttagtagagaaagtcaacaccaaacttcttgctgcaaagtgactttggtttggacctcttataactttttcaatcataggaagaatcctatatcatgttatttataattagttaacacacattattccaataaaaatgacctaatttttctcaagagaaagattaattaactatactataaaaatgacagatattataacatagaagaatcaagtatatatgtcttatattagtagcataattcatttaacttttttttagaggatgtgaggacattggtgtggaggctgcctttctcgtacaacaacaagcataattagtttatgatatttaatttaatgaagctgtgagtgtaacagctgactgacaacaatttccaagtataaaaaaaggcattagcaaaaagtaaatatcaaatgttgttacatacaacaacaaaaagttggtgaaattttttccctactctggaacgttttagggccctcttctctggttcatccagtttctcttccctccttgcaactcccaaccgtcgttttctctctctcctccaactctcacttcttaattaatgctatttcctttaatatcttctattaatcattacaagtttttaatgcagcccccaatttctccttaccgagactctcatttattgcatctccagaaatcccatggctctccttctccccctcatcccttcatgcattcaattccaaacgccattctcaagtggaggcgaatcattgctctgatgctgggcagaagaggatctaggcctccatcagctaggatggacttagcatccccccgtcttccacgctctgtttattccaggtatttttcttttttccttttctatttaaggatgtgtagtttgagttcagatcatcccttactggtttttctctcttcacctaccctctattcttcaccatttttgttaataaccatgtctactctccctgattcccactctctttaactcactgacgaagaaccccttgttcacgattttgaccatgtgtccattcacccagaaccccaatctcactccttctgtttggttgttaagattttatccccaaacctttgaaagttgattggattcagaaagccatgaaagaagattgggttgctcgctgccctttttccttttctgaataccactctggcctttttctagttcaatttggttgtgagggtgaccgtcgtagagtcatggaaggtcaaccatggcatttcgatcgatccctcatgatttttgccattcctgatgccttcgatactatcatccctacccaactttgctatattcctctctgggtccaggttcattatgtctcatttggctctcgctcctatggcctggctcaatttgttgctaacactattggcgatcttattgaggtgcatcttgcctctctttgtgatgttgtcactccttctatgcgtgttcgtgtccttctcgacactaccaaacctttacaccgaggcttgaatgtccatttaagaaagctatccctcaccaagtggctcaaacttctatacgagggtattcataattattgctaccattgtggtaagttggatcacacttttaataagtgtgaaaagttcctccatcactgtgatcatcatccctttcctcctagccttagctacaaagacaccctacgtgcccctgccaagtccatctacaaaaaaagcatctttgaactttccacttatatccctttcgaggaacaaccctctctctccaatactggccatgctagcctccagggaaacgtggaccatttcactgtcctaactatggctgaacctaccctccctactgttaaccctccacctcacactacttttgtccattctcccactttacccgtccctatgactaccatctccactcaaccactttccacacactccactgtccattgccctcttccatcgcgtcccattatgacttccacaatcactccatccacatccaaaggaaaggcacctatgtaccccgaaccctccaggccactatccatcaatccacccttgtctacccttcgaatcattgacactccatctgcccctactaccacaaggaagcggtattttactaggcagaactgccaagtgggttcttcggttcgcagcatgctgaaacgggctcgtgcctctcattctgactgtgcagttgttccatccatgtctgacaatgaggaaacggcgggtgttgctcagcaaccccgtcgagaaaaatgagtcttctcagtt

SEQ ID NO: 112655 - DNA, 4294 bp, Cannabis sativa
gcctccatcactagcagttggtattagcgtcaagttgtgggcctgtggccactactgaaaaaattactattccggtcggtcttcaaaactctttttttcgtggaccgtcgctaataatattttaatgagtgtttaaaaccgtcaaatataatggactacttcttacggtactaaatactcggtgtacttttccaaatggtttaaaagagttacaagccaaaaacaactaggttttaaaagtatcttgacagtttaatatcgtcggaatactatagctagtagtttaaccatcgaccatagtattcacgacgattttaaatcatcggggattcccctattaatataaaaccccaatatcttgctcaaatctcatttcaaacgtctctcgctctctctatctcgttcataccctctccatgatcgaaccactacaagccacctcgtcctcgtctctctttctttcccgttagctctttctcgtagacgtcggtccacaagcccctcaatcatcgacgctagtccaccaccacgagccaccaccgtcctcgtttctctctctctctcgtccgctcttacttctcacattttcatggcgtcgctattgcctctgcctccggtctccagtaacttttctttctgcttacacttatttctgattctgtttggttgctcagaaaatgaaatgagaaccatagtttcaggtttaatttgttatcttagacgatataattctacagtagtttttttttccctgaattgttatgatctgattagtattgcagaaaaattgaagagtaagaagaagttatgtttaagcttaatgaatcttgcatgtgatttgctatattgcgaatttgtaatgctgtataatgtgttctctttaatcgtttgtattttgtattttggtgagaggtggcgtttgcaacttttaaggtttattggttgcattttcactttggatgagttatcggctataacactataacctacagagcattgatgagcattactttgtttaacacaaaatttttttggaattataaggagttttgaagccaactcactccaatataatagtaattgagcgttaaacaaagtaattataatacctattctaactaatgaacttccatccaccagtgatcatcattgaaaattttaaatatcattgcagaggtgcaagacaacttagacaagatgaagatgtagtactttttttcatttgaataattacattgaaaacacaagcattcaatttagtaaaaatgggcttttttttaataatcctacgtgggcatatgaacttgaatgatcttcttacacgacatcctggatacatatataacaattggtatataacggttcatgtaactcagagcattgatacagagattgcatagatatattttaccactaagtagaaatatttgaaactcagtttttaatgaataacgaatcaccttgataaataaatgacttgaaaaaaagtgtgccttgacagtcacataactacaaggaaagtagaatatttttcacaagccatgtacactatttgcatctactattcacttttgttcatacgaattagctacatcataagttgcatggagtccaacaaaaaaataataaacaagcataagcgcactgcagatgaaaaacctccaaaacgcaacagctcccaaagacccaatgagaaaaagattcataccaatggaaactgaaggcagccatggaacaagaggaactccccaaacctttggagctctttgcttcggaagcaaggccattcccaaattcccaacaagccaaacaaaactagtcactgaataaccaatccaacctctggaatttgtgttccaaagtacagttattccaatagaagaaccgatcacaagagataagaaagcaagaaacttaagcaaatcaaccttctctgtcacttccctagcataataccttctgactaacaatgctacagccataagcataaaaatagagagtgtactgaacgagaatacactagacaaaacatccaaactcgtaaaaaatgcaattattgcgcttgtaatggttaccaaaagagtagcataaattggggtcccagtcttaggatgaacaagagcaaaccaaggtggaatcatgtgtgatcttgcaatctgagtggtatacctagcttggccgagagacccaacaagcaaacttgtggtcattcccttaagagcacatatactaaccaaatacttagcccaattcatgccaatacttccaaaagcaacagaataagcagcatttatatctatttcagtgtacttctgcaacatggtcaacgccaaagccattaggcaataaaccacagtgatcacactcattgaaccaaccaaaccaattggtatatctctagatggctgcttagtttcctctgccatagtggccaccatatcaaaaccggtataagaccaatacacaacagctgaagctctaaagacaccttcagccccatacgggaaaaatgggctcagattcgaagtcttgccccgaacaaatcccacaattattataaagacaataattaaactactaagtatggaagtgacccaatttaagaaagatgtcctctttgtaccgctcattgctataccatttgcgatcaagagaaccaaaacggcaattgggtctaaaagattaaagccttcagcgaagtattttacccgaaatcgaagaaaattaggatcgtcgttgatcatactcgcgaaatacgaactccatgaccggcccagtccggcggcgccgacgagggcctccaagagaatgttcccggcagctataaacgcaacgaaatcccctaactcgatcctcagataggagaaggagcctccggctaccggaacttcgacggcgaattcggtgtagcagaagacggagagcagagcggtgatgccggaaatggcataagagacaataatggcaggtccggcgttttgacgggcttcttgaccagtgatggtgaagattccagagccgacgacggagccgaagctgagccaaatcaagtcccaccaggtgaggcagcgcttcatctgatggccactctctttacggagctccacgatctctgtggcgtcagtcgaccgatctagaagacggtccttgaggcgagaacatgtatcagagacggcggctctgtaagaagtaaagttctcaaaagaaggctcgggaaagaagtctcgcttgctccaccgccagtagcttctttgtagtcgtgggtctccttcttcttccgctggcacatccatggcggtttgcagagtgaagaatagaacgtcaggtggtgggcactgggtatcagtctctgagactgagaatcttcgtgggattcgactggattcaatacgccattgatgagtgataccttatatcatcgtaggggctcactcacacaactgacaaaaaagaaatctctcgttttgttttggatcttggaccgttgatttatgtgactcatttaatcaggattcgttgactgataatctcacgtttatttattttattatttctttttttgctaaacgacgttatttgaatactgactagaatcacatccacgtacaactttcgaatttcacactctttcagcttcaaaatgtattgttacatgtgccttaataaatgaataataaagaagaaaaaaaagaaagtgggttagattcacaacgcctgatcgtcttatgtggcgaagtactattggctagttggagtcttcttcttctttatttattttattttcaattagtgtaggggtagttgagtgatgagtttggtagactgattgctataacttttgggttgtataggaggatttctactgggaattaagggtgtagatgtattattttgtaattgattagtcatatgtttttaaaaattattacattaatttatatagaatttaaaactttttttttttttgaaggaagaatttaaaacttaattacactataatagtaatattaacaataagagaatgttagatactggttgagacattaattatctctaagttacgcgtctatattagccttgaaagcttatttaatgtattataagtggtgcttacaataaaatcataactctactctcttggttgaaagctaagagagattttagcatagcttcagctatctcttttttatccatccctttttgtatagaaagggaaatttacatggtatactaacttttgccatttttttacaaaaatactgttaggcggtattttttactgtgtttttttata

SEQ ID NO: 112656 - DNA, 4239 bp, Cannabis sativa
  modified_base (71)..(77): a, c, t, g, unknown or other
  modified_base (3588)..(3592): a, c, t, g, unknown or other
tacataatattaagagagttctattatttatatacaatattaaaacacatacaaatatatatatatatatnnnnnnntatatatatatatatatgacaagtctttatcagagaactgatctttatacaattatctgttcttgaccagatcaaacaagtctcgtatataaaggctttttgggtcaaactagggtttgcatttttgcaacattccaaaaaacaaataatcttgcttcaaatcaaattgggaataaaggtgaaatgatattgagttttagaagtctttttaacttaaaaaatatgaaatttactgtttggaagcatctttaaaaggcagaaaaaaattgtgtagaatgactacttttttgtttagagttaaaaaaataaacttgctttattatattaaaattatagtttttatatgtgtcatttgagtggacaatacttgcttgtcatcattttttggttttatgttctatggactgtgtattgtgaggtagtctaatcatttaaggccaaggaaatcaatttaattaaatgtatgggcgcaagaggcaagaaaggatttacaagtgatataaattataaataaaatcattacttaaaaataccagggacaacttgccccatatggagtggtgggacaatataattgaagtaatactttagtgaggctagctttaaatgaaaatgaatcaatataaatcaagagactttatactatatctatggacactaatagaaaaagaaaaacactaataaagattgttagtttttagtttgatgatggtctcaccactttttttcctaaccctattaattaattacttaaattaaatgcatggttggtaaaatttttatgttgttataaaatattgtttataggtgatatgtgaatatatatacagatatggcaaataataattcaacaataaaccattggtaattaaaataatttaattataaatataattttagaaatattaaaatatattaaattttgatccaataacaaataataaaagaaaaatatgagtttctatatttaatttaaatatttaaaaaaatatcaaaaaaaatatttttacactatctcaaaaaatatgtttatataaaaaaaaaaaatatttaagtcaaacttaattttttttatttcaatcgatgaaacaacatcaatccatataatgttaaaacgaaagattatttaattaaatagaaaattaaacattaaaactcaaatttttcaaaagtaataccattaagagtgcaaccatatgtatatggtaaatactatttcaaaccatgtatttttataaaatagtacaaaatagacactgagcttattttgtaaaaataaaacttaataataacctgacataagtgtgctattaccagattagttatatttttttgcatatgttcatgctaaatattgtattctaggttgatcgtattgaaaaaataaattgcaaaaaactaagtgcagaatttattttgtatcattttaaaaaatacattatgtaaattatttaacaaactaaaaagtctaataattaagttttgcaaaccataaatagtatgtattcaaaatatttatggaagatcatatgttcaaacttcaaaatccttttaaaaaagttatgaaagtacaatggcaaacaaagcacatgctgcttaattgggtggttttcctataatgaatttctattggtaaaagtaaaataaatagagaacatacgaagggaacaaagtatgaaaaacaaataagatctcattgggattgggagggacggagggagaaaatttagagtgtgagtaaattgtgagaagaaattttttgaaagagcacattaaaattaattacatataattttttatttttattttacatattttatgtatataattatttgactaaataccattttaaattaggtgttttacaaaatttatttagtctctctgttttgttaaatgttatattggattttatattttctaagtagtataccccaagttattattttatcaaaataaaacttaataataattcgatctagaagtgttatgagaagaccgattacaattttcacatgtgtgcttcatgctaaaaattattttcacgttgattattaaaaaaaattgttgaaaattgagcttaaagtattattttgtaccattttaaaaatacaaggtttaacttatcatttaataaaatagagagtataattagtaacttttatacacaaaacacatggtccaaaatgatattaatcttgattattcactaagaccatctccaatggttacactaatttagtgtagaatcttctactatttgtgcaataacttcaatgattcacatcaaatatctcactaaataaatatattttacttgaataatctcgtattttatattatttgcataacctaaaatagttaatttatgatataattttatcacaattactagtaaaaatttaaaatcttaaaataacttagtaaaataaaatatttattaaagcaattaaacattatacattttctttaataaaaagaaaacttaaataaaatcaaacataatgtttattaaattattattttacttaatgtttatttttatttatgttctctttttagtttcataacttagtgttatgttatttttattttatttaatattggtacttttgttattgttattttgtattttccagtatgttagtgttttaaattaattattatttttgtaataaattttaatttgagaactaaaatgtaagattaatttttaaaataagggttagaatgcaaaaaaaaaaaaaaaattaacaccaaattaatatagactcaaaatccaacatcattaatggtgtagaatttggttaacaccaatttagtgtatcattagagtaaattgtgtgaagattttacactaatttagtaaaatagtgtagcattggagatggtgtaatgggtttggtacaagcttttgggttcttgagaatggatgtaaaaccgaacttatgtttggtaaaattgtagtgaatggcttatgattaagcggttccacttttaaatttatttcaagataatctcgaactcctataatacttgtgtttgagattcttaatctcaactcgatcctctcaactaaacttcaccgtaaaactcttacacactaaacttattattagtttataagtattgttataaagtaccagtagtgcctaacattatttaaagatgacgtcttataattaattagcgatattttatatagttagtaaattaaattagataggacccgatatttaattataccaataattatatgacaactaatataaaatatcttttaacatttttaatagtttattttataacacttaattttctaagcaaatatttgatgagaaaagtcttttattaatattattaagaatttgttgcaattcattccttatatacaaaagtcaagtgtcaagtttaactatgtcaaaagtcgtgttaaatttaattaactataaaatgtcgaatgtcacatgttacattatatattagtccaaatatttatatatatatatannnnnataaatatatatatatattttgaatgatccaaaaataatttttaaaataattattatgaaaaaccatttaagttatatttaaatattaaacaatttaaaaatgaactaaagaatataaagtttaaatatttgaatattttgtttttatcttgaaaaaaaataacaaaaataaataaataaactaaatgttcaaatattagttcaatattatttttccttgatttaagaataaaaattatattctttcaaggacttttttcatgtatatactaaaataataaaaatattatacatatacatttggtcggccctataaacatttatacagtcaaccctgaattatgattaaaatcgaagaaaactaatcctcctagtattaatttttagattcataaaatgtagagctgtctgaaataaatctggagttcctgatcaatctatcaagtataaacaaaaaaaaatgtattaatacactagctaatatttctcccgttacattaacgttattttctaaatttccaatgatagatttattcatatcaaatcacgaataacaaaagaaaattgaattcatagattgagatacactacaacagatttcgttattaccggcggaagcatccgccggtaataagtaactattccgc

SEQ ID NO: 112657 - DNA, 4296 bp, Cannabis sativa
  modified_base (61)..(66): a, c, t, g, unknown or other
cacacatgctatataaatctccataattaacaaattacgcttatttactcacttatagcannnnnnaaattttatgctgaaataaattagtagaatcattatcccacttattattagattaaccaatgatataaatataaactctaattatttatcattaagcttataaggatattaccaaaagagaaagactcatttcatggagctcgtcatggaacttattagtagcaaaaaaatgagctatagcaacatggatatcctttcccacctcaggccatactaattaaaaaaaaccccgaaccaaacccatcaggacctggggatttagttttagggatgctaaacatcgcaaatcttacttctttaaacgagaaaggttttaaaagactaacatgttggtcaagattaagcttggaccccatgtctatgcaatcctaatcaatctccatcgaagtatgtttagcattacccatgatagccttgaagtggtctaagaaatgttgaaccacatctggaaaataatcattcaagattccctggtcagtattaaatgaaacaatcttattgtcttctttccgtttcttcaagatggcatggaagtaagtcgtatagctatctcctttttgaatccacttaactttacttctttgatgaagaaaattaagatacattttctcctggataagaaagtgattggcaacctgatgttccttgtgaataaagtgtttgtccttaggattagcttggctgataagttgagtgtctttataatcctccttagctttctcataagcttcaccaatgtttccaatagagtgtctattgaaaactttaagcttatgtttgagtctcattgtcttgacataaatcccattcaacctacaactttttagaggtttattccagctatccaaaacaatctttttgtactccgaatggtcagcccaaaagttgtaatatcgaaaaggtttgcttccaatttttttgtcacaaccgagtgaataacacacaaacagcagttagaacaagtttcccatgagaaatgggctgaggtattcaggaaatcatcaacccattcctcattgtgaaaaacatggtcaatgcattaaaaaattttggcttcctgcttgttggactaggtgaatgaagaactagagcgcttcataggacgaacagaagagtgggctatccagttagtagaatcaaccagttcagaagcactaatcgcatcccccccgagcctatcatcatgatgaaaaacaacattaaaatcaccaaggataatatccaagccttagttacattgatcattgataaggcagtccaaagatcacttctaccctctatggtgttggctccataaatgaaggtagcataatcatcttttttctgtcctatcattttgatatgacaatgaacttactgtttggattcctcaataactctaacttgaacaaaattgttcctccaaagcactaataaacatccttcaatctcattactagtataataatcccaacaaaagaagctattcatcaacattttttgtaagttttctcctataatcttcgtctccactagagccccaataccgactttattaatcctccaaatatcagtaacactctcttgtttctcctttttattcaaacccctaacgttccaacaacttatattacaacaattcattaacaacaagtgaaaatcagcctctcttcccctgcttcttcctcctgttttccaataagaatatcaaacgaattcctgagcactttctccaaattatcactaacttttttagttgatcctgatcccctcaagttttgggtcttaggtgcctgccattctcccaaaacaggttgagaagactggtgcattcctgaagtcttcactggttctacaatagtgtcaatagtatccccaatcgtatcaccagtaattaactccagacctacttctccattttatcctactggagacacaccagcagaaacatcttcaccatcaacatttatcttcttctctttcacaacttcttttggcttctccaacttcctacattgagccattatgtgcccaaaacctccacaatgtttgcacttaactggtagccactcataatctatttcctgctctaccaactgtccaaactcattaacataccagaatgtacgttcagggctgtccatactttccatttcaacaagaactcgagcaaattgcacccttgttcgatccttggtgtgtttgtcaaccataatcggcttccctattatactaataagagcaccttatattttttcccccaatattggagaccaagattgtggagcctaatccaaagtgcaactgatttcaccaatctaaccatattcaaatctgaggactgaggtcttacaattacaggcttcctatcaaattgtatcattccattttcaagaacgtcatcttgcattgcttcatcattgaatttaaccatggtaagcccctttgtcattctagctatcttcactatacccaaatgaccccaaattcgtctaaggaagccttcgaacaccactgcaggaacattagcaccaagcaccatacaaatgacagctgacttccaactctcctataatttcacctcctccaagtcaacctgagccattttcctacactccttaactataggtgcagtgaacgacaatttagcattagagttgagtattttaccttcaaaaaatttctgtcgatggttctaggtcgatgattgatgatttcaacctcctctgcccaacttcttcttcaaacagaaatctcgaatgagtctcttcgtgaacctcatcctcatctgtcaaaccagtctcggtaagcaccagctgcttctcgctaccctcaatcgaatcaattttactcacaggccccagatcaacctctgatctctctgcttctgccctagcaaccagccgtcgacccaccctcttcttcttcgccatggaagggagagagaacatggaacgaagagcgtgttctgttcctctacttttattatattattttttaatttttttctttatattcttaaaaatatacatatcagacaaacataaattatatttcaaatattataacaaaaaaattaaaataaaaattacgtaaaattttattagaagaaaaaaaaatatacattatttaaaaaagaattatgaaaatataattaaagtattgaaatttacacagaataatatgagggaaaaaaatttaaaaatagtaagagtgatttctaaaaaatattctaaatttattgttttaaaaaaaaaaatatttggtgtacttatcattttgtggattgtaaattgaatttccttatattaaatctatattatattaaatgtggctatataataaaagtgtagatttttttaaatattacgattcaaatttaaattcactacacatatcactattattttttgtcttatattaaatgtgtctatataatataaagtttttttacattgcaattcgaatttaaacaaaaatatctttctattatcattttttaccaaaaaaatatatttttattattattatttataaaaaaaaaatagattaagtgtatgatatttcaaaaacaataaaaagtattataaaattaaaagtattaccgtaattaaactaaaattataattaataataaattatgaatatttttatattttctttctataaataacacgtaaattaaatattttttttataaaatataattttatttattgaataacatccacacataaaaaaagaataataattatacaactaaaaatttataaaattaaaataaaaactaaatatatgtacactacttgtaatattaacattgttatattaaatgtgcatatataactaaaattattattcttttttaaaacattacaattcaaattacatatgtctcttatcttttgtctctatgttatattaattgtagctataaacaatatgtttttttttcacaaaaaaaaaaaaattatatttcaattgaaatttaactcactatacatatctctcttattttacaatttaaatttgaactcattacacatatctctcttatttttatcttatattaaatgtagttatataacacaaaatactttttttttaatattacaattcaaatttaaactcattacatacatctaaaaaagtattttttctattattatttttttgggtaaatagtgacataagtacccaaagttttaagtttgtaagtagcataatcctaatgtttatttttagcggcat

SEQ ID NO: 112658 - DNA, 2669 bp, Cannabis sativa
  modified_base (51)..(55): a, c, t, g, unknown or other
ctcttttaaatttgctacaaaatcaacaaatcattagtaacaaataataannnnntatttgttaatcatcaaaacaaagagatcgaaaagtttgagttaacaatgtgaataacgtgtgtctcaatgggaagcttgaagaagatgtttttatgaacctcagaggtttgttgacccaatcaaacctaattttgtgtgcaaactccaaaagtttctttatgagttgagacaggcaccacagacgtgtatgacaagttaaaagacacacttatcagttggaagtttcagaatttcaaagctgattcatccttatttttctgcaaatcacctaccttaataatcatggtgctcatatacgttgatgatacaatagtgacaaagaatgacactgctaaagttcaagagttcactgccaaattgaacaccagattttccttgaaagatttgggcccgctacactacttcatgggaattgaagtatacagagatgatacaaggttgtttctaagtcaagccaagtacataaaggagttactcacaagaacaagaatgctccaccttaaaccgtgcactactctgatgattgttgtcaaagcaatgtcaaaaatagatggtaaagtgttacagaatcccacagattatcgaagtataataggaggtctccaatacctcactcatacaagacctgatctgtcattttcaatgaacaaacttagtcaatatcttcaagctccaacaacatcacactagactatagccaagagaacattgagatatctcaaaggtaccattcatcatggattgcatatcaaattctctgattctctattgatcacaggatactctgacaaggactgggcttgctgccctaatgatagaagaagtgtggctggatattgtgtgtacttaggtgatacacttgtgtcatggtcatctaaaagcatgcaattgtgtctcggtcaagtacagaattggaatatcgtgctttagctcatgttgctgcataaatttcatggattcaggcttttcttagtgagttcaacttccctttacatggtactccgatcagttggtgtgataacatgggagctagtgctcttgcttccaatctagtgtttcatgcaaggatcaaacatatatataacttgatgtacactttgttagagacaaaattttaaagaagcagctagaaataaggtttgtgccatcataggatcagattgtggactgtttaacaaaaaacctcactcaccataggtttcatttcctaagtgacaaagttggagtagttgaaaccctttccagtttgagagaggttattaggaaatgagattatttcctttgtatcctctcccttgctgtcaaacagagtcgttagaagtggtcccaactctaacaaattctatcatgatgtcaaaatttgttagaatattttgtgtatatttcagtatgtaattattaccgtattattgtattttctagaatatatcattcactaatatatatagtctaattagctagccacaaaattttttgagcttagtttttataattctctctgtatctctctactaccttttcttgtctttttcttgttttcaaactaaaacgacattattaatggttatgtacacttttaatgggtgcatttgttatgtggtgagtgagccaaccataaccaaactaaacccaaatcagatctgagtgtattgaagttggagatgtaaagttttcatcattattaatttatttctttaccaagcatagaaattgacgcagttaactcaccaagacaccaaccaaacctatcaactatgaatatcattatatataagagtctcatcactgtcaacactataattaagattaattacatgttactatgtaaataatttgtacttaaatgtgtcacaatctttttcaaaataataataataatgtgtcacaatctttttcaaaataataataataatgtgtcacaattacatttattcccttgcctattgcaacttgatttaggaacatattatcaaaacttgaagacagtaaactaattaagtaaataaatgtgttcaaaccaaagtttgatccccaccacatcatttcatcacgagataaaattatgaataccagagtatgttttaaaatactgttttatatattagataatataattatataaatataagagaattctaacgtagggatggttgtttgttcctccattaaatggaccaatcagaagttaagaaataaaattgtgcatgcactttgtatggttgatacttgacaaatgaaaatgaaaaggcaaatttcgctcgctcctggcaagtgagatgcacggggaatagagtgggacatagttatcacctattttttgtgtctgtcaactaaaactatcagcaaattatattcatttaatacccacttttataagaagattgtctaatataccctcacattaacattaaagattgaaaattaaatcttacggttttgggttgaagaaagggtattataggaacattaattataaaaatgggtagaaaaaatgaaatattaaaaagagaataaaaattaaaaggggtaagttgaaaaataccacatttattaattaattgatcaaatttacctctaattttatatttaattaaaacatacctctttttata

SEQ ID NO: 112659 - DNA, 5055 bp, Cannabis sativa
  modified_base (2938)..(2947): a, c, t, g, unknown or other
ctttgtgtttgcttgctcatgcttcttgtttgcactcaacttgtgcgagacatatatcgtgcctaacctttgaacttgtttgcctgcaggcgcatttaggctaactagctagctcggtgtgccagcaagtgccgcacgtcccacctatttgggagtgtccaaataggcagcccgtgacacctggcattgacatacttttgcatctgtgtttgggcttgtaacaagtgcatgtggatggatttcatcacgtattgcatcttgagattccagcaacgagtccaccgcagagacgattgttgtccctcttttgcaaggtagaaggggtggtgtgtcgcaaccatagagagccttgaatggagtacttttgagggaagaacgataagaagtattgtacaagaattctgcccacgccaaccacttagatcgcttcttggaattctcatatgtgaagcaccgaagttaagtctttaagcatctattgagtatcttgatttgtccatccgtttgagagtggtcccttggagtttgaacaaatgtttccaaaagttgttgaggaaaattttgtacgcagacaacatcgatcatgtaatgctcagccactgttgtagctgtaaagggaagtaaaagctttattaaaatggtcatacttggttaaacggtcaacgctactagtaagtgtcccaacctcctgatttgggaagacccttgaaaaagtccataatgatttcgcccaaaacttagctggcagcgggattgggtgtaagagaccagctagggtagtcattagagacttaatttgttgacacaacgtgcaatgagtaagacagtgttgcagatcaaccttcattccttcccaaaacaataagattgcacctttttgtaagttttaagctcattggcatggccccccatatgtgaacaatgaaagtcctacaaaatcaggttaatgaggggagatttcttgggacaaagcatcaaccacttcattgagagtgactggttagtttagaaactctaatatcctgaatcaacgacttgttgtcccaacaaaaacttgacactttgatggtcctagcgcactatgaacttgcaacccaacaaataaggatgccacttggctactgcataggcaattgccatgagctctttttcttatcaatgtttaaaattacgttttttattgtgcccctcactttgaggtgaaaaaacttcagcatggaggagagaggcatacgcctcagccatgtgaggctgtaaaaacagtgaggcgcacaattcaaatgaaaaaccagattttagggtttttttagctcattttcattcagcaacttaaaaaaagcccaataaattttaacttagaaaaacggcccaataaaacacaataaaattaaataagaaacctaataaaactcaaacaaacaaagtaaacaaaaggcccttgcaaagtgccctttccctctaattatagacagcagcctaagacaaaagacacgccacttccgcccttttaaaataagctacagccaccaagatcaattaataaaaagaaatattagaaaaggacagctaagctattactgaaatgatacaactagtacctcctcttatatacaaattgcattggtagtctagcaatatatatatatacaaatattgtttttgatataagagaaaaaatgaaactgacaggattctagtatcctgtcaatacaaatcacacacaaactactggaaaatacttgtgtattattaaatacagggattggtaaggcaccaaagactcatagcatatggctaggaacaaaacaagaagagggttagtagtccctgtcgttgcaggtccttctccttcagcacttaataagtatacaaggctgagttaattcaagaggctctcctctacaaagaacaaccaaattcttctctactcttccacggattctcatttctctatatacaatccccaaaccatctcaacagagtcgtaactaactaatcactgacacggtgacacctaactaacttgttgatttgtcaacttcctccttagtcagccttattggagggcttatcaatcttatcagaaacacaataataaaccaaaatggaaagaaaattatgctatattaagaaactctcttagggaggagggcaaaaaaaaaaaagctaattgcatgtgagttgaaaaacaaagactttaaaattaaaatctttcagccacaattttaaaatcagcttcctttaccatgacaaaaccgctagttgaagaccatgactcagatgtccatgtgtttgtctcccaaagataaaatgtaccatcactgcaaaaaaaatcaagattataatgagctaacaaactgattagaaccatactgattagcaacaacaacaacaaagaagaagaaaaaaaccctgattagcagttaactaagagtaatacaggtggagaatgcagttaacttcgagtaacatacaatttagcagaaaaaaaataatctccagttggtgaccacttaagcatagatataccacctaatcctcgtcgaatgggagtccctgcacctaaatgatgcaataaaacaaacaagtcaccatatgaacttgaggaaataatcatttcacccattagtaaagaaaataatagatttgcactaaggcaaacacacacacaccataagagtccagatagttaatgatatataagtactatgaacaaaatataaatagtataatgtggataagataccaaactttatatataaaaagaggtggggtgggagagaatccaaatgactttcaaaaattaaaccatagagaatttggctgaaccaccttatttaaataaacaaacacatacatatatctatacatatatatacatatataagccagaaaagggttggtaaaagaaagcttttcgagagagagagagagagannnnnnnnnngagagagagagagagagagttcagttgtaataccttgagcaacatcccatatggtaaatgatgagctctcaaatgacccagatgcgagatatgttgctataaattaaggaaaaattagagataatgcaatactatacccattgaagagctaatccttgaaaaactatttacatatatatgatgagtaatcaattgtctcaaaagaaagaaaacaaacgagaaaaaatgggattgtttctctttgcatgttaagttccttaaggaagggttagcttcactgtaataaaagatgaactttgccgaaaaagattaacgaagagaagatcaatcgctactaagctttaattgtatcatgtataatattaaaaaacatgaagccttataaagttggtctggatatcttccatctggactccatgacagcgcacttatttgctcatcattctgacttttaagaaaatctgccagtatatatcttattccagaacctctggataaggttcccaagaatgaagcagcgccagaccttacagatgctgcatttccaggataagaggcaacccatatacaaatcccacccctgaaatacagtttaattggatggaaaaaataaataaaaaaaatcagttgtccgcagtgttttacattagaaagtacccttcaacatgaacaaataaatttaagagacgaatggcaaaaataaaatgtatgatacttgcttgcaagctacagctagtgctctcccgccgttaggcctccactcaagtaatttaacatcccgttgagaatcattgctcaaaatgcatggttccttcccttctgtaacaatacaaatgaaaaaaagcatacaaataaattcaatatatagcttttaaattaaaggtctaattacaaatgaaaactcaacatagaagaaaacataaatgtgccaacaaaataatggaaaagccattttctggtttaaaaacttacctgaatcttcataatcacgaactataacttgatttgacccagatataaaggcaataatatgcttatgttggtgccaacttactccctgaagatcaacttttggtaataagctcacctgtgaaatttgtcatatgagatgaaaacacaaaattagtgaaccttcaactactttttattggcaaggcttggtgattcttgattttcttgactatctcaatgtttttaacactgtcattataagaaacaaaggtaagcctagacccactaataagttctcaaacatcttcaatcaaaactataaaacaaatgaataaaacacaagagagaagtgagctgacgtcattaggatgaaaaaggcgtttgagggagtcattcactatctcctgcaatgttgctacaataccctttctttccactgtgccaagtggctctgcatcaagctccggactcggcggtcgtaccggctggtccaactgaaacaccaccggactgaacaccgtcccctgcatacaacaacaacaacaacatcattaatctaaaagcctcaaatatttttgacaaaaccaaacacaggagaatcaggaggtctaaccagaagttttccgtaagtttccttggctcgatcgtcagaaagattctcagcagtgactgtgatggagggtaaaccacatgaaatgttttagcaaacaacaactgaaaaaaaaaaaaaacacagacaaagacaaagaaggaagaggagcaaaggacatactgaggtctcgattgatttcgcaaatggtgagtgaacctggattcggaaaagatggcattgttgtttagtataaaaagagattgtaggctgtagggatttttctccttttgatcaaaagaattggtttattgggtttagtacggagcatctccaataaaataagtagaaatttaaaaaaattgtaagagtgtattttttatgacataaataaataataatggttttttttatttttatactttaaaatatttttttttttacatttttacggaattctacataaaaatttttatacaactaatagagtcgtaaccaaaaattatatagcaacccacataaaaattaccaaagaaaccaattcagaaacccaaaccataaatttaaa

SEQ ID NO: 112660 - DNA, 762 bp, Cannabis sativa
catttatcagaaaattaattatttatttatttctttaaataaaaaatcattttcttaaataaaaaattattttcataaataaaatattctagtaattctagtagctaaatctagtatataactaattgaatcatcgaatcatttcaattggatattggtattttttttttaactcaggatactggagtttgattggtgtgatgtttatgagtactgtaattttgccgaaaatatcataatcaagttatattaaaaaatgaaaaaatataaaatataaatattacactattctctatctatggcaaagcaaaaaatgattagaaactttatttagcatttagtaatatttttttaattaattttatgattatctttattttttttctacaacttttatacaataattttttgtaattatcagcactttagaaattcttttttcaaattttcacaattttatcgcagtatttgctttataattctaacaatcttttattattgttttaataataattttgcaattaaataatcattaatttaccaagcatttacgtttattgaataaataaaaataattctagtaaattatattaatctttctgggcttaattactttatattaaaaatatttaattaaactagaaaaaatagattaaattatatataattatttttcgggaaattatagtaaatggccccaaatcataggactatgtcagtttatgttctcattttaaaaaaatatagcaaatgaccctaaat

SEQ ID NO: 112661 - DNA, 1935 bp, Cannabis sativa
ttaattggtaatgcattttaaacgttagtggattctcttgaagtaaacaaagatttcagccagattgccaaaattaattaacgaatgctgtcattcaatcagggttataagagggaaatttcaagtttttatatagaaaaaaataataataaataaataattctttcctctgtatattcaattatcttggtatatattgataaaaattaaaattggtaattttttttaaaaaaataccttattataaagttcttacacctagaccatcatatcagcttcaagaaattactttcggttttatttgaggttccataaacatctaatgtttggattttgttatcattgttcagggtaatttcaaaagtaattactttgtggtgttgcgaattgtaaaggttggattttcttttcttttagactcaaaaccattttgtctgtaaacacgcactcgattgcattgcatgctactccgattgccaaattgactttatataatataaaaaagaagcacattagtttatctgccacgccataagagaaatgctacagatgcccagatacagtgcttcggctgagccaaactacaattaatcatgatgattcccactcatgtctttttacacacccaggcccagctagaagaccaacatatgatatatttctctcacctcaaaaagacaaagctaaaagttgtttatcatgttaacttggctggagatatcatgaagtattttcctttcccttggtttgtatgcttttatcatcttcttacacttaaaagtagaaaaaaaggcacaaaagtaagacaatgacttatttccctgtgcagcgcaataaagaggttttctcttttaaaagcaatagtaaataaatgaaattctctgattatatatatacgttcttgtcatatatgtttgttacagatgccattattgcggtattagataaatttacttatccaaaaccctcttaggaaataatacatgataagagtttattaatcatttaataaaataaaattgaaaaaaaaaaaaaaagtattggctgtaacatactcattcattgctccataaactctactttgtaataataattataattattatataaacaaaattgaagaacagatgaaagtcagtaggttgaacaaaaatgagaaagaacggtataaatgaggacctaatcaatctagacagatcacatttaagttagattccaaaaccaaagcgtttgtatgagaacacatatcagtaagaaacggaagcatgcaacattgccacatttgtagatacgtataaagttttcaaccttcggcgccatgcgacccattccatcaacgtgatagttcctcagcagtttgctcatatgaattgtcagaggtaaagaaataaaaaaacttccaagagacgactttacaacacaccgacttctctgcaggggttcaaactgtggtggttcttggcttagaaagggcacggcagcatagcttgtgtacgacaacagaaataaaacaatcaaaatcccaacaacattgcacagacaagaccaaacgatgttcacgtaacattaattccttgcatgctcgggaataagacgatgtcgtagctcagttgatgcaccagccaattctgcaaaacaccggagtattagatgtcaacagataaaacaggtaaaagggaagagtgaaggggaatcagggtttacatcctatacagaaatatagtatattaccttgagctgtaaaattgaataaaggaggtagagctcgtccattaggtaacattgcatttgagtcccgtaactcgtcaaagaagggatgagcgcaagcttccaactggaaatcagaatgtgttaagaggataatagccaacatttggtttgtatcgttattaaaaaaaaaaaaaaaaaaaaaacccccagccgatggtcggacct

SEQ ID NO: 112662 - DNA, 1385 bp, Cannabis sativa
taccatacactttattacaccctattttataaatcacaaggaaaactaaaatgtaatttctatgttgacaatgtgaaaaaacttaataccatttatataagataactaaaagttgtgagaatagctatatatataaactaaagtttgtgttcattcaaccttcaccagtttacttcttccctttgttttaatttatatttatatatatatatatcttttcttttctttttttggcaaagtgaaaaggtttaaagtgctcattttatcccctttaccatcttatcttaatcgacaccttatttggtttcttggtcttcaactttttatatggtgagaagtcactatgccatagactcgtagtcttggttaaattgccaagaaatttccaccatatgcttataatttaagggtttgccttttgattttgaccattgcaactaatatatattattgcctaagtggggtttggtattgcattttaattagaatatttattaattaaaatactaaaaagatactagtagtgtttaatacaccatatactaaataattacacttaaaagaccttgctccttacactagatattattttgttgatatgtctatttgtatatgtataaattatatatatacaatgaaagatcataatattcaagaaaaacacaacaaattagttgtttttccattattattgaatagattaacaaaaaaactttaatatataaatgatgatagtgtctcttttggtcaatttttcatctatattgagaatgacatgtgaggtgttgtggtgggagtcattcataaccccacaaagcaaagaaacctttaaaacacccatttccataccttgcttataagctaaacgaaacgaaaaaaacaaatttgtagacatttatctatatttatttttgttatatattaactatttcttttttccatattatttatttttttcaaaaatatatcttaaccacatttactatcctttcaagtaaaatacactcttttatcttattttatttttcattaacaaaacaaccaagcttctctaaaaatataatggactttataatttaataaataaaacatgcaatagatattataaaataggttaagaaagccacacttacattttcatagtttacaactagtttttgtcaataacttttttgagtgtagcctatttactaataatttaagggtcaataacttttactagttaggggtcttattgtctttggctttttttgaataactttttaataacatgataatgcatgatataaaattggaataattacataagacattattttttgtaaaaaacaaaaaaaaaatacatttttacgtttaaagacttttttttttacatttttacgttt

SEQ ID NO: 112663 - DNA, 5900 bp, Cannabis sativa
  modified_base (5850)..(5866): a, c, t, g, unknown or other
ccatttcacgactaatatcatgagaaaaaataaaaacactcattgtataactaggtaaagcttgtgccactgtcttaatgagtaatttcttccctgctttagacaggaactttgaaacccaattataaattctattacgaaccctctctttcaagtaacccaacactgaatttttattccttcctatagtatttgaaaggccaagatacttactattttcatcagccataaccatttgaagggattaacacaaaaaatcacgcatagtagggtcggtattggtgctgaagaaaatagatgattttccaaaattaactttttggcacgaggcctgttcaaccagttggagcagctcccgaatgtgattagcctccgccatcatggctttgcaataaaggtagctatcattagcaaaaagtatgtgtgacacacgaggtgcaccattagccaccttatacccatggatccaacctttttgttcaaactttcgaattaaagctgacaaccccttggcgcaaaagataaagatataagaagatggtggatctcgttgactaatgtctctcttaggtaggaccgatcccatttcttttccaccatgaaaaatagtataggatgcagaagtaacacaactcatcatcaaatgagtccaagtttcattgaagcctaacttttttagaattgcttcaagatattgccactcaatcctgtcgtaagccttgctcaaatccaattttaaatccatatacccctctttcccttgccttttcctttttaaatagtgaagtattttgaaagacactataatgttatcagtaatgattcgccctagaatgaaagtactttgagtgttcgagagaatcttatccataagaggctttaagcggttagccataatcttggtaattaccttatacaagacgttacaaagggaaattggtctcaagttcgccatgcaatcaagattccttttcttaggaatgagaacaacattggctttatgacaatcatttttgaaactaccattcaggaaaaaacattgaaccatagaaaccacatctgaaccaacaactagccaacatttttgataaaacgctgatctcataccatccggtctggggctcttctcagggtacattatcaaacactgtctttcgaacttcttcatctaaaataggctaatttaaatctgagttcattccaggagtaattacttcctcaacacactcaagaacaagttgtaaattggtcatggaagagttaaaaagtgaatcaaaatagttagtcacaacagtagacaaacatgttttccaatccacccaattaccatggtcatcttgcaacttctaaattaaattgggtcttcgtcgtgtactggacccagcgtgaaagtatttagtgttgtggtctctttctttgagccaaaatttctttgctctttgtatccaaaagatctctttttgatccaaaatatcaagtaagcacttcttcaaatcgttataacactaaatagaaataccatcccttttattcttcagtcggtccagctccttttacattaattaattatttttctaaaattatcagtgatagtttgatcccaagctaagagcttctctaaacaacacataatttttgaaaataagccatccactggagaagcctcccaacaatatatgatttggtcactaagtatatgaatgacctcctcctccatgtcatcctcacttaagatcccttttgaatttcctttttcaatatcaccttccccttctacaatgataccatctcgagccattatttcctcccccttccttaatcgtgattcattaatacccagattttccccttccaccaatctcattacattattatcccttatttcctcatgatttctctccctcacccaattttcatgaaactccagattttctctttgaattccttccactcgtgattactcatttatggctacttctagtttgaccatcgttgatactctgggattagaaattcctaagctgttggattttgtagctaattctatcttcacccatcgcgcaccaatggtatgggtccttctcgaagctacttttaattcaagcccataaggtttagtaagaaaatggtctggtgtattgaaagcttttttgcaaaaatgtttcgaatggccaagaatgccacacacaaagtagaaagttgttaagtcttcatacttgaatttcacattgcaagatgggacatttttcagctataacttccttctttttttcaatggtaaatcaaatcaaacttggactcacgcccttaaaaattctctccacgctcccaatataattcccaagatcctgtactactcgttctaatatgaagccagaaatcctgttgtggaattgaacccatgatttaaatttattcagagttataaaatgtggattttccctaatgtttaatctttcaaaaattagaggtatccgatcaaaggtccatggatatcctccataacacattcgatatccatttcatgataaaattggaaaaaaaattgatttggatctaattctttaataatcatacccagaactagtcgctatagtgaagctatcttatgttgcatcgcttagaaatcgattatacggttcgtaagaaaccttccaaccaaacaccatcgatcatcaatcttaaatatatcttttgagctatcatcgtacatcaaaaattcttcatcttcctgtcccaagttcattgatgcatatttcctattcatatcccctccagtatgttgccgaggttccataatcactctgaagaaaatcaacacaacaaaagaaacaagaccagaaaaaagaacaaacgatcaacaagacagtcctaccatgtcaaaagacaagactatgtatttatgtaatttaaaagcttgataacgacatattttgtttgttatcatatctttgttcctaaaatcgttttatattgtgtttaagatttgtcattttgagattttaattaggaatattcaacttgttcatctagtcctactaatactatcttgttaattactggacttcgtaatttgtgaaaatattaaataaatatctaaatttaattttgttcaaatattataattaaatctaagaagtctcatccaaataaaaaaaatgggggtgttatcttgaaaaaatgatgcccaagttgggcttttatgtggaatgaatataaaaaattctggattgtatatcttttgtggagtattctatcttgttgaatggaggattttaggcctgagagggaattaaggtagggagatcatgtcgccttatctgttcttcctttgtgttgaaggtttaattgctttagttaaataggattgtgataatagttcgttgagtgggtttccttgtgaaacttcaggaacggtaatttctcacatattatttgatgacgatagcttgtttttgttaaaaggttctgttccagcgtgtctgaagttcttctctctttgtatggtggttctttgggccaaagtgtgaattttgacaaatttgcagtttgtttaagtttcaatattttagatgaagattgggaaggggaatactcttcaagttgtggaagttgagtgtcatgagaaatatttgggtcttccttgttttgcagggcacaataaatctgctttatttgattcagttcgtgattgtatttggaacaaaccttatagttggaaggctaagtatttttcaatggcaggcagagaagtgctccttaaggtggttatccaatctattcctacatataccatgaatctctttaaacttcctaagcgttttgtgaaggatattcatagaatgtctttttagttctgctggggtggtaatgatgtgaatatgaagatgcattggtgtacttgagaaaaattatgttggcagaggaatgatggtggtatgggttttaggaacgtacatctctttaattaagctttgttggctaaacaagctttgatgctttataatgctcccaactcctgacttctatggtgttgaaaggtttttattataaaaacaaatcttttgggtccatttcttcttcaataaaaggttgctatgtttggaggaacattctttgaggaaaagaactctttgatttaaaagctttgtggagggtgagagatggtagtcaaatttgcatttataaagatgcttcgattccttcggggttcgggcctcaaattttgtctcctagtgttcttggagaagatagtatgatgactctccttcggacttatagcgaaggttggaatgtaaatttagttcgtgaccttttttcttgatgaagctgcttctattcttacttttccttggccttttcatccaacgtgtgataagttgatttggggccataaagattcgggtttatacagtgtgaagagtggttactagtttgcgcttcataaggagggtcttgatagatcttcttcttctattggttattcgggtagatggaagaaactttgggatctcaatattcctcctaaggttaaatcttttgcttggcagatttcttctaactagtcccactaggaaaaatctcattagtcatggtctcttgaatgatggtgtgtgcccagtttgtgatgatcaattagagactacacatcatgctttgtgggcctgctcttctcttgctcagtgtcgtaagctttgtgattttcaactagatgatttgtttacttcttgtaaggattttttttattttattcaaatctttattgactctcttcccaagcatcagattgaattaattttggttgtcttatggagagtctggctttgaaaacataaatgggttcgtaataataaacttatccctcctggcctggtggtaacatgggcttatgatttcttgactgcatattaaaggaaagtcgttgttatatatgatggagaggagctgactgctactgttcaacacccctctttgtcatcgcgtcctttaggattcgtaaaagctaacattaatgctagtttggactaggctagtgggtgttgttggttgggcatgattgtcaggaatgatcaaggagaggtgttggatttgacttcttggttcttggatggaggtttcttacctaaaaccgttgaaactttggctcttaaaagtgcgggtgctcaatgttgtttatttagattaaaaaattgtattttttatttgaattgtcttaatttagtgtccaaatttaacaatcatatattgttggagtcttctttcggacttttcttaaattattttagtttgtcttttaataattttaatgtggcaagtgtggtgcattgtcctagaactcctaatatgacggttcacattttagctaagtatgctttattggagactgttagtaaggtttggtggcccgactatcctctttgttttcaatctcttgcattgcatgaagcaagtaatgaatgagtaccggttttctatgtcctcctcccctacttagaggtcttccctttgatggtgggctgggaccatttaaaaaatatatattttttcttttgaatggatatataaataaaaagttaattagctttaaattcgatatgataatatgtttatatttaaaagtatttttataaaataaatctaaaagcttttctttttttttttttgcattacattcggtttaaaagataattaataaacaaataagtattttactctttgaactttgacactaataagattgtgccccctaatcattagcgatgttaaatatttcctcttactttaaaaagatattaaaatatgtgtaataccctaactagactaggcatgttacgtgatttttaaacgtannnnnnnnnnnnnnnnnaatcaacgaggtttatagaaatcgtgattaatta

SEQ ID NO: 112664 - DNA, 3569 bp, Cannabis sativa
gctaaaaatagcctaacaataagatacaaataaacagagtaagagtcgacaagctcttctctacaaaacaaagactctcttttctaaagatatgagtgaaaatcaaagatgcaaaatgggtacaagacctagttgttataaggtgtaattataatcaatatacacagtattgatagctcatacacggtctgaacaagaccacaacccactaggcaatttcctaaaatagatcttcaatcagcccaggaatttctatttctatacctatagaatcgtagcagtaagtgcaaatttttttttttatagaaaaggaaagtttagcttcggttttctcctcaagaaatctaatcaaacaaaatagaaaactaacacaaaatcagaatattacagttggatagatagaaaaaaattgagtaatcaaacttatcttttttaccttattttccataaatagaaaagctagacaactttccttccaaaaataaattgattaatataaaagttaaatacaaaataaggaaaccaatttaattaccacaaccgaaattaaataataatttatcaaatatttttgtcacaataaagatgctaaaaatagaactaataaaagcctataaatatgtaattatatagctattgttggatatggaatgttaatatagttgaatagactctgcttaagttggtattttcagttagttttgtaactgttttttcaacttccgtctgacacaaatatcttgtaactaattctgttgtgtatgccaaagatgtatatcaatacacttgtctattcaataatgatttcaagttctggttttactttctttcatcttctctgtatttctcctttgtttttcgtttactctatttttcgtgaacttcatattctgaggttctacatggtatcagagctctagactagcgtcgtcaatggagtccacctcctctgatcctgctcctattgccagaactccttccactgcgacaacaacccagatgcaatccaactagaatccgttttatcactccttaacctctgttttaacagtcaagcttgatcgaactaattttttgtcttgaaaatcacatgtaattcctactgtaatcggccatgagttagatgagatcttactttcaggcattcctccactgcaaagtcttgttactggagaaccaaaccccgaattccaccaatggaaacgcaaagaccagctgctgctgtcatggatgcgatcgtcgatgacagatggtgttcttgcgtctgttgccagcttctcatcatctcatgcggtctggcgtgcgctcgaacaaaaattctcaagccaatctaaagcacgtctgcttcaactcaagaatcagttttccaccattcgcaaaggcggtcaatccatctctgaatatgttgacaaaactcaggccacagccgactcgcttgctatagcaggttctccgattcttgatcaagacctcatcttgcaattactaaacggacttggaccagaatatgatcctgtagtctccggaatcactgcaagaagtgatgttctcaagttcaaagaggtccaagccttgttgctttcccatgaaagtcgtcttgagcatcacaattctgttaccgacttatcgatgaagcttcaagccaatgttgcgttcactggttcacgcaatactccttatcgaccccctcagatgaacaagaatggtggtagaccaaactttcgtactcagcatcaccaaaacaggcccttgtgccaactatgccttcgatatggacacaccgctccagtttgtcactacagattcgacaagacctgggttacacctaaaccaggcaccaatggcccctcttcatcatccaccaacaacaccccgcgtgcctacatcactgaacatgagttcgactatgaccctcaagcgtttgccacatcctttattcctgactttggtcatgattcaggatgattcgtggatacgggtgccacaaaccatgtgacaaatggtcttgacaatcttgaatctgcaatgacatatccaggatctgaaggtctcgctgttggagacggtaagaagttactaatttctaatattggcctagcttctttacctgcttatagctctactagtctcaaacttaattctgtccttcatgtccctgcaataacaaaaaacttggttagtgtatctcaactaactaatgataattgtgtgtttcttgaatttcacaaatcatgttgctttgtcaaggacaagcaaacagggaaggtgctgctcaaggggacacttaaagatggcttatatgtgttagaacaatgctctcaacaatcgaaggtggcaagtttgcagcagtatgtgcctcggggttataaacctactgctatgagttgtagtagtcatgtttcattacccaatgtaataaatgacaattcatgtaatactactgatatcaataaagacaaaattgttcctctaaatgtctctaaccccactgttctgcaaactaataccaagaatcatgttaatgtatggcacaccaaattgggacatccttctactattgtcctagccaaaatactacaacaagttccccacaatggtaccattcatcaacttgagttttgtcatgcgtgtcaacttggtaaaagccacaaacaaccctttcctagcacagataaaaaagccacacagccccttgagcttgtccataccgacttatggggaccctcttacatcaaatccaaagatggatatctttactatattcatttcattgatgattatagcagatacacatggatctaccatctcactcaaaaatctcaagcacttgacatgttcctaaagttcaaaactatggtggaaaaacaattcaacctaccaatcaagaaagtgcaagctagttggggaggagaatatagacccttttctagatttctcagtgatcagggcatacattttcaacacccttgtcccaaaaccagtgaacaaaatgggagggccgaacgaaaacacaaacatataactgagatgggacttactcttctggctcaatctggtcttgaatttcttattggtggcatgcgtttcacactgcagtgtttcttattaacagactaccaacaccagttttacatcatttgtctcccacagaagtgttacttggccaaatacccgactacactattctcaagccatttggttgtgcctgctatcctcatcttaggccatacaatcaacacaaaatggaattcaagacaaaacaatgccttttcattggatactcttcctcacacaaaggttacttatgtgaaagtcctgaaggaagactgttcatagccaaaaatgttgtcttcaatgaacaaatttttcctgcaattgttcacacctctgccacacaggtacaaaacccctcaccaagtccttttcctactgcaaactttactttacctactgtaccctctatgtaacgccctaaataattaggcacgctccccaaaatgcttatgaaaccctaatcccctaatcaggattactaatcaaaatagtgcagaatttaaacttttatatta

SEQ ID NO: 112665 - DNA, 3023 bp, Cannabis sativa
gagagagagagagagagataatagtgtgagagagggtttgaattagttttaagtttatttgttaaaaggtttttttttatccatctaataatcaggttatatccttaaaggattttatcgaaaatccaataaaaagtattaatcaaacttatgacaagaatgaccaaattacccttttttcaccatgaagtaatctttttgtctaagcgtaaaatggtcaaaaccattaaccgtcctaaccccatcattctaaatgtactcaaatcttgtcctgctaaatcttaaatactcaacctatctatgtgactctaatggcaatattggcgtattctattattattgggcacgaaatacaaaaaaataacataatgcatgtatataatatacttagaacccaataaaatctccataattgagaaactatttagcaaacacatatttctaataataggtcccatttaccaaagtatgcataaacctaattaataattgaaaaactattaatacgccactaagttccatgtttaaatttgtgatcactacaataggagtatccccatcacgaaaactagatttctcgacgatagttcgggtggctacaatggttgttgtatacaactttattggtatcacttctttcttcagctctcactaaaagcaccaaaatttctaccaagattttcaaaaactaataaaatataataaagcttaaagaaatatattatacacaaagaataataccagagtttttacatggttcaagaattaatgatctcttgtctacaagtcaatattataatgataagacttgaaaagtctatgatatagttaagtgtttgtaccctagaattttcctgagcactcaaggaaagagatcttctaaccctttgcatgaatagattttgttatatttgtagtggtagggttctacacattgccctctaatgtgttaaatacatataatacattgactttggacttatttgatgaagctcggcccatgcattgatcttctactgacgtggaggccacatcatgttgatagttgtcaaaccgtatcctactttggtggataagaaacacatataaatgcttgattgataattttttgtatttccttattcggaagatacgaggaagatatgaatcctagacttgatcctagaaataaaatcctgatattgtggaatttggcaataaaatgttgtaatacggagcttgatatctggatgcttatttaatcactcatgtagaagatctacctgatgccatctgaagacatgttatgccagagatgtatcttgtctggacgagtcgtttgtccaacatttggatgacttgactttgttaattgatccattctattatcttggttggttctgcgattgggcctggaacaattagctaaaaccgtcttagaattacacgtgtcatttatccgaaaacacggataatactttctattctacctttgttttcagtatattccttaaatattgcattggacgtaaaaataatagaaaaatttacatagaccaaaaaaattgaaaaaaaaaaaatacatcaagaaggaaaaaaaaaatatttttactctttgaatttttttatttacaaaaatacatttttaataaaaataataaactgttttttttttttttgtttgtttatagtttatttatagttataattgtcatgatgttatttttttggttggttttgttgttttataatttatttatagttgatttatagttttcatgaaattaattcctcgttgttttttagttgtttttttattaagtaaagtatatttttgtaattttaaactttacaaatatatttttataattaaaaatttttaatcttaaaattgtaaataaaatataaaagaaggttatttttgaaaattttacaaaattctattgctctgctctcattatattttttgtagaaaagaaaaattgctttgcattataattggctactttatgtttatgttattatttgttgatctcttatatgatatcagttacttcgtctttagattttgcaacagtgtagaaaaataatatacttttttaatctataaatagtcacgagaattatatataactgattaagaggggaaatcatgaccactcaaaagttgcaaatataaaatgtagagtattactatcaatatgcaaacgcaaatgccgtaaagaggatggatcatcccagggacagctaattaaggattattgtcattattgaaacgacgaatctaacacatagatttgatattatgaaaaagttggggtccttcgccatgcatgcacaatcttaataacatttatattctccaccactagacatttcctataaaatatttctctctctatgtatatacatatcaataaaatatctttctttttaatcattaattcctccttttgtggcctgctcgtttaattttgcaaatctttaattattacatctttgtatattacatatgatcatctgtaagaatatttgtaatataacaatggttaagggtaatcatgattattcgattcgaaatggaatggtaaacattatgtttttgaagtaattatataattattaagtggtataattactattgtagttatttatagtgttataaatactggttaggcattttgatttgacacgagtctagaagatacgagtacgattaggcacgataacatacaaacttaaacacaacacgtatacagcatgaaaaataggtccttaagcacgacacggcacgacacaagaagaataaaaggcacgacaggtaaggcacaacatgttacaagcccgaaaagccctacaagaataatgggtatctctaaggacactattactgaaggcataaagtcttcactaaaagtaacattattacaaatgacatttaagtattctcagtaataaaaattgaaaaaccgtgtttttgcaaaatgtcagttatatataagaaaatataaaactgtaaccgtttgcagaagcagaaagtaatt

SEQ ID NO: 112666 - DNA, 7857 bp, Cannabis sativa
atagattttaaaaaagaaggtaaaaataaaagaggagaatataaaaagggtatagagtgtaatttcctccctaaaatattatgggcccaattaaattggcccataatggcccataaacaaagagataggtagaatttggaagtagaagaagcagtgaccaaattttgagagaacagagaaaagagagaaattccaagtttgagagaattgaagatcgaagaagacgatgccttgccttaacctctccactaacgtcaccctcgaaggcgtagacacctcctctattctctccgaagctacctctgccgtcgccaagctcattggcaagcctgaatccgtacaacaattctctctctttctctaaactcatacaaatgatttattgttattttgtctgtgaattttggtttatcgtattttgattagactgtttcgtcgttattattgcccgtgtgttaatttttgtttttttttttctgggaaattgttggtataataatggttaaatatttaattttctcctttttgatgttttagttcatatctgaaaccctaaacaagttggttttgggtatacatttttcaattacagaagtaggggttaagacccataaaccagttgttatgtttatgttgttcttttcttaggggaattgtatagttttggttatgagtgaagtaactgagtatttttcatttgaaactgttaggagaatatgtaaactaaaagggtatatgggtaattgagtattttaccttttgtcttaagaaatgaagtttcgagaatagtgagattgtatctcctcaacaagctcaaagtaaagtaaatatatattactgttttctgggtaaatatttaggtgacttttggttggagatgatgaaatggaatggagtttctattcatttgtttagttgcattttaaagtattgaaatgtcttaatcattttggtagaatgaatgactattctatcttaaaattagaggaaagactattgcaatagatgaaaaaaagttaaaatgatttttttatcaattttttttatgcattttatatttcattctatttgattcctctttccatcattcatattcttatgtttttatttctcccaaccaaacaccacttagtgttttgaacttgagctaaaacattaactttgctgtgtttctttgtgtgtgtgtgtgtttgaaacgaattgaatagctgtacaattatacaacaaaagaactaaaagaaaactatccattttttattagagaccttgagtgttttgtaaaaatagtcatcatggcaatttttattagcaaaatagccaatatttggcgaccaaaaattacactgcactaccataaaaagaccattatggttgttttgtgaccataaatgtgtttatttaactaatttaacattttcatgttgttagtttggcaaatttcccaacattaattctgtcccttacttattaatgctgtgttttttttgctgtacacagtatgtgatgattgtgctgaagggctcaattccaatctcatttggtgggaaagaagaccctgcagcatatggtgagttggtctcaattggtggccttaaccctgatgtgaacaagaagctaagtgctgcagtggctgagattcttgagaccaagttgtctgtacccaaaaaccgattcttcctcaaattctatgacaccaaggtgagcctctcaacttcttgaatttactataatagatcatggagtgtggtaattctcctgcacactttcatttctcattgcattcttcctgtttgtttaggccaaccaaactcaagaacatgcacagtgtttacatgcattacaccagaactagagatcatgtaaatagttatacccttactgctgaaacccccagctaaaattgttcgagcattctttaatccataggctactttcgatcacttagctagccgtttgttcatgctgtaagttacatcctctttcgcgattctgatgcttgtgttattatttttgcagggttccaactttggatggaatggaagtaccttctaaaatcatatgtcaaaatcaatagttttaggtgaatcctgatggagattacgtatttcgaattggtcacttcaccttcctaagactggtaattaagacaattatatagagtatttctgtattcacttaggtgtggctgaacaaacttgtatgcttctatggtaatggtatgtgttcttgggaaaacttgtgttgtgtttcattgacattaaatcaaatgatgtttaccactccatagggtttggtatcccaagctaaaatggtttatttttacaatcaaattcaaagagaaatactatgggacactaattcatttcattaggtgtcatattgctatcaaccaatttaaatttattttaatttaataattattatagaaaatcaatactcaaattgaaatgcttcttcatgaagttatagcctagtctccttaatatatttattaaaccttgaaactatattttaagatccaatttgaccataaaatcctatttgacttcttgcaatttttattattagtattattatatggtcttgggatacaacaaaaagtttgttcaatcttttggttaaatttaacaatccccctcatataggatcaagattagattagattagattgcatattattttttttattttttattttttatttttgaaaaaaaagattagattgtattattttatcctataaataatacatttcccacatcatatgtcaaatatccatctaaaacatgaaacttaaaatgatttttactgttttaaataattaatttttgtgacaattcaaatttttattttttaacataattgtttttgaaatgtttttgtcataatttttaaaaataaagggtaaatactaaattgtctaatttatacaagggttaaaaatactattttttttgtaagaactttatatttttatatcaattttttttaatatttttacttattctacaaaaataagaaaattatatgaaaacaatatcaaaacaacaataaagcaatataaaaaataatatacaagtattaaaaaattaataacaacataataagaatataacataaaaatacaaatacactaaaagatcatattttatgtaaataaaatttaaaaactgtgaaaatattaaaaattaagttgatcgtattttgataatttttttatttttgtatttttttgaaattaattcctttattttcttggttggtgttgagagaaaaaaatgataaagagacacctcttcttacttaatgtgcacgcgtaatgaagcttgcaatgacaggaaaatatatatatatatatataaaaaaaaatacacatattataatagaaatgaaaaataaataataataataataaaaaaaagcagtgtcaatttttttactaaaggtgtctcaattatgtgaacataaaatgtaaatcataaaattaacaattaattttattttacaaaattttcgtaagtataatttttttttcagcaataactataatacatttttaaaaaaaaaataaataaagaaccagttaattcattcaagcacgcccattaaattaaattaaattaattaaaatatgcaagaaatattagtagaaacttaacaatgtgcttaatttaattattcaacaacttaatcgctaagaaaaaagtttaactaatcttaaattcaagaagcgaaaaccttgccaaaaacaaaaacaatatcttaactaaatgcctacgtggctcaacctaactggtcatcaatttctcttctattctcttctactagttttcaactcgtcgttctgcgaaaccaacggtcaagattctgtccaagtcaaacaggtcaaataatcaaacggcgtacaatcaattaagcattaaacaccaccactagatctccacactcctccattgtcggtgccctaaataaaataaaatatatatcttttattaattattttcatattaaaaaataaataaatatttatttccatcgtcttctaccttgaaaaatcacgcgttttgaatctctctctttataaaaaccccattcgagaaaagatcgaatttttatccaacaatggcgtcttcatctcctccagtgcttccgatctcaaattctcagcctccagttgtcgctgtttcttccgcttccagtggtggttcggctcaatctcaagcaccgatctcaacccctgctgtccgtacattcataaaccacatttccgaaaatgttcgcaacggactctctcagcgtaggccgtgggcggagcttttcgatcggtctgctttcgccaagccggaatcggtctccgatgctactctacgaatccgcaagaactactcttacttccgagtcaattacatggctgtcgtagctggtatcctcgccgtgtctttgcttacaaatccgatgtccttgcttgttcttctcggtctcctctgttcttggctttttctttacctatttcgtccatcggatcagcctctcgtcctcttcggccgtacattttctgatacccagactctctggggtttgatcgggctcagcgtcttcgtcattttcctcaccagtgtcggatccctcctgatctctgctctcatgatcggattcgctgtagttttcgctcacggtgcatttagggttcccgaggatcttttcttggatgaacaggagaataatccagctactggatttctatctttccttagcggagccgcatctaatgccgcagccgccgctggtcctgccgtcgttgcagctcgggtctgagaagaccgcgtttgggtaatacgtatatagaaaatttcgtttcactgttcattttaaaaagaatttaacttttggtagaaacaataaagttaaaattatagtaatggattttgtatggatctatgttatacaagttcggaactttttgaatctggatctagttttttcctttcttttatggatttgataatatgatacatttcatttgtaacttttgttttgataacctatatcattatgttgattctttatgcactatttcattttctgttgtatgattaatgcaacaagtagatctgcatgttgccttgattatgcactttgaactctttgtcattctgttaaaacttcacttacattatttgatgatagttgggtatttgcagacatatgaatagtagtaaattattctagtcttggagcatattagatgttggtaagagatatttatcttttatctttacctttgaattgtaggcttagtacaatatcatcatcatcatcatctttgagaatctgatttgaagatgtttgtgaagagaagtgaattgttatgttaccaagtcttactagttatatcaatttaagggttatatcttaccaagctacgaaagctgttgtttgttttcaaccaatccaagttttccttttgggggcagaatcactgaatcacacttagattgatgcagatttttgtagagtgtttgttgtctgtttctgaagtctgtgcaatcagaactttaaggctttcaatttggtactttgtatattgaccagattcctgtactatgtataaaaggtgtggtttcccttggtctggtgcccactgtaaaaaaaaagttacccatgagccaataccacccatttctttgttaacagaaactcaacacgaaatggtgtttggtattcgatattgagccaacaatgagatttgttaaagagtatcaataatagtacccaatatttactagccttatgagaatagtcccccccaacatcaacaccatttgaggtgtctgttattaaatatttatgtactaaatcaaattttgatatttacttctccgaattttaacatgtattaaattatattttttaaactttcatatattaaaattgaacaaaagtctttaaaagatttttaatggtctttaagaaaaattcaggagcatgagtttaggattcaaaaattatatttagaggtcctttattttaattcattctatataatattatagattgaacatggatgattgaaactttaagtaaacttaactcttggaaaatttgttgtcattgtcatagattgaagtttatacaatacctttgtggggctgattgatacttttctttatcaagtaaatgatgattttgctaaagtcattcactaaacaagttgcattaaaggaattacacgagtatcttctaactcgatcgattcatttgtgtgaattaattttggcatgtttaatgtgaattaattgaggtgttgttttaagcattcatattcacatatttattgcttctacttaataaagagaaaacatatatattttttctttttgaataatgagattactttttgaggcttacataattaataatatagttaatttcaaaaatataattaagacccctataaaaattgataatacactaattaggaatgcatattatccttaaaattcattttttgtttatttcaaaaataaaaaatgaaaattaatctttaaaaaaatttcacatatgaaaccctagggtaaaactcgatcaatacttattctcttttcctttttattttaaaactattctaaaatatcaaaatatgtacgaacccattggaccccctttggacagtgtcggaccccatcaaacacgaaatatgtctaccaatcagttagtaagcatcaaatctaaaactttcaccatcaacctcaataacttaaaatttgaaacttcttatcgaacatatatcaagtctatattggactataacccacttaaaaaaacaaaaaaataaaatcacaaaattgcagggaatgtcttcgttcgtgttctctttattcgtgatatgcatttgtagtctctccgttcgcggttgaggaaaggattggtgaggtctcggttgagaagggtattttagggtatacataaaagttgttttccctaaaaaaaaaatgtcacttacgaaaccctagggtaaaactccacccatactcttctttatttttaaactatctaacctttttgagtttgaactcttctcaattttggttcaaaaaacagacaacattttgtatcaattctaggtttaatgcagtggtcagattgagggtggtattatttaattattacttggaatactacaacaaacatctcataaataaaaggttttcacccattaaatgaaaaacaccaaccaatgacgtcaaaatgctgggtaatttcagtacaatgtacatgtatctgaactgaaactttactgccacccgcagtaattttggtacacagtaactttttctccacctaaacttgaaagttgttggtaaaagttgaaaaaaaaaaggttgaagaggaaacaaaaacacaaaataattaattattggttccctagagcctaacctagaggtggtaaaaacaggtttgaaatgacaagttttttttgtggttagggttgaaaaattaagtgccggttaaattagtgcacaataatgatattttataaattaaattaaagtatattggatcccatatttaattagatgatataggaccagtttggcactgctgtgctgtggggaaaacagttatagctgtgttgtgaggaaaaacatctgtagtagaactgtagaaaaaagctgagctgagtgtttggtaaattataatttttaaagtgctgcgagttgttaatattctattataataatgatattattttaatatacttcattataatcacaaatatatatatataaaaaaatatgttatataaaatttttatttgttatatatttttaattattttttctatagtataaattt

SEQ ID NO: 112667 - DNA, 3569 bp, Cannabis sativa
aatatattaagaatgatttttaaaaattattttaagcttaattttttgttttttttatttttaaatatcggagtgtaatagaatttttcaaaaaataattatcaagttttttaacagaaaatcttcattttatctaaatattatatttgattttctaattgaaaatttttgtagcacttgtatgttattagttttgttgtaggggtgtttctttgttttagatttgattaacttacacactactacaaaaattaaaaaactaggtggtctatttggtttatataattagacaataataagtgggaaaatatagtgtccgtattaatattccacatgctttttaatgaaaacctataattctaataatgaatgagagagaaagagaggagtgagagagcttaagaagtttaaatatgaacccaaaaaaaaaagttaatgataaaaactgaattggtagaacatggggagatagtgagaatgagttatgagggttaccaaataaagattggcattgtctaacagaactatggcatttagtaattaatagatttaaaaatgaatgaaatattcaaactaatttatgtatatattgaagaaaagaagatgaaggtggaaattaaatttgtatttatcacatgacgtaatagcatcattattgtcaaccgtctcaattactattgcatttatgtgattttaatagtctctcaatctaatgtagtcccccaatatatttttatttattaatcaatgttatacttgagctacccaacccaacctccctaattatcctcattttgttcttaccaaataaacccatttcaacccataaatagagacttcgttacacatgacccacattaaaatgtccaccatattagttgggcatttgggtaaactactttgtaaaatctaacatatgaaatatgtttgtgtaaactgatcaccctaacccaccacatccttgtcactaacccatatttattatataatatgagtgtagattcaaaactcttatatggatataaatatcttccatgggaaccataaattataaactagaagaaggtatggccaccctttttttctggctaataatattaaaatctgaaattaaagtaaatattaatgtatctgtgattttaatttttaaacagttttctgaaaaaaaagaaaaagaaaaacaatctccatacattatcatgctaaatgtcaactaagtagtaatgtagtattcgtctgaattttcttttgtgggcctagaaatgactataatgggcccccaagttctattattcgattactttttatctgttttgaccgaactgaactgggttgtttttcaggttcagaaaatccactttctgattcggacactacccattttttatttatttatttttatatatacataaaagatgaaccaaaaaaactatatttatatttttaatattggcagcatgtaataataataatacgttgtcgtttaacgttgagcaaacgaccataagaaatataaaaaaagaaaaaaaaatctgaaaataaaataaattaatatccttgagagaaaatattaagcagttactgttagaacataacggtttacattttgcccatgccaaaaccccattttgccccttcctctattttctatgattagagaacgaaaaaagaaaagaaaaatactactaaaaaaagtgctattttcactccattttccttgtctacttttttcacaatcacaaacgagttctttgtggatcacaaatccaaatacataactcaaaatcaaccaaaatttctagcattaaaaaaaaatggagagcaaatagcaccacttccaaaagaaaaaaaaagaactagttaacataatacaaatactcctaaaaaaaaagaagagaagaaaaagaagaagaagaagaaaaagaagaagaagatgttttataatagtagtagtaataatgatgatgggtttaagcttagctgttcctaggcttagaggtaggagtagtagtagtggtgttgtcatggaggaaatcaagcaaaactgtgcttttgcattttgggcatttgggatcatcttctgagagcatgacatacatgaggcatcttgggcaacccacaagcaccatggatgttgcttctgggctgttcgagtatctcacgctcatctcatcttgattcagctcagacgacacgcacgaactctgcggcgacgtcggtgataccgtcgccgatcgccttggcgactccaccagcagcgggtttgcccgtggcggcgataggttcagctttaaatctagctttggacgacttccgtttcggcggctcatatttatgtatgtgtaatttgattaattggactaattgtattaacctgtaacaaaataattagtaaacaaaagaatataaactaaactgatattattattattattataattataaatattatatacctgaagttgggtaaaaagggtggtaagagagagaaagtagaaacaaactagaatgaaattataaagagaggaagaaaaagtgaagatggtaatataagaagaagggaagggatgattatatatataagggggagttgaggaaggagggagatgggttttctttaaagcataattaagagagagagagagagaagagaagaggatttaagaggagagagagaattgaagtgttgggggtggtagaagaagatgtaaattgaggccaggaaatgtatttatggttggaaaaaatcccaagaaatatagagcaggaagtggaaatttggagtaaatatacatacataccatatattttgtaattacaacaaacagagagactcattcattgctttattagagagaggagtcggtgtttttaagttttgatgatagagagagatttagagagaaaaaataaataagttaaatataaaaaatatgtaccatattatagcagagaaattataaataaaaaaaagaggggttccaacggcttttaaagctgatacaccactattattatttttaatattgtaattattattaatattttttattttattaattatagagagtcaagacttaagagcattcatctccacctacaaattcaatacataacaccaaaaaatttaatggaaaccatgaaaaagggaagcgtaacagctaaaccaatatttaaaattgccaacaacatctaaaatttaaatactaaagaacaccgagcaattaatttgggtaccatgcacccacttaaaaatttaaggaacaaaaaaaaaaaaagttacatatgcaaacattgatattattatattatttgtgaactattttattatttacatactaaaacttcaaaatcaaaaatgggttcagttccgttttggagaaaaagttggtaaaatatggatggagttcttgtggttcccataatatcgtgacccaactccttgtgattttagctaccaaataattttcaatattgttattaaaaagtgtttttaatttgagtctctctttcaatatatatgcgtatagataaatatatatatatttatataataattaacttcttca

SEQ ID NO: 112668 - DNA, 2979 bp, Cannabis sativa
  modified_base (2307)..(2314): a, c, t, g, unknown or other
atcccacttgaccttccctaggcggtgtgggatttcactgcttacccggtatttccccttacagatcacgggactactgactgtcacatgtaaacccaaagagaaaggaggaatggggtttcgagacttaaggtttttcaaccaatccctactagccaagcagatttggagatgcattcgatttccttatgccttatgtagtcgggttttgaaagcgtgttatttcccaaacaaaaatgttttggcaacaaagagtggaactcatacctcctttgtgtggcgtagtttgatatgggaaaaagagattattttgaggggctatcgttggcgagtggatgatgggagtatggtgagggttttggaggatccatggctgtctagaccacatacttttaagatttatgacaaaccatatcttcttgaaaatttaagggttgtggatttgtttcttgttgatggatcttgggatacgaatttcattaaaactctatttaatgaggaagatgttgctcctattctaagcatgtcgagtggtgaatggagtcttgaagacaaaatcctgtggtatttcaacaagaatggagagtactcaattagaagtaggtataaaatggttgtggcaatgcgggaggaagcacttcaatctgactcatccagaattgaagcttggtggaaatcgatgtggcgaagaaaaattccactaaaagtaaagaattttgtgtggaaactatgtcattcatggcttccaactaactatgatttatccaagcggggcattcaagtggaacctttgtgctctcaatgctccaaagggaaaagagatgacataattcatgctttatggggtcgcagctatagtgttatggtgtggaagaaatgtggcttttggaagtaacttggtgacagaagaactacagatatcactaccttattaagtacaatggcacaggtttgagactctaatacttttgttctttttctagttgtggtgtgaaatttatagaatatttcatggtggggtttgtctaagaggggggggatatggttaaatggtgtggacggtatttgaaagaatttcaggaagcaaatgggaacatgaaacagggtggttcaggcagggaaaaggcgagatggtgtaggccaaagatgcactgtgtcaaagttaatgtggatgctggtttgagggagaaggaaggttatgttgctgttagctgtgtggtacgtggacatgaagggaaggtttcttttgcgactgccaaaattgtcaagcagcggctaacttctttaatggctaagttgttggccattaaagagagattcaaggttgggatacaacggggtttccataactttatggtggaatcagagtgtctaagagatgttcaactacttcaactactccaccaaattagacttttaatgcaacatcctaatgtatctgatttatcttttgtttataaagaagccaatcatgtggctcccattttagccaatcaagccttcttattcaaagttagtatatgtggattggagttttttccccttgtgttcgtcaagctcttcggttagacgaaccttttccttataattgttaggttggaatgaaatattctgattcaaaaaaaaaaaatatatctatataaaaataattcaaattaattttagaaaaaaaataattcaaattaaaaattatgaatttttttaattattaatattatttattttttaaaaataaatatattattataatatgtataaagttttaattatatacgagcagtcctatcgtaagagtatacactttacatcatagtaatcatatgatctaaagtcaatgttcaaaaaaagtttcctacctgtaaggaatttttgtttagtcctaccatagtcttgccctatctatatagaatcttaggtcacgagattttgaagataaataattttaatttgtacttgtgcatattattatatattcaatgtatacagaaagagtcatcaactttgaatgtttaaaaaagtgatatatgtagtttttttttttttttgacaacctttgggctttctaatattattaatttttcataatattttgcaattggaaaagtagtgcaatgtttagaaggaaactataaataatacagcaaaaagtcattcgcattatcattttcaagctagcttctttagtgcgtttgttcgtgaaaattactttgtcatataaaaattaatatagttcaccttaaatcaagatgacaatacacactttgctttcaattactacatctagaacataataataataataataannnnnnnnataataataataattaataatttttattgaaaaaattatgaggttttttttatttttacactttaaatcagttttttttttcttttttcttttttttttgtatttttacgaaatttacatagaaacctctattggaactagcgctgcaacctaaagtgcaacaaaaaatcgtatagaaacccctgcaactagcgctgcaaccattttaaaaactcaaaccgtaaatttttttaaaaaaaaaaagttaaaaaaatagtaattgggataattctccataaattattatctttttatcatttaaaaaaactatttaattcactaagaaatatcttacttacaccataattaagcttcttctccattttcaaccaattccaaaactcgtgatcggagaaacaggaaacaatgatttgaaagcataatcccttgaaaaggacatctataattatatttaagaggatctaaccttcacttttttaaaccctttaacatttctttatagtcttacactcacatttacactagtaaggaaagaatagtggagggaaaggggtgatgggtagaatggatggttattttttttgggttaatttcacaaatacacagaaacaacaaaaaaataacaaaaatacggtttgacggaattttaaatacttttacgattt

SEQ ID NO: 112669 - DNA, 1212 bp, Cannabis sativa
cgctcttccgatctaagatcctggtaaaataaaattccaacaaaaggggcctgacgatatgcctatattggatttgaataataatttaaaagttgaccgtgtattgattactgagaaggaaaagcatttgaatatatttaataagaaaaatgtgggccaaggatttttgtcttttgatttggctaatgggtcgcttgtgtcttctattgggccaagcattaatttgcaatgtgatgttgggcctttagtgattggtgtccaggaccacgtgaggagccctatagtaattaatgatgttgatggtgagggccctaaagggtgtgggccgaggggttctttgggtcaagacaacttggaaaaaatgacaattttgatggtgactaattctaagagtagttcagtttgtgggcaagaggtcaattttcaacatgatgaagaaaaagccctttctaatattttccaagctcaagatacttcgttgcaagagctcaaacaatttaggagtttagatttatatgagattcgtgaaattggaggtgacatcagggttaagcctacgtcggaaatcaatgctagaactactccattcaaaaaaaaagaaagcttaatgatatgtcatcttcagttttctctagaccttccaagcttctttgccaacaccccgatgtagttcgtgactttccttgggatacaaacattcatgttcaagctcccattgtggtggtggaagaatcctcaaatgacaacttgaactctataagttgttctgatgatccgaatgaggggatttccaatggaaagaggctctcttgtctcgaccggtggatgggccttgtctgtttgatgacacagactctcttggttcgacgcaatctcatacccatgtggaggagaatgttatatctcctctacaggagtcatgagaggtatgacgttgaactgtagagggttagggcagacctttacagtatgcgagttgaagtccctaattcgatcgcgctctccagactttatttttctgaccaagctcaaagttgaagctacttctctggtacgtactcttaattctctccatttttactttcatatccatgtgctgactattggtaatgctgggggaataatttttgtaaagaccgcatatgtttaatgctttgaattattaaataattaaggtttttaaatgaaattaaattaataattatgaaatgc

SEQ ID NO: 112670 - DNA, 3050 bp, Cannabis sativa
gagagagagagagagtttgagaggttcatgttttgggttgggttaagaagaaaggaagaagatgaaggtgatgatgggtgaagagagtgaataaggttagagagagagagagagagatgagagaggggcggctaagagaaaattagggttagaagttagatttatattttagggttagtttttttttttaaaatgggctaaagcccataactgaatttttttaatgtcttttttgcttcggttgtgcaccggcgctaatagtgtatataatgactttttacatcggttgtagaccgacactaataatgtatacaactttttttttttatatttcatcttttgcttcagtttttgttttagcgtcagatagatagatgctaattaataattatttatgtcggtggattactgaagtaaaaaagcgtgggttgctttttacgtcggtcaacaagtttgaccaaacacgttgaccgatgcaaaaacccgttttcgtagtagtgccaatacgaaatttttgataggtttttgaaagatcaaggcatatggtttcagcactcttgtcctcacactcatgaacataatgggggagttgaaaggaagcataggcacataactaaaataggtttaatcctcctttctcactttggccttgatatgacctattggtggcatgatttttaatatgcaacttattatataaatagaatgcctacacatgtgctcaatcaccttagttcttttgagtgcatgttttaacaggtcttgattacaacatcttaaaagcctttagttgtgtctattttcctcatttgaggccttatgatttttcctaaacttgagtacaggcctgaagagtgtatatttttgggttattcaccaaagcataaaggctatatttttgagaataatgttggaaggatgttcatagctcgaaatgtggtgctcaatgatcatgcttatcctgctctttgagttaaatcttcatctcaagtatttcttgaaccttcccttgttcctatactgctcaatattctacaaatcatgcacttgcagacaccaatcctatgcatactcttgctgtgtccaatgcatcatctgagcaccatggtgcaactccttctccagatcatacacctattcttgttgctgctagtaaccctgagaattctatctctagtttgccagcctattcaaatggcttaccattgccttatcttgtgcctgcaatgtctaattctcattcagctccctccacagtggctgtaacatcccaacatcatcattctaaactagatgttgcttttacttctttacatgttggagttgctcatgctccaccagaccctttgagaactcaccgaggcatttataaaccaaaggcatacttagctaccaaacatcaattgtcaaaagctctctttccaattgaacccaagtcgctcaaagatgatctcaaacatccagggtggtttgcttcaatgaacaaggagttcaaagctttcatctccacaagcacttggacacttgctccctatgaacctcacatgcatctaattacaaatgtgttcatagagttaaactcaatgctaattgtactattgatagactaaaatcaagactggtagctaaatgttatcttcaaaaactaggaattgactttgaggacacttttaatcttgtggttaaatcaatcatagttagattggtgctaaaattagttgtctcatctcaatgggaaatcagacaacttgatgttgcaaattccttcctcaatgggactcttcaagatatagtttatatgatccacataaacttaatcatgtctgtaaacttcacaaggccttgtatggtcttaaagaggccccctgagcatggaatgacaagctcaaatctacccttttcaactggggttttgctgtatcaaaggctgacactgcacttttggtttatggagccagttctaacttggatattctcttgatttatgtagatgatattcttgtcacaggccctaatgtcaaaggttaattactgatctcaatactgcattttcacttaaagatttgggtctagtgcattattttttaagagttgagattcatagaagctctatatgtctctatttctctcaagccaaatatattacagatctattactcaaggttcatttggagggtgctaagagttgtgctagtcccacttccacatctcaaaaactttcacttattgaaggatctccatttgaagatgtcaccctttatcaaagtacattagaagcacttcaatatttgacactaactagaccagatgtggcttacataatcaacaagttatctcagtttattcatgctccaacacatgttcactaggaagcttgtaaaagacttctttgatatctgaaaggtactatctctaatggtattcttcttagaccagctcttagaatgtctcttgaagcatactctaatgcgcaaattgggcaagctgaattgatgatcaaaggtccacaagaagctatgtagtttttcttgcattcaatctcatttcttggtctgcaaagaagtagcaggtagttgctacgtcctccactgaatttgagtttcgtgcattagcaaatacagctgctaaaatcaagtggctttaatattttctcactgaattacaagtcaagctagcagctgttcatgtgatttgagttgataaccaaggtgtagcctctttagcaatcaatcctatcttccatgctcaatgcaaacacatcaaaattaaacaacattttgttcatgatcagctgaacaaggaaagttgatgtgcattatgttcccactgtagactaggttctagacatcttcaccaaatgccttcctaaagaatgattcaagtatctcaaagacaaactaaaagtggtctctgcccctttttcgtttgaggggggatgataaccaaaagttagtaattggcttttgtgtttagttagttcggttagctaatcttgttaactaactaattctatttacaatagaatttttggttgcatttgtactctctct

SEQ ID NO: 112671 - DNA, 2104 bp, Cannabis sativa
agcaaagaactatccaatcaacccaagttttaataaaaccaataaaatttaatgtaagcccaaataaaaagtctaacaatgaccactctattatttattttctcaaattaaaatgttaagaaaaccatataatatatgatattttaaataattatgtttcagattttacacttttattatgtgcgataatataattatttgtatatgattctaagactatatatttgataacgtttctgaaaaatttatatagaaaaatattaacaaattaaaatcatcgtaaaaataattaattaaatgaaagatttttgttctttctttcatttttttgtcaaagcaaaagttcaatacaactcaaagaaaaggcatgttaattattacagactccaacgtcgtacaagaaatactccttctcaaatagcagatgcttttccaattaaaacattcttagctatgaagtgagctgcccaattcgttgaccaaggatggtactaaaagcccttaatctcaatcgttgtaacttaagaacgaattgtagtaacaagcaagtttaaatctcacattgaccaggcgatctattgagcatggtcaccacatgcacgactgcaatctgaaacaataacacaacttcttaatcccttatcatattcacagcaacaactttaaattttataaccataagttttgcaaccaaaaagagaaaaggttttaggaagaacttagccttggaaactaaaaccatcccttgattatctccaatcaccacaccactcctgccctctgtccacaactgcatctacatttatactaagatcatctcctccgccgactaccacttctcatcttgtttctcaatctttggtttccttgcttgtttagactccaagaatttctcgatgagcctatccacccgctccaatccatagaaggcatagaatgtttaaggacatcattattatgacggtaccaagattgccaataatacaaaaaaatcaaagttgccttaaggtaaaatgttggctatcctagataagaaagcaataggaccctcatcattacattgtacaagtcgcttgatatcaaccaccacaaaccatttattttttgacaaccccatatagtatggaaccaaccctccttcacatcttcaccacatcgatcacactctactttatcacgacttttcactgtgaacaacacactacttgttgggagccactcatgacaaaactttcacatgaattatttgactttaggtagcacattcaacccccaaagctttctttaccacctttctctcaaatgcataagagaaacttcacttctttccctttcctccattgccagttgataaccactctcaacagagtaatcaccattagattgaaagtaccatataatcttgtccatactatcaagtggctctaggaccatcctcaaaataatattttaatcttcttcattgaaaacaacccttataaactatatcccactcactcgaagcttctcaaagatctattacacagagcccaacaagaatacacagtttatcatagaaaaggaaggacttgggtctcaagatcgatgggtcctcaacaatgcaaaaagattcccaaaaactaattatccatctatagccttgcaagagaatctccattccccataacaagctcttccacatgaaagaaggtgaaccaccaagttttgctccaaagaagctcccattcctaccataactatgataataaactttaaacaacaaagactatggcttttgcagtagcctccatatttatttggcaacaagagctttattttgtaacttaaaattcttaaacccaagtccccctaatcttcttttgacaaaagattttctacttgcaccaatgtatcttactcttctattccgtaaatctccaccaaaattttccagccatactatgaatgttattaataatattcttggaaaactaaaaacggcccatagcataaataggtatggctaaacaatagatatgataagtactaggggtgttcattggatcacatccaatatttttaggcccatccagatccgatacatctaattatatattggatgtta

SEQ ID NO: 112672 - DNA, 678 bp, Cannabis sativa
taccacttttctatcctttcggatccatatgttgctggtgagcttctatgcacagcagcaaaaagaaatgacttggcggcgatgaaggagctcttgaaatatggactaaatgtggactcaaagaaccaccatgggcaaacacctctacaagtagccatgtcaggaaacagtatggagatggtgaacttgctggtgatgaatggcgctgaagtggttaatgaaaattcgtacgagtttccttcgacgactcttactgaaatgctgcagaagagagaggttggacatcagatcagtgtgcctgaaaatgcaccagaagaagtggtttccatacagttgaatgcagaaaaggaaggtagtgggagaaactctgttagagataacaataatccccatagagtgagtatttataaaggtcatccaatggagaggagagagaccttttgcaaggaacctgggaggctaattagattgccagcctctcttgaagagctcagaaacattgcaggtaaattttcctaaacacatttcatataaatatatataggtggtgtttggtaatatttttatctttaaatttttaaaatttttgttttgaaaataaaaaacattttctataatcatttttgtttttccccttattattttcattttaatttgttaattttatttaatttgggg

SEQ ID NO: 112673 - DNA, 1954 bp, Cannabis sativa
aataaataaattttaaattaaattgcattttattattattaatttacattcataattaattaattaattaatagctaactctaataaagcaaacaataatacatccaatatcttgaattgaaggtggatctattccatacagctatagtactaaataataaaatttgaaggggcttggtcaactgtgtatttttttaatagaatatatataatgagagaagttgatgactcccattaaggcacaaactcttaatcttcttattttattattttgtctccattgtgagatagatagatatagataccccatttatattattctctagctaattgaaaggaaataaaaataaaaataataatattaattatttaaacccacacacccacatgtaagtgcaacctagagggaggtcatataatattccctgtaaattaataaataataagacggcagatttcagtattagttgtcacaagtgggggtgttagtatttatttgtacccaaattaataacaacaataatattgacaaaattaaggatgatgcaattttcaaatattgatcattttatatgcaaatcatacttgcaatgaatgatcaaacatatatgaattactagtatatgaaattaatgaggacatatatggtagggttaaccattaagtattgatgatgatcaaatggaatagataagaaatggcttatgtaatatacatcattatcatcatcatcaagttgtagaatcaagtaagttgtgttgtgtagaaagattttgtaaaattgatggatcaaaatagcttaagaaggacataaatattaagttattctttctttcttgtgctgcagtagatgtggatagccccaccaatcaaattttcacaacatgggatgagaataatcactttcaaaattcgtcccaacacattacattttgacttcgtccgaagtagctcaattccttttcaaactacttaaatctacacagaaaaagactaactcgtttcttcaaaaaaaaaaaaaaaagaccaataaattaaaggatacatgccatgttcaatttcacattatcaatttcaaaaatttataaaaaaaattatgtattttttaaatacttgtttactcaattttaaaagcaaatttgaagcactatatttcccaaatccttttgctccgaaccaccaaacaagtccttcacttcagcattttctcttttctttatgtatttatgagatcccttatagtttatttatgggtgcagtactttgaagagtggaccaagtcatcaaatcactcatgtctatataaaaatatgttggcgtttaccagttaatcagttaatagttccccccttgaattatataaaacaaaattaataaaatcaatatcacgaaaggataccattttgatataaatattctttaaaccaagagaacatcaaactaaagttatatatatagactattggaaaaagactcgttagcctatcgatctacaagtgtgattctttttgtgttaaaagttccaatatgattcttagctatactcaataggcacttgcgaaaaagaaaagtagataaaagaaaagaaaaacaaaaaacaaaagtagaccaaaagcttttacttaatctactggatttaagtgttggtagctactagatagtgattaaacaatgggtgcccaccaacaactacagtaacataaatgcaactcaacagtaagaaatgtggggtatcaacatgccgccactcgaagaagaaaagacactttcatgtgcttggttgtgacaccacgtcaaaaacccacttcccattttcactattcaaacttctcaatcccattagaatttgttctttctttcttcccactctgctttcctctgcccccacctctttttcctgtcctaagttgcaatgccacacatcctacaactacaaaattacaaactaaaattc

SEQ ID NO: 112674 - DNA, 2904 bp, Cannabis sativa
tatatatatgttgatcaaatattatataatataatctgtaacactttgtttgcttacatataatatgtaagagtcttattatatatggtattgtggttttaattattcattatatatattgtcttgtatttatatatacaatagcttcaatagctacgtattattatagaaattatatatattaatacaaattgtaataataagtgaaaaaatttatgattaaaaaatatcatcattattaataatatttaaccctacatgttcccggctaaagagatactgaccaaatgtctttgtcgtaacaacaaaatttcatcataattctatatatggaaaagtctcctcccaaaattattctcacccatagatatacttttatgtgtaggtaaaaatctcatcactaacaaatcttaacacctagaggtaaaaactaaatatcatgcatatctctaatatttctaattgtttataaatcttaaatgatactattgatcaaaacgtcgaattttcactgttaccgagcgtaaaatatataaatattaaaattcacatacattatatatgacacacctacaatctaatataatctgtaattgaaaaatattaaaattcacatacattatattaggattttcatctaatttattgtaaacggtttggttagtctattagtgttaattttattttttcagttatatcttcatataatagactttgtccaacctattagtggatatctttttatttctctcaatatatatatccaaaatggcaccattacaacaaaatacttgaatatacgatagattctatcattctatgcacactttctctaaggaaaagtcaacctttaaatattgatttgtatggtaccaataataacatgcattggcggagcgagagggaggtcttatcgaatcatttctctcgttaaactttttataaaggctaattaattttttatctcatactttgagatgtatcaaattatgtctctttattttttttttttgtcattaaaaattctcactgaactattgagattgttagatttaagaacttttacctaatttcattcaattttactgtaattcagtgattgtttatgtactactaaaccatgctccccaaattttaatatctaccaaattatacatctcaaactttgatatgtactaaatcataccccttgaactttcatcgatgttagaatttttttactaaaattagacaaaattagtctttaaatctaacaatctcaatagttgaggaagaatttttaacgaccttaaaagtttagaaggcataatttagtacagttcagggagaaaattcataattagcatttataatttttttttatttatagattttttttgaatattttgatatttacctttataaaattaatatctttttttaattatatctttgcatattttaatctttccccataaaatatatattttttattttatctcacaatattttatttttatcttcacaaatttaaattttttttatttttatactcacatatatattttttattttttttttcttttttcatttttacacttcaaagcagtttgtttttacatttacgataatccacataacaacgcacataacaaccaatgaaacaacttaaatcgcaattaaaatccacatgataactcacatagaaattaccggagcaacccaaaccgtaaatttttttaaaacaattaaaaagtggtatataaagtaataattctcttaaaaattatatttttcatcaatattttttaacgaattttttactgtttttttattatagatatttctaattagttaggaaaaaagactaactaaattgctaaaaagaaagaaagaaagaaaaaaaaagaaagaaattgacagttacatttgcttaaatttgtcaactaattattaatgtagtcattaatcaattattaattacataataaattgttaggcatcgaaagcttagataaataaggtgaatatatactaattattagtcacgagctagcatatagttatttaagagaaaaggagaataaagagaaattaaggcaatggaggaagcaaagggagattcaaagatggaatcacagatgatgagattcaacaatttatcaatgcctatgccaatattgtcaataaaatcccagtcatgaaagacttcaactggtttgtaataataataatattctctaccttcctttttccaattatatattaatcatctaataattaattaaaatttaatttttggtgtctaatttttttgtgtgtgtgtgacaggggaaaggatgtgagctttgtgaatttgcatggagggttcactcacatacttgcatcaacctttgagagtatagaagatgtagctaagtatgtacatcatccagtccatgttgaatttggaaatttgtaccatcacaacttggaaaaatttctcatttttgactacaaacccaccatatttcttccctaatgatcatccaaatctctctctctaaatatatatatatatctcatatatattatatatatggccttgatccatgttcatgatgtgggaataagaaacagtactttgtacttgtaactagatctttttctttctttcttatattacttgtcattttcatgctatagaattagctataaaatattgaaatataatatataataagtatatattgagtgctgttattatgaatttgagtaaaaaatatatggaaattctgtagtatacccattgttcttactctcttgtctattttgacattttatttagtctattatatatacgtatatacgagtgactgttcaatggttacatttttattgtaaccatatggttacattattctttgacctgtaatagcaggttac

SEQ ID NO: 112675 - DNA, 6938 bp, Cannabis sativa
taaacataataaattttgaaagtggaggtaaaaatgaaagttatcaatttaaaagaggtttgtagtgtaatttcctcgaagagttatggcttggttctcggcttgggctttaactgggcctaaacaatccttgtccgcccactctaatgggccatacctctgttggcctctagatttgggttgccatagggcacaattgtttccttaccggaattttcataacaaattttaagttataagattgcaaaaatatagtttttttctagaatagtattaggtagctagttaccgttttccatagtttttcttgaatctttgtcatatttttttttctgaaaaatgaaaaaagcaatgtttttacacaaatagtataaaaacccattaaaattgtaatttcatcttttgttattactatttaatttttagaggtgttaatactacattttcatgcaattatgtgtgtaagaagaggtaacataagtaagtgtatgaatatgattatcagaagggagggtacgtacatttggttgagtataattgaataaaaagtagttgaagaaccaaaaataaaataattgcgtttgttgaaccactcaaaccaaatgtgcctctactcttattattattacaaaatccaatatatataaataattaaatcgtctttctctttcactaattaagatgtattattaagaccaagacaaaatcataaccacttgtcacgctcccaagtgtcctataataacttataactataatctctctctttgtttttcattattctaattagtaattacaatctctctttcttaatcttctaatgtcagcttttttctaaagttatgtttcaattattttaatttcattatttggttttgttctaactttcataacaaattttgggtgtaaactatctccttctctcgtttggtgttgtgtttatttaattatgactttacaaagactgttttaaaataataatattacaaaaaaaatatattttgaaactcaatatggatagtaaatacatatttttattttgctaaaaatatcatgtataaatatatttaatgcacatatatttgatgctatataatttggtatagaaataaggacccttcttaaaaataggtaggtgtatcgaaacatatgtttcatatgtaaatccatgtttggtatcattttaaggtaatctcatttcttcaattaaaactcaccaaatcaagtttttataccaaatattctcttaatgataatatttacatgacttaatgcagcgtaattatttaaaatattttacaaatttttgtaaaatttcaaataatttagagtaaaaaataaaattacttataaataataataataataaaaaaaaagcacatgcaacataaccttatttttagtattctatatctatattgttttgaatttttcaaatttcttagaattcgaaatatgtacgatgtagtatactatgatagaaacaaaataaagttacaataaccatgtagtattcaaacattttttaataaaagttaaagtatctctaatattattaattacatacattatcatcgtaaattcaaaatttaaaatgagggacgtcatttttttttaccaagaggggcaaatgtaaactatttttttagataaaagaaaatgctattataggatttgaatccttcacctgtgtataaaatatagcatacccattatactaaaattaacattatgcctataaatataattctttattacaaatatatattacaattaaatgtatatacatctttttctcaattttttttaagaaataattgctatgtgagtctatccatatattatcctaatagaatttacgtcgaccggtataaaaaaaaataaaaaacaaaacaattcccaatatcatgctgttgttttttggcaccccatttaccaagttaaaattaattaaacaaagtcataaattttatatgatatgataaaatatttgatatcatattataatggtaagttttacttatgatagaagaaataatattttaatataaggttttatctaaatgatgaggtttttccttaatcccaaatttctttctctccagtccttttctaatcacgttcacgccaaaccttgtctctctcattcatttgagtcgcatcacagttacgataagtacgcatctacgtgatcacaccccacgcaacggccggccaaactttcactcctattcacgcgctgtaaatgcgcgcgtgttgacactttcttcttgttaccacagatctccggaaaaaagcacgagccgaaaaggatttttcacgccaagttgccaaattgaccggttactttcacacgtggcggaaaatcattggttggtggtaaattttgcaggtgaaactgaaatacagagaatcattgtataaaatgaggatgagaccccacttatcaccaccaataattgatcattcttctaatccttcctgtattcaagctggcaccgccactactgtctccttcttcttcttcttcagaaaaaatttctaaaaccctaatctcgattcagtaatcgagctctgtaaatagctataatagttttgaatatatggtttggaatcttataataatcgaaagatctattcttttctccgcattgttttagtttctttaccaaaaaaaaattaaggggaaatggctttgttacctcttctatggttcttactcgcttcgttaatcagctgtacgaattctcgacagctgaagaaggaagagacgatatatgaggtgttgaaggctcatgggcttccgatggggttgttgcctaaaggtgtgagggaatttgatattgatgagaatggtcgattccaagcttacttggatcaagcttgtaatgctaaattcgagagtgaattacattacgataggaatgtttcggggactctgagttatggtcagatcgggggtttgtctggaatttcggcacaagagctttttctttggtttccggtgaagggtattcgtgtagatgtacctagctccggtcttatttattttgatgttggtgttgtctttaaacaattctctttgtcacttttcgagactccaccggattgtgtggcggttcgaactgaggaggagcagagtaatagcaatgctcctgtagctgagactgtattcaaggttcattcaatctcattcctttcatgatttttatatatcgtattttagaaaattaaaaaatttgaattttgattaatccccatttgttataatacacagagtaatttcgggaaacttcgatatcaacttgagcaggaaattttgggaagagatgatatgtagtatcagtgataaaaaggaagagagaaagagagaaaaaataaaataaaaaaaaaggtactttttgttctaagttggcctgtagctcaatcagcatatgggttttctactcaaccttgtaaatttttcagtcagatatggggtctactcaacagactttcagtgtgtttgcgttttcttttttcttttttctttttttgttccatatagctgcagagttcacaaactatagtcttttccagctcatgtcgaggttgactattgaggggagggtggtcaacgaataattcattggagaggaaattggattaggggcggcgattgtttcttacatacataagaagattcaagtgaaacaggatcattctctttcgggttggtgtcgaggcgaattcaggtgacgattctgcaggtttacattgttagtagtttattgttataataaacatctttgtgggtggatgattatgttgagtaccgtttttgtagtaagttttttttttttattattttatttttagattcatggagaacttggacacagtttattattatacaaaagattcaacaataaaacatttctgtgcttctactttttggttccaataatgttgttcctttccttctaattctaactttctcacctttgttggttttgcttcttttctttgcttttttacttcttgtgtttttcacatggaattgactgaccagatgagaggaccagaccaatgaatgtgattactactactaaccaaaatttactcttctgattgagtacgtactaatttggcaatggggacttatatttacattgttatgctcaggtgtaaaccttgaagaactctatttccattgtcagagaagtgatgcttaggagtctaaaattctgcaaaagggatttttgatctagaggtccttttctctaaggccaaatttttttgtttcctttcttctttcctaatccattacaattattattttttacattattaacttttggtttggctaggtagaagctctaacactcccatttgcgtatcctaactggttagtgatcacatgcttgattttcttgtttaggtattcttttcaaaacttctttaggtccttttttttccctttctttctctaaatggtctctcttttttgcacttttctcttgtgtgggtcttttccactctgctaatacagctgactgataagtgacatgttacctaattcattgatgcttgaaatgtgtatccctttgatttggggctaatgacatatataagaaagggacttaaaaataaataatacaaaagagtgagaaagaaagaaacaagtggtggtagatatgccaatgtttcaggttgggagtatgctaactctccttgggagtgcttaaggttgagggtgaagtatgagagcactggatcagaccgtctatgccgaccggagagataccctttaacatcattctgacaggtatttggttgctttaaaaccccgtgagagacagcttgaactggcaaaatttgtttgattttgcaaatgtaagctcatacacaatatatcataatgcaagctggattgtttttgtcctgttagccaagccaacctcatcagtcattgctattaaaccccatattccacagactgatcattcaattagttccttctcactctctcctgtttttcttgtcttcaactaaccatgaacacatactaaactaatcattggtttattcataattaacattgttttttgtagcctagtgttaagctaaccttactttctcgtttattcaggaaaagttttttttctttctctcaggttcacattgcagccgtttcattaatataagattagtactagtttatgggaagttttttgagtgcttatatctctttgatggttttaagttttggtggtatatatgttgtattatttcatggaatgatatgtatgactatgtaagagaagggtcaggtttgtccttacatatgagaataaataaaatatgtaataataattataaccaggaactagatctcatctctgcactgtggtattgttttttgttggctgtgtcattgtctgagctctcgacatcccatgtgtactgacacccctagtattaagttgatttaattaggcatattcaagtggtcctctttctcttcttcttctgattattattatgtatgttaggtggatattataacatacggatagacataatgacaatgcaaacaaatacatgaccagtagagtataatagcatggtcaaagactcaacatgactttgtgtgttcattctaggtagaataataggttatccaatgttcatgtttatcatgaacaggaaggaaaaaacaaccattatcccttttgttatttatttcaataatgaatgagatagcaacccaaaaacaaaaataaaagcaaagccacagagatgacaatattgtttattcaacttttatctttgttttcatggcttatgcaagctctcaaacaaggaccatcttcttccttccccattgataaaaaacacagcaatattctaagagaaaaaaaaatagaaaaaaataaaattccttttttattattattttttaataaaaatttaaattcccctttacttatgtggtgtttccttttttgattttgttgctgtaattacgcaaacaagagacaatttctaatcataatttctcacttaaaagtagacttttgggaacattccctacctctctatttatcaatttatttccctaacttgggaatttgacaacttttaccaacaaaatttaactacatttgtctcttttagttggtctaatataatcctacttacagtgagatttatatgatatgatgattgaaagcatccaaagaaagccaaccatggaaggaactcgagattcacaacatataaatatacataatatattactttatagattcactttctcctgtgaagttgtcaccattttaatctagttggcaactatgatttttagttggattttggccacgagccatagatattatactaaggacaagtctataatttgaaaatggaaactaaagcatccaattataaataaaaatcatagtcacctcaccatcataaaattgacttgagctaaggcgtaattttctttttcttatcttttctgcacaaaaactataatacttttcgttattccttatagtgagggacatgatatatattatccatattagtctctgacagcacaaaagattattttacaccactcacactcccatatatgaacttacccttttcttgcacaaaaaaaaattacccttttcggctaaggcccccaccttgttgagccaaatcccaaaagtttactattttaaatttacattattcttctatttactagatttgtttttgtacaaaaaaaaaaaaaaattgttttggtacttcaaattcaaaatatgtgagtgcagagcaatgctataaattatacactgttattattattattattattattattattattaattgtacactcaaagtagtttttttttttaaattgtttttaaaaaaaaaaaaagaagttttttttttttttt

SEQ ID NO: 112676 - DNA, 6216 bp, Cannabis sativa
  modified_base (6141)..(6145): a, c, t, g, unknown or other
gcggatgcttccgccggtaataatgatatctgttgtagtgcaatgtgcgagtagagtactcgcacccgttcgaattttaaaactattctttcatttattctaggaacgttttctattttaattaagtgtaattaatgttgtaacagttatgtctgattatttggtgtaatctttatttacatattgtttatattctactaatcattgtgttatattttgaatattcgtaattttaggtgaatattagtagttctgtaaataagtattcttatttaatttgaatatactcgtaattttttagtgttgtttaaattcctctgaagatacaaattaatcacagaactttggattgtgacagtaagacaacggtacaacccttgaaattgaaaataaactttggtagaacaattatgtttttaagagggaatttagctagtcgtaatattacttaaatcaattaacggtggactataatgtatatatattacatcttttaaattcagctattttcttctcacgatcgagtctttgattttcttggagttcgaacagaaaaagagaaggatttcgtcaacaaaaagggaaggtttttgtatccaaaacccaaattccattataaactggtactgaatatatcttttattcattaatttttctttattccttgaaatctttatcaatttataatagattttcactcatctaaaataagaatctaataaacttataattaagtagagagatagctacttcttctttgacttctttattaattaacatatttcttggtcaaactatagtaacattaacatatatatatatacacattaatttctttatctttctctttataattattactgtaagtggtaattttctgttaatgatgcctagagacaggacatttatcgtaaatgacaaacccttcggatgaaactagggcagacctagcagaacaactagcaacgtcactgaaaatgacaaagccttcggatgaagctagggcagccaccaagaaaagagcagaagaatttatgtcaggattcaaaattaatgatcccaaattttggagatcgatgattccatcagctgtcaatagtgtcttcttgctggtatatatatatgcattgcatgcatgtttttcatttcaaatttgtaatttttttatgttataatttattaagtcattaattatatattgataattagtgcatgcatgaaaaaaaaaaaaatatttaaacaaactagataagaattatatataaatatagcggtaatttgattctttattgttgttgggggctactatagcgagagaaactgcatccttctctttactccccaatatttttcaaaatgaagtgttagagaatgtaatgataaagttgtttttgcttaatttttgtttaattaattatcttatataacatgcagcgccttccgggtgatttttgtacaaagaacctgcctaataaggaagataagaatgttgttatattaatagataaaaatggagaagagtataaaactgtgtacttggcaaagagagctgcactaagtggtgggtggaaagcatttgcacttgctcataatttgatggatggggatgttctgttgtttaaattaatacgtccttcagtttttgaggtgtgactctagcataaaaactacattcattttatataaatatgtatatatatatatggtgtatgcaacaaatttataatattatcgaatttttcaggttttcatttttcgtgtgaatgatccagaacagtggggttacgactagctttaactcttcatatgctactgaatgatcagttccattaattaggtaactagtttaaattctctactctttgtaacaattgttcatcacagcttttacatttctatatatggctttctatgaagatttgaccgttatgttaaatgacacttttcaaggtaattaatgaaatagaagtatagataggatattttttgcaataaaatctaagtacattgcatagagagctttatttttgtgtatatataacgctatgagattgagataaccccaatggttgtggcactataacatgatatatttgaacaacattgaaagaaaagaaagaaagttgtttataaaacgtaatgaacatgaacatgagatcacaatatgtatcattatatagacaatttggccccttgaagaaacaaaaaagagaaggaaacagtgtctgaccacacacacaagagtgtagcagcgtgtatatataaaggcactatgcatctatatatgtggacttctttgacttattactattaggattagtagtatatatctaacactactaattacaccaataacaatataagacatttaaagctattaaacactactaatattcgagtacattttaacatttctccattttctaatacagtcttttttgcaaattattcatgaaatttgatgtgaatatttaacgttgttaattaattgatcaaaatgatttcttttattaacactatatctataatgacttttctattgctgcaggtaacaaatgaaagattaacattgatcagtacataatactatatgataatggcatatatatatatatatatacgtggacgaccggacgtaaaagctaaagctttatctcaaaatgtgtgttacattcttttgtcgttttgtattttaagtaaatatgtgtgtaaaatttgaaggagatccaatcacctgtatagatatatatatatacacacattatttttaggagtggaacgcacatatattccttttctatttctttccacttatttttcagaattcatggtgttatttggaatgtaataaaacattaaatatgtttagatgagtggtggagagaggtgtttgaccaaaaatgaaagcagtactacttaacctgttaggatagtggaacaactcagagcccatgtgggtttcagatcctcaattcagccataaagaatcctattaaagtttattgttgataaggtttatatatatatatatatatatataaatataaactcttattattaataaacaacgtccccccaccccaaaatattactccgatttcaacttctataatagtctcttcaagtaatcttaaaacttagaattgtgagctgtttatatgttacttgtagaagttagtgttgcaaaaatgtcgctttttattttgttagtatatcctaaatatttatttaattaatgcttgaaataaggtttttaatattaattatgtgttagactaaaatgggcaacaagttgtagatagttgacaggacatttccagcttgcaaaggcaaaattaatagaacatgccttctggtcctggcgttaccgtgtaacatggttgcaatcttctaattttatataaatataaatttttccttttgtaagttcaagtgaaaaatagaaaagattgaaataataataataaagagaagatgagaaacagccttttaaaaagtccatcatcgatcggctcctgaaacgagaagccagcttgctaagccaaatgatgagttttttaggagccgagccgagccgtagaactataatattaatcgatgttattaagggcgattttatcatgcaagggagactaattgattgacttaatttcacgcggagttggtcccgtaacaaccattgctcgtggattctactccaacacgcgcgttaatcatacgtgacttacatcagttgacccttccctaaacattagctttcttttcgagaaaaagctttgatttggaaagaatcttcacgcgcctttgatccgcgatgcaatgactttcatgagtttaacagataaatgacgccgaaacatccggggcttccaagtggaagtcaaaggattaggttgcagaacaaagtggtgcccactgcccactgccaaggataagtgggcctaggtccatgggcccaacgcctcaaataaactcgaaagaaagacctctcaattaggacctgcattgacaaagccaaattttacatataaaaaatatgtattattctttcttcttctaccaaaaataccccttccattattttactaaacttaactttccctctctcctttcctctatcagagtctatcttttcctttctcttctctctctttctaccaaccaccaccactatttgccaaaactattactaccataccaccaccaccaccaccaagacagccactaccaccgccaccactgagagcaaccaccagcatttgcaaaaactacagccaagctacaatggtgcttagtggaaaaatatgtgtaactaattttacttaaaaatattgttggagtcagttatttatatgtatgtagtttgtttttaacaaatgtatacatttgtacttgtaatttattgattttgcccaaaaattggatttgtaattttttgtgctttttttttttggagtttttttgcgataattcacgatatttttgcgataaatttttgatattacaccaaatctaaggttaagaattacgttttacgataatttttgatgttttacaatataaggataaaaaaaattaaacccttgtgtaattctcgacgttttgtgatgatttacaatatttgcgatgtgtggccaaaaaaagaaagcttgagtgtaatttgcgacattttttgatgtttcacgattaatttgtaatacatgaagaacaatttatgttacaatttttttgtgatatcttacagtaaaattttcataaaaacccgattattgtgtttaagcctttttcttatattattattatgtatgtcgtataaattttacgttcttcttaatggcaggtttaattatgtttttgcttgtgttgtatgatgatgtttggatgtgtcagggtttcaattagattttaagagatgcacatagtaaaactttcaaggttgagatgtatataaccttacaacaaatgcatgatattttatatgaagagttggaagtggacctattggagtacaaatttaaaatggatgtttcttgcatgtacattaaaggccaattgattctggcgaagccttttttccatgagtgcaacaatgactccatctgaagagggttgtaaatttagggcctactctctcccttcgtagtgtggttggaactttcaatatcccaaaaacaaacgttgttgttggtgtgaatgaggaggttcgtaacaatatagatcaacaccaaatagataatccaattgatcaatgttatgggtacgaccctaattatataaatgatgatcctggtgttgatttgaatagggatgacgatgaagagttggaagtcaatgaagttgtagaggtaccttacctttggatataattccaaccaaccatgatgcagagccacaacgaaagaagactcgtaacgtaaatcgccaaacatcaagcacaaatagcagttataagcgtcataagcgtagaatagaagaacatgtgggacgtagtgccattctcttcattaggagattcgtgacaatatagatcaatatcttggaagaaataagcgaaataaggacaaagtttccaatggagaataattctaaattatttagtaatatttttaatttatgatttcttaagattgttaatctcgcttttggctaaagacactgagtctattaaagagatagtaattgtagaaaaagtaatgatgaaataagaataacgaacgacacaatatttatagaggttcgagcccttataatagtaacaacttattcccctttagttgtattactatgaaaaactatcaagatcacaacgtctactcaggtgagtttctcaatagctcttggaaagtgtacaaatatttttgcagagtgattgttctcttttttatgcgaaagaaggtcccttgaatagtgagatgacttcattatttatagagaaatacaaatacttttgttacaaaataattggagataaattagggaggatttgaatatgcaatcccacgattctctccatttatcagatcaatctcatgaaaataggaattttaattgagctataattgtagaagcagttaaggaaaatatcttaaaatatctttcagtgaagtcccctagtcgaacctgttgggctttgtgccctannnnnaactctatttcaatgtaatcttttctattctattatcaataaagaaacagatttaatttcattacttgttt

SEQ ID NO: 112677 - DNA, 2867 bp, Cannabis sativa
  modified_base (56)..(66): a, c, t, g, unknown or other
gtttattttataatcattttagaagttcatatttagtgtgttaatcaacatacttnnnnnnnnnnntaagattctggtaaaataatttccaacaaatgcaaccgtggaatgagtaattataaggttcccctcttgcatataaagctacttcttcccggataatgaagttgttatgttccctaaagcccaataagaacatagtaagtaaaggaccaactttagtgacattcgagaagaattcttagttatttaggtgcctaactagtcatctactctattgagataatccttcagttgatacctacgcggatccaaactcaagaaataattgtcaaatgccccttggtctatccgtgacattcacaataggctaggggtatgaattacgcgaaagggaattttacctcttcctgaagtgcttgtttcgaaagtgcttgcatcgagatatggtgcaaaaaatctagattaaatctcctcctcctcagggaggggatctggatgatgactagcccatgctaaagagagaagctcctcatcctcggatgccttagttatcataatagacaattccaaaggagcctgctccttaagatcattgggaatctaaggttgaactctgccacttacgtcgtgaatgctttggaaattggctatcaagccatagtagtgcaacaactcagtattcactaagttctccacttttagttcctcctctaaaaaagcttcgtataaagttatcattacctcaatttatctgttagcacagttgtcaagacaaattcttctagagaaagagttggaactcgcttcatggggaagcctatcgtaaagaaccagtactcaagatggtatgggtagtgggaggaggtatttgttggacatcaagtgcgcttctactactgaaggtaataaaatccaatttttgtaagataccctcgcatgggctgcgacttcatctcatagaagtataatatttcttttgggttcgggcggcctggccccaacatttacataatacaaaaaactcggagagcattctatacgaaaattgaaggagatggaattgagaaattctgactttggtaaaaaattcggcgaagtaggtcgtgagtggaaggtgagtcccgcatgagaagtgagcctagctctaagctctcaagccttctacactttgggatggcattttcccaaggacagccatctggtgccacatgagtcttggaatgttccatacaaaaccattagtggaatacgcctccaacaggccataattcctagcgcattttcgctctaatttatttccaaaatataattgttcaatacaagaggtgacaaaaacatggcctgggcttttccttttcccttgtcttttcatccctgtctgatccagaaaattttagaaggcccctcttctgcagctgggtctataggatcaaaaaggacattggatgcatccatagaagacactctaggaacctcttcgagattcacgagtgccaactggaagtcattatcttcactagacactgtaaaaatggaaagaaaacccaagcagtcaatatcccatatccaaatgacaaatagggtatcgggcaaggcctcccccaaatacttcttggagaggtcccctccggactcatcatctatgaggtcatcttcacgaagaaacctattatgctgatgaatcgagaatcgaaaaacactacagtggcaaagaagtccaaacattccctttaaaaaaattaacataaaatatatatgtagagaggcagagggaaattgtcccaaaagctagtttcaacccagaaatgttcgacctaaacacccgaacaagaatatttcaaataacacacattcttctctactcaacctgaagggagaataccttagcaaagccctagctctagagatatttaccccaaaatttatgcaaaccaatttcacatatagtaaccctaattatttaacctcaatcctatgcatgcacaacaacaaattcatacaatcaaaaaactacattcacaattgaatcaagaaataaccgtttgagtgggataaatgcttacttgtagaaagattcaagggaaaaaagctagttgctagttgacgttcaaagttccacaggttgcgtaatgatctggtcacgctgtgctcctagaaaaaacaagcacatctggacttgtactgtgtgctagaaaatatcggtttctttggagaaggagaggaagaatctagttcagaagagtatgtgagggaaaaggttttttgtaggttgaaggtttcgtctaaagaagttctctgggtaaaggatcgttgcttaaggagaggaagaaaagtgagcacatttactgagttccccatttatatgagtggcaacagttcagagcattttgaaatagacaaatccaattacatcgatgaaaaaagatgcttcattcgacggctggggacttgaagggttttaaatttaatgcatctaaagatagacaataaggcattcgttactcatcattttgtggtagcatcagcaaccatgccataaaccttgtatcttttgaagtccagctgtcattcccttcccacgagaaacacgcttaagctcaaagcctaagatccatagctccactaaacaagcatcatgttttagcaaaacgacaagcataccaacccctcagttacatgaggtaatactgaagacttcttccaaatcccaacacatctgaaaaatcaagatattaagttaagcatctggaagtaagctacaatctcccaacactcacaagtcctgggagcttggggctaaatgttattcgtaatcttggatgcatgatacgtggcaatcacagaaaggtgccacctcagactat

SEQ ID NO: 112678 - DNA, 2722 bp, Cannabis sativa
agtgttcggtctcgggacatctgagagttgtattttgtagtcgttgtgcgacctgtatattatgtattttggaatattatgtttgaaaagtttaaaaaaaggggataccagcacttgtaaatattttaatatattataaaatttattaattaatataaaagttttagtttgacacgttttttgagaaaattctttgattagcaaagattgcattgtaattgaaaaagtactgtagcgtactttagcattagggcgttacatgaattctcattattcctatgagacgatctttggactcctactcacgttcgtcttgaagctgtggcacctagattttgaggatcctctctatcaacatgaacttcccttgttttccttggttgttgttcttggagtgagaaaggttatttagattgttctcttttacattgggacctcgtgcccttctattttgtgatcagtgaggtcttcctcgtagtcgtctaactagagattcatcttgtaaaggtggtgcatcattcgagactactcttgcagcagtagtcgcgctctctagttcctcttttcttcagtttgactcagcgggtctctaccgaagttgacgattctccaattccacgattgggacatatcttgtggggtcataggcatcaaaactcctcctttttggaatctcttccccattaacatctctctcaaaatcccattcagtaggatccctcctctgattcggtgtgtcttgggtttgagttccttgtggttctttccctgaatgatgcagtgtttcttcttgttgattattttcccttatggaaaaactttcaagtttttcttttatgaggagatgcgttttttttagagttttaacttcaaaaagactctcaatgaaagcacaatattattaactcggaatttcattaacaataaatgagacctttttttatgatctaagaagataactttaataaagcttttgaggaagaataaatacttagaataataaacataggatatttacgtagttttgtagttaaatctacataatacgagtcattcttatttctactattttgtttatagagtacaaaattcaagtgatacaaagaaataaagataaatttcactcagggtgattacttaatcatttggtcgtcctttgcacagttgtcttccctcctacatataggatttctcttatgacagttatttcttttggacttatcataataattgctcatgaaacgtggacaatctccatatttcatataattacgtgtgataaaaatgaataattgcctaataaccgttatttgatttgattcaataaatggttattttaccgagaagtcttcttgtactgtgctactcgcaaataactcttagtagttctacatgtggattttttaagttcgtctcgcattttaaatactttatgtagtgactcatcttacctctgtatatcctgtattttcttttgtagtgtgtatgttatgtacttaattactctaagatgattgtgatatatggtattttgttcttgttggtttcctattcttttttgaaaataaagcgttatatatagatatgaaaattagacttcacagtcattacaaaggatagcatcatgtatcgaggagggctccacaaaacctgaaatgttctgggcgaatgcccatctagccacattatgggcagcgaaattacaacagcgagaaataaacgaaaaattacaagataaaaagttttgagagagttgattacataaagagacataattattaatattctaaatagtgtagtcctttcagcactttgataaccatttctaaatcactctccatcaagacgtagttgtgattcctgagactagccgagcccaaagcaagacgacacgtcaccgcctctcctatcagaggatctctaaagttgagcatggtaacaacaacccacacagcagatcctatgtgatccctagccagagccgcaatacacatggactctctcccaacattggcatcacagttggtttcctattcaacgattaatacttttgactcacctttaattatttttgaaggtaagacttaaatacaaaaccgtatagtaatttccaagatactttaaatacctttaattattcttttaaataccatataaaaagtgtattcttttttatttttacactcttgtccatgtgtcgtaactatatttactgctcgaaatatgaacataacaccatataatgtatacatatatatactaaatattacatgcaatgcatgtttacttggagttacattaaaattgttatttttgtcaaaaaaaaaaaattgttattgcctaattattattattattattattgaatgggctattacccaattattaacttaataataaaaataaataaatctaatataattcaattatattttttaaatatataaaatttaaactaattttaaatttatttataaaaaatatgcatctagataattttattaaacaattaaataactaaataaatttaaatattttaaataatataactaaacaattttttttaaaaaaagtaacaattaattaattgatttaaaagaattaattttaacaaaaaaaacattaaaccaataatttaaatagccacatttaatatacaaaatagatatatatatatatatatatatatatactagtgtattgttacgtgcgatgcacgtat

SEQ ID NO: 112679 - DNA, 3169 bp, Cannabis sativa
aacaacaaaatagaacaattaaaccaacaatgaaacaaccgtaaaaacttaacacaacacacactattttttaaaaaaattccgtcccacaataaaaaagtaaaaaaaatgaaaagttcagtatgtggtgtaaaaacctcattttataatggattaaatgaatataatctcaaatttaattttaggttatgtttagaagtttgattttaatgaaaaaaaaaaaatgggaaaaaaataaggaaggggtatgaaaagaaaaatcatgttcgatgtgaaaattagttatttttcctatatttttcttacatttttctttctctaccaaattcgaactttcaaatatacccttattatctttcttagaaaaattacactttactcttttctttctttttgaaatatcacaatttgtagcattcataattaaatacaaaaatatgaataaatttttgtagtcactttgtaacaatatttatttgaattgtaaatattgtttactaaatcagaatacaaatttgtaggttttaattatgattttgtaaactccagttacaaaagaaactgtattatcacaaattcgtaagattttgttaccagaattatactcctttatattgttgtaattttctctggattctgtatttttcaattttttttaaggaattatgcaattttgaaaagttcccttttcatttttacccttatatctttatgggcaatggatccatttacaatacatgacaagcccaagtatagatatgggtataaaaagaaaaattgagaaaattacattatacccactttactttacatgttttaatttttaccttcatttctaaatttttaaaaatatacctacttttatagataagctctccattatacccttagatcaatgcaaattatggttaaacttaagtagagagtgagggtatattaggcaactcactcataaaagtgataaaaaaaaaaatatatttctaaacttatccctaaaaagttgctaactccagcaacatgttacaattattaattcaaaattaataacatttcctatagtttaaaattaaagataatatcaagtcttgacttgtgaaattattaattaatgatataaaactaattttatttcaaaaaaaaaaaaactaattgaaatatttatttattgcttatttcacattacaaaagttacttgtaaaataagttagtggcatttttcaaaacgccaccaatgacagtttagactcaaggatattaatactagtgcaaactaaccttattttgaaatgtggtaactggtaagcatagattttgtcttagaattgttatgcttcaaaattaattgttaggttacttttttatgtggtaaccaataattatatacaattcaattcaaaaacaagtaacctaaagagttagaaataaaaaacttttcttacattacagcatgtttactattcagcaatgataaaagagttcctttacaattgtttatttaatttattatttagaagaggaaaaaacttgtttaaataaggtaaaaaaaaaaaaaatagagaacttcccctgttaattttctaagaaatgtcattaagggtactatcttttatttatttttattttatcttttaatattaaatttataatgacaattttatcatttaaaatatatcttataaaataattaccacatactatagtttaattcaaaaaggcaatttaattcatttaagtattctgattacgtttcctgataaagtaaacgagataaattactattatttcattttcaagcaattttaataaacaacgtattacaaatattaattccgattatttttcatttattctattatgaattaccccatatactattttttaacttttttttttctttcaaatttacggtttgggtttctaaagtggttgcagcgctaggtgcaataggtgtttctatgtagaattccgtaaaaataaaaaaaaaaataaaaaaaaaactgttttaaagtataaaaatgaaaaagtccctattttttattaatttatttcgattctgaatactgagcagtattaaacgtgccattaattaatagatatagagataaacaagtcaatatttggtaagctgtctaaagcagctaaacttaattctaaacaaacctatttcaaaaagtgtttcggtagttctcttaaaacaagttttaaggtaataattaagtatcttcaacattacattacgggtgtttacaaattggtttggtccgaatttttatagtttttgaaccaaaccagtataacggttttttggaatattagaaaccaaatgagaccaaaaaatttctcaaatcaaaccaaaccaataagaactatttggtttggttcgaaattacgatttaagtggaatttataattattcatattttgtaagtaattgtactatttttactaaatttttaattttatttttcaaaatatatatttaacatgataattgatagatctataacatataaataatgatataaaaatattctcaaaagtcaaacataacataaaaatttaaaattcatgtaataaaaaatttgacacacaaaaaagttataaattatacatatagtcatatataaaaaatatataaattaattatttattataaacgatccggttcggtttaactgttaattatttatctcaaaccgcaaccgaaccattacgccataaacggtccggattgaccaaaccatcagaaacggtgtcccgagttacggtttacaatagttcagattatagtaatccatatttaaactgcaatttttcagtttatatgaacagccctacatcacataatcaaataagttactaaaaacataacttaaaaagttaagtctatgcggtaacattatgtatcttaaaatcttttgggaacttaaatgaatttgtcccctatattttagattttgttttctttacaatatcaggttactactatcagaatatttattttacaaattgatatggtagtaactaattatcactatccaattttttgtacgtaggtaattattattttgaatttgtgttttgcaaaagtttttaattggaccttctgttttgttaaatgataaaataaaccatgtattttctaaaattatataaataggaccctaaa

SEQ ID NO: 112680 - DNA, 3249 bp, Cannabis sativa
ctgccgctaaatcgaaccagaggctgaggctgaacccaagcaaagagcataagcctgagagttacgagggcctgcaactggatttcactccgtcgattttcagttctctcgagaggtttttgcctcctaatttgtatactgttcctcgtgatgacaaggtcaagttcatgagggagattttgcttaagtatttgcctcatggagagcgtaacagagtaagtttttctctctctctctctctctctctcttaagctgtggttgtttgctaagcattcagaggaagatggtggaccatttaactgaacggctatgcagtgttagtattgagttattgatgaagaatttgagctacaagagagaattagggttcgaggattatattgtcctataacgggcatgttattcgagactgaaaatacgaaaataacctttagcgtgatgcgttttctcttttcttttttaaatgttcttgacatcaacaaaattagagtgctctattttggccgaaggattatcatttcatttatgtataagagtcaacattacgagtcggagtgaaaaataaataagcttcccaatgtagcatctcggttatttaattattaagtttggcattttgacaaacatagtaaggcattggcatatgcgtcaagatttcatgagagtcaaaataacttgaagttgtcttcaacttgtacttttaaacaaggaaggaaatctggcgttgtcttcacatgtatttttgaaagaaaaaatgggaaacttgtaggtgggccaatttacattttttggtgctcaaaaatcatttagaaaatggctttgttcttggaacaattatgctggggacttcttttactctgttaattctatgttttgaacaggcattttgtgtttgtgactgatttaatggtatgcttttgcgcctattgcttgacgtgcaagcctttcttttaattgttctcttggggataataaatattagctatatccttacaatttggatgtatgatgtatctacgcaaatacatggatgtattatgtatcaggttcagaaacaaagggagtacaggcagaagataatatcaaattatcaggtatgtggcactgtaaatgtttgcttaagttcgtgtgtggtaaagccgaagttgtatactaaaagtacagctaaaaaagagaataaaaagacgaataatgtttatttttcttgcttgtttctatcggccttcagatgaattgactaatattgatgctgtttaattttaatatatttatctttttcagccattacataaagaaatatacacaatgcatcctgcaagcacatttgttccatcgtttctaaaagcaataagtgataatactgaggaaagctttagaagtattatgtctgaaccctctcaaggtgtttttacatttcagatgcttcagtctggcttctgcaaactgctgttatctgaggtatttgcttgccttttatttttggtggtgggaagattagtgaattatatgttgaattgtgctaagtccttttaaatggagcaatatgccttctagaatatgttcactgtgtctaatttccctgcttgatagtcaatgattaaagtagtgatggaaataatcacatcagggaaattgggagaggggatttttctctacttttttctttagatttcatctattatgtttgaacttcaggttgataattttgaaaagtgggttactgatgtaaagtttcgaatcatgagacctaacacaatgaataagtatggtgctgttcttgatgattttggccttgaaaccatgcttgacaagcttatggagagttttattcgtcccatatcgaaaggtgaaaatgattactaataatgtatctgccttttgcccctatcattttcattagtaccatggccatatattcaagccttaatttgttgctgtatttcgtcatgcagtcttctttcctgaagttggtggagcaaccttagattctcatcatggttttgttgttgaatatggtaaagatagggatgttgacttgggtaagtattcgtattagtcaatgtatatgatattattttgccagtctatagaattgcaaatttgttctgttgttttgtttgagaagaacttgagtaatttaaattttttcatgtttttgtaggttttcatgtcgatgactcagaagtgactttaaatgtgtgcttgggtaagcagttttctggaggagaattgtattttcgaggcacacgatgtgataaacatgtaaatactggaagtcaacctgaggtatgtagtcagtctttgagctggaaacgacaaatatacgtttcttccttgtactattaagaatgatgggcaactctaaaggttgttaatgtttcttattgaagcaggagatctttgattattcccatgtcccaggccaagctgtacttcatcgtggacgtcaccgccatggtgctagagccacaacctcaggccatcgaatcaacttacttctatggtgtagaaggtacacatttcttctgtccttcaacaagcaactgatgagacctgctgccaaacaaccaaatcagcaacaaaatatttcaaacagtaaccaaaaccacaacaagcaatagaatagtaactgtagaattaataggaaaatttgggaagctttattgaattaagaaaataaaggacacttgagacaatgtctcttacaatggtagagagcaaaagttctccttttatgcaaagagttttattcaatacattgcatacccattctatccttgcttacctatatatagaacctagtctcactcacaaaccaatcctcaatacaatgactcaaatacccttgttatttattatatgcaagcacaccatactaattctagggcctaacattaccagctactcaaggttcaccttgtcctcaaggtgattgatggcaccaagctctaaattcgaataagctcgtcttctgtcaaacaaccattgaagtggaggagtcccaattgaagggtaccaaggatagaacaaggccaattgagtgaattcttgggatggtcacacaagctacaaaagaacagtcatcgctcaatgagtcgatctctatcgaaaaaccagtccatcaatgtaattcgcatagccaccggctcatagacaatggttttggtccaccaaagaactttgaaaatttaagagcatgttgggtattgttttttgttttttgttttcaaaaaattgtttttagaaat

SEQ ID NO: 112681 - DNA, 4751 bp, Cannabis sativa
gatctaagtcctggtaaaataatttccaacatcctgctcttgaagacatcccttcaaagtggagctttcaccctctaggttcgtgattctccgttgggattcttcgcaagctttagtctgcacagccagtttgttgtccacctcctgggctttgttaatggattatgtttcagctgcctcggccttctgctgcaatacaagatgaagcttcactttcttcgccagagtagattcgttgatgaacttgtcctcgatgatcttggcttatttatcatacttttgagacaaagtggtgagtttcttatccttctcatcgacctcaagcttgacttgccgcacatcctccttagcctgctgcactttagcctccaattctttaaaacgagaaagcgccttgaaatgcatatctttgtatttgtctctgcgtccctctctatcttggtagccctcttctctcgagacaaagacttttctagagattcacagacactctgcttaatagtggcctccatggtagcattagcctcggttaaggccctttgttcctcgtctctcctctattcagcattggcatgttcgaccttcaacacctctaggtcgtaggccaactgggtgaccagggagtagcccctctccaccatcagaccaatctacaaaagagggaactcaaataagttaaaacagtgcggaaacactaaaatttattttaagtcagaagagtgttgaacttacagcattggcctgagtcctcacaaagttagtcacgtacatcaggtcccttctagccatcacaacaaatctatcaactccaagcctacaacttgtggtagtgctctgctctaatagatctgccaagaatggtgacaagtcagtcccaacgtgtggccggagtctcttcaccagttcaaccctatttacgataggaagggcatcctcattccacttgtcataattggggaactcagcgttgcgcctggaagagatactggtacccagtttcctcatctccttaattttgcagctgcgcctttggtagtagaattcttctagcgcttccagtctagcttcctcccctttcgtcaactgtacaggcctgataggaagtgtgaaagatgttggaggcaactcgatccttttcctggacaattgaatcgaagtggctggaatcactttaggcactaggggtggcggaggaaggtccttcttgtcccttaacaaacaagtacttcaccttggtggccttccatcattagaagaggatgctcccttctgggattgagaatctgtggcttgcctcctcaaagctaccagctgtaggactttctctttgatttctaccctagccttcttgctaggacaaccatcagacgagcctacgcgtttcttattgggcatgatgggcccatcacagtcagaattgtcttctccataattctctaggggaatttgattcagaggttccacaaacaaggtgggctctatcaggtctatgatggcagccaacactgcttccgtactcagagcctttggagccacttctgaatttggtactaggggtgctgtcttctaagctccgcttccggaggcctggttctttccgccatcattctcgctttgggtgatctccttaattttgttagatcgggcctgaacactgcctaagaatttttttaggagcctcatctgaagagtggctggttgatttgcataaaacacacgaagtagtcattaaaagaaattatagcaaaaggcatgaattttacaacaagtaagcatgcaagacttcaggaagatccagaccattaatcctggcataattgactcttcccctagcaaatagagcaatgtcttctcgacctaaattggtttcatattggaagaatccaagaaagtagattttgctaagtgtatccactcgaacatgatggtgcacaggatggaaaaagtggttaggactatggacaatgcagtctaccctatctacgtatctattaaaagaatacttatgacgatctaaattcaagaagtatggatcaaatcgccactgattgaccatctcaaaatcaaacacagtgggagccctaattatacgaaaaggcatatcaccactacagaagtgcgtcctcccggagcaccttcattaggcattgaaatggatggacagttcttcagcctcactcaagcttgctaggaattgtcttctccagtcttctagccattgttcattggccttcaccgcctttaaaacttcctcagcagtattaaccgcaatggcttctctaacatcttttgggtccctcttcaaggattcttggactgactcctttagagttatatcttggagtggggcaatgagacctatttcccaaagatctccatggtcaccaaactccacctgaaactccttgggcgagaaggatttgtagaaattgactctctcttccagttccgaagtcaaggtggaccgaggaaggcagtctaacatacagaaaatagtggcgaatcataatacaatgagtataacagaaaaatagagctttgtgggccgaaaagggaatcaagacttacttgcaagattgaagtataagcttagggtgggaaccctcctcaatgggaagccagaggtgaagaagtaatagtcccaaaagtcttgcgtgtactttgtgtgactagttgggcaagggatacttgtgctatatctgcaaccggtagaaactcaccttgtccttgtgaccctcatcgcttgggaattgatctggtaaaagtacaagatctcttccggcgttggcacaagttttccttgtttaacacaaaaaacatatcaatccgccaacagacgatatacttaggggatgaactggaagggtgttactccagctaaggcgtagaatttagcaaaatatcacctcacgggcaagtgtgcccccatctcgatatgggcccaactccatacatgaaagcctccttctgcgcattgcctggccctctctccaagtatggaaagcttttccagaacagtcctggaatgctttgaagcccccgttgggtttcatacttcctcaagtttttgtactacttgaatgagttgacatgctggtctatttcccatggactgtcattcaaggaactctttgagtttctgtcatctcctcctctgagtcagcctctctccgacaagaacgcttcgtcatggtttctgtacaggaagaaggagatccaagtagttatggtttctgtacaggaagaaggagatccaagtagttagctaccctaactacctaatatagaaagggagctgggggtcctcccccataaactgcttagagaggtcccaactagacacactacttaagaaatggtaattcccaaggattactcgttccaaacactaaacctagaacaatgtatgaagggaggcgacataaactagtattcgacccaaaacctcaaggattttgggcaaaaaattagctagcacatctgatgaaattcctaaatgcaaaattcgagaagtaaagcaatctataacacctaaatcagcctatggtggtgtttgcacagataaaaaaaccctaatttcatccccaaacagagcgtgcatatataatttaaagcaacaaattcgtgaatcaaatacacaagtaaaaaggacatacctgatgaagataaagggaggttcaaagtgattattgctgggtttggctcaagaagacgatcacacctcacctgaagacgagaaacagaagcaatcaacgagtcaatttcctttccaaagtccaaacttgcgatttcctctgcagtagtcgtcttgatcactggcgatggaagatggggatattctcgagctattctcagcaacaagcgaaggcagtaatctactgcacattccagaatgattcaccttgaatgcgattcaaagctctgaggatggtcgggagtctgttcgatttgagagtttgaaaatttgaaagtgaaagcaaaagtagtaactgaaggttaccaagggtatttatactccaagatgatgatccacgtgaggaaggagtggatggccatgatcttttcaaaacaaagtgcaatcctcatccaacagttagggagaccaaagatctacgggtatctccgcatttaatgcctactaaaatcaaggtgtgaagtaatatgaaaattcccttttttttgattttcatgccagttagtgaacagtcgccgaaatataattgttcttggaagatgactcctcgataactatgccttgatccatgctcgactgcgacgtggacgcagcatcatcacaggcaaaagttagcatgcatggtcgagtaacttggaaagagttattattcccttcctctaatattcacgcgttaagattaagagatcagagcaagcttccatcatgagcagcatcctaaaagtttgggagtaaatgttatccgtgttttcggaatgggacatgtaacgccctaatgctaaggcacattacagtgctttttcaattacagtgctatctttgctaatcaaagatttttctcgaaaaatgtgttaaattaaaacttttataataattattaaactttataatttacaaaattattgacaagtttcgggattccgttttcaaacctttaaacaaatattccaaaatacatgatatccaggtcgcacaacgactacaaaatataaccccagatttctcgagaccgaacactccaggtcgcactaccttgacatgtacaacttcatcccag

SEQ ID NO: 112682 - DNA, 1900 bp, Cannabis sativa
cccgccacgtggctgaaccagccatggaagaggagtactagcggccgcttggcttccgtacgtcccttgttcgcggcgccagatcagatatctgagaaggtagccgagagcatcaagagcgccgaaagcgcttgctctgacaacccggctagcggcgagtgcgtggcggcgtgggacgaagtggaggagctgagcgccgcggctagccacgccagggacaagaagaagacttctgaccccttggaggagtactgtaaggacaacccagaaactgatgagtgccgtacttatgaagattgattgaatttatagcatagcgtaaattccaaagttacttcttcttcttcttattttgatattatttactattaagaaagggaaaaaaaaaaagtttataattagctgtgttatatattatatgacgcacttattaatttgtacgtgtttgttaattaatctccatgaagccacaacttaattatattattttggtgatgatgataattattacttcttagttcttattaaataataagattattgtcacaattatattgataatttgatatattctggtgtcttatataggcttattagaggaacctacctaatccatccctaaagtgaatgacccagtcgtctatatgtagttctttctttgttgattttaagattaattaaatgattaatatagttaattacttacgtgctatgacaagtagagtagttttgaagatatatttgtaacctttttatagagtatatatagagagagttgaacaataatatatgtagttttaattagtaaatggaaaaagcgtgattgaaatctatgggaaaataaaaaaagaagaataaagtgatgcccaactactatagtttaatctttctttctggtttagtgcataagcaaacgcgttttcatatgtaataatatagcttaccttcacatgagaacaacacactagtcctacgtagctgtggtagcttcagcttcccagtcaaaatgttggtgggctgttagattagattcatagtcccacttaatcttgatcttggtggttagacttttttagacccattggaataattaagaagtataaacagtaagaacttttatttaagaataatttttaatttattataaaaaaaaaattaagttccaatttaagtgagttataaataagaataatctttttttttttttttgagataataagaataatctctaaattgtaattagttatgtattttttaggtctcttattaacaaagtatacctttatataaaaataattatatctcaattaaatgtatacataaattttataaattatttatttatgtagatttaataattttattctaaattgtaatacatgtataaatattatatttattcaaaaataattttattatgatgtagtattaaaaattgtttattgttattgttgttatattgattatttttttggtgttttgattttttttttcctagtataactctatttagttataatctctcaattagaatataatttacttcgtactaagtgtattcttaaatagagattctactgtatatttatatattttttttaacttttacacgggaaagggaaatgaaataaccattctgttataatagtaaaatataaagtgtatttcttttgccggtttcaaatgttatatttttaagaaatatcggggggactcacgtagaggagagaggacagttgtccctttaaaaaaatcaagaaaaaatatttatgtattttaattagttacaaatatttgtaattaaaagtcataaatataaacataatattagctttacatatgatataggtcaaagattctaattctaacaaaaaaatctttatttttaatatttagttta

SEQ ID NO: 112683 - DNA, 1352 bp, Cannabis sativa
aaaaaaaaaaaaaaaaatccgtctgcctcacttataaaaaaaaaatgtcgctctcctcaacttaaattcagagtccgccacactcacggtactgatatacatcaaccaaacactcaaacagtactttaaattataatgcacatgattaacatttgtatattttatgtacaaatcttataatgaatattttctatatcatctatgctcattttttcttcttacgtttactttcatctgcaataatgatagcttggaatcatggggtgctgctatttgctattaattaatttttagcatatattgatcccgcccagaatcaaataatataatatctactgacagccaactacacctttgtttttcagcaacctaaccactgatatggtatggtccataaaagttattaaactaaaatttctacaccgtcaccaaatcatcaatttaaatctttatatagagatttgataccgatactttgataatgtattattatatatgatatttaatttaaatattttactcatttctccacccaataaagtttattatgatgctttcatcgttttttaaaaaaaaaaaacagtaacatgtgaaattgtcaaaattatttattatattatattttcctaacatatataccagatatttagtggatagcctttaatgtttcttttggaagagtctttaatgtatctcttaatattaacacgtatgtggcactttattagattatgactcgaatttcgctatttataataatattatcagatttactcaaattatatgttgcaactttcatgaatattttaatataataggaagtgttttaatgtgtgaggtgaaaagagttttacatgcgatataaatacttatttataaggatatataaggtgtaactttggctcttcccaaacgatacctagtgtgatactttcatattattataaaaaaaatttaaataaaatattcttttttttttatttttaaatttaattgaaaaacgtatttaattaaaactgattacttagtcagttaatgagacacgttcaaccaattacacctcaagattcagaaaacattcttcttctcgtatcatttcaatccatgcatctatataatgcaattgaactgctactcaaaaacccaatggaaaaaacttcaatcaaaatcgcaaagtgaatgcaaaccacacacttgacccaagttttatacgaatagttgagcactcacacacttgacccacactaattttatacgaatagttgaggatataggagtgttcataaaatagccgattcaatccaatccgcacgatccaatccaatattcaatccgcacttgtgcggattgga

SEQ ID NO: 112684 - DNA, 4048 bp, Cannabis sativa
  modified_base (3757)..(3761): a, c, t, g, unknown or other
atatttgagaggattgtatgccatttttattagaaagactcttatatgttatctcattgcagcttggtgcatttttggctggagcattattagcagaaacaaatttcagaacacagattgaagctgatataagaccctttagaggcttactcctcggattattttttgtaactacaggaacttccattgacatgcaggtagtcacaaaacaagagtttcttactccatgtgtttaagaggaaaattttgtgttttagaaatatgtatcattgtctgtagatctgacatgaacagcttgtaatataccataatctcaaaagcagaacattaaagacgcggtttgtttaacttaattaattttcttttctgtgcagcttctcttccgagagtggccaaatgtactttcactccttgcaggcttgattgtcatcaagacgctgatcataactgcaataggtcctcgtgttgggctcactctacaagaaagtgttagaataggattgcttctatcacaaggaggtgaatttggatttgtagtgttttctcttgcaaacaggtgggtaaaaaaatatcattgcaaagactcgccgaaataaatattaaaagatttcatttctccccctttaaagaagacttgacaactttttctttaatggatgcagtcttggtgtgttgccgctcgagctcaacaagttgctcataatcgttgttgtcttgtcaatggcattaactcctgcccttaatgaagctggaagaagggctgctaaaatcatcgatgacaagttcagtacagaggacgatgtatgtactaattttaacattgaatacaattttcataagcattgttagaggtcacaatttggggacttttacagcttgatatagtcataatatgaagccaaaagaccatattttaaagccatattacaaacaagcatgaaacaaaattatgatgccagaatctgtgttttctggttatattaatggcccttcattcttatatgatattaattggattcctatttagttctggctcttgtgatatgttataaataggtacattattataacattttcttcagtgaaaatatagtgtaccttatcagttggtggtgataataaattcacaggaagctgccgaaatggtgaacttcgaggctagtgaacctattgttatacttggatttggacaaatgggtcaggtacaagtttctttttttccttttcctgcaacatgaattatcaatttagcttaactgaagctttaaagttccaatggattgatctctctctcatatgtacaggtccttgccaatttattatccactccgctggctgcaggtgtagatagcgattcactcggatgtccatatgtagcttttgatctagatccttccgtggtgaaggtcagtgatagcataaacaacatagctctcattttcttagatttgtaggattctatttatggtttgatgcatctacagacatctaggaaacttggttttccaactctttacggggatggatcgagaccatcagttttgcagtcggctggaatctcttctccaaaagctgtcatggtcatgtacacagggaaggcaaagacaattgaggctgttcaacggcttcgagttgcttttcctgcagtaattctctctctctctctggatataatttctggttcaattatgatcagaatgtacaagttttgggtcttggcttggtttgagattaaaattactcatatactagaagttggctcagaatttttgactattttactaaaagattttgttagcaaaatggggttatgggagagataaaggaggtggcagcattgtttcttttctttatatgattttggttatgtgatctctggcttcatttgttcttttcttctataatttaactggttaaattgctgatattgtggtgaaaattcatggcagattcccatttatgctcgagctcaggacctcggacacctattagatctgaaaaaatcaggagcaacagatgccattttggaaaatgcagaggtaatacaagaatcttataaacacagcagaaagttgcacttccttgctctaatttgagaccctttgctttgtttgcagacaagtttgcagctaggatcgaagcttttgaaaggactcggtgtcatgtctgatgatgtgagctttcttagtcaacttgttcgcgactccatggaactacaagctcaagattcactcagcaaaagtgatgaacgagaaaccgaaattatgaagccgttacaggtatgtttcttgatgttatccatttcgtatacctaatatcactcccaactgtaaacactatctattcaactaaaatggtttgtttcacaaggtgagagttgctgattttactggttcttcgggctcgaatggatcaacttcacccgaaggaaattcgtcaagggaaaaccagacaaatgagacatcagaagatgatggtgttctatattgtaatctagataaaggaaatggtgttccgaaaaaaccaattggcgataagggaaataaagaaaaaatcatgatagaagagccataatcccaatatggataaaaatgaaacctttacagtttcaattgacaagaatattatttttgttcagcctaacaatatggataggatcccattaaagcttgtgaaaagggaagatagcaaaaaggagggattcttaggctggatttatttaacaccaaagagaccatagttataatttaattaatcataaaatcctcattagtgtaactttttcttcatcatttttaccttaatttttattgcataatgatcctttgtatattccatttttaaagccctattgttgggggactttgtaacattgtaatgttgaaccaaaacttgttctgttttgaatgtcatttaaataattgaacaagtttaaaatgaattcgatgaatattgagaaatacgagattttatcttaaaatcaataagtggagtaatccatgtttgtttggatctcaagtttttgcactatctggattttatttttgttcaaatctcaagtgtatttgcaccatagacatatggttttgatactatgttgagaaatatagtttctatttcaaaattaattggtgataagtgaagcaacccatattcttatataatatggtttaatatttttacaattcacgtgagataatattctccaattaagattcattttgattaagttatattaaagtagacttattttctttgtttaaagaatattcaatcattcttgaagcaaaaaagtaactagagccaagtttttgttttccccttgtacttttttcttgagatagttaaacataaatccctcatgatttgcacttaaatttcataaatttactattacaagcaaacatgttaaagttaagaaagcttacacatcttcataatgtctcttttccaaacaaacaaaaaaaagagagagaaaagagaaaaggtcatcttaataatggtggatgagaagctttgattaccaaatttacaatcttcataattgatcaattcttcttgactactattaatcagctttaaactttatcattattaatttgttattggtggggttcatttactaaaagtaaatataattatttattttttcagaatagtattatagttttgaccatgtctctttcatatctaacattaaagtacattgtagcttaattattttcatatgtcatcatacaaatatatatatatatannnnnatatatatatatatttatactttacatattagaaataatgagtacaattattttcaacacataacatgtaaatgatcccaaattctatttacaacacaattaatgttttttttaattacttacaatttatttatttagtattttttgaaaacagattaaaaataaaatgtagttgaattatccttttttttttttaaggtatttgaattatatttttattattttaaattaaattaaaattttggctaattaggatttttgttccttgaactttgacatatatcaaa

SEQ ID NO: 112685 - DNA, 8377 bp, Cannabis sativa
  modified_base (1211)..(1218): a, c, t, g, unknown or other
  modified_base (7030)..(7036): a, c, t, g, unknown or other
  modified_base (7328)..(7335): a, c, t, g, unknown or other
  modified_base (7389)..(7392): a, c, t, g, unknown or other
  modified_base (7905)..(7907): a, c, t, g, unknown or other
atcatcatacatttggctaaccactagctttctatctatttcccttaacagattgtagaatatggcactccatggcgtctcactattgtctctgaacatcatcaccgccctaatccattccttgtcactcttctcagcttgtgaatactcgtaaaaaaatttctgctctagtcttttttctggaaacttgtttcttggtctgaagctcccgttcccttttggtagaaaatcccaatatcccagtttgttggttttcctcaaagctcgaggaagtctttcttttggaatattatcattcccaccccttggtttagtgacaagctgcctcaaacttttgacgatattagcccatgattgtgagttcgccctgccttctcctatcttctccttttgttgttgtgttaatctgtcttcttgaagattttctggcttccttttaagtacaccaaagagacaatcatataggtcagaccatcctttagcttctgcttcttctagaacaatcacctttctgattttgttgtttttcaaggctgaaatcttcaagaaagctccattagagttagcaaagaattccataaaataacttccaatgttgtttctaaagaatcttttgaatgcatccctttgctgtccaattttcttttcagttcctccagaattccaatcatccagttcgttgcatcgattgttacccctatctcgtgcccaaaaagtcttgttctttcacaaattctaaccgagcctccatcttttgacaaagtgatcataaatgccttgtgtttagtatgaaaactccaatatttatggagtttctgaccacgatttggatcagagaaattttcccagccaacaccaatggggtgaaggcctttttccttcccaaaaccagtggagttttggtgttttccatgaccagaagggccatggaagcccccagtatgtatgaccacgcttctcagaaagaggagagagaagagagcataagggagtcaaagagtcaatatgctaacatcaatatgtgtctccaaaatcatttttaaacttttttgcaaaagtatttaagaaagtaatagaacaatttatacagtaataaatttctattttttttttttatatgtataaccaaattaaacattaatgtaaaaatacataaaaaaatgggataagtctatagtacacttcttaagagaaaattacattgtataccnnnnnnnntttatttgttttaatttttacctctatttttatatttgttaagaaatacccactattatagatgatgttcccattataccccttagattaatgtaaattatgtgctagagttaagtggagagtaagggtatattgagcaatccactcataaaagtggttatattttaataaaattaaatatgagagtatttttggttaatggatacaaaaaagaggtattcctaacttattcccccttaaagcggtgttttggtaaactttttgtgtgtttcagcatatagaaaaatttttagtcaaatatttttcatgatcgtatacgtgatagccatttaggattacttattcacttgtaaatttttcaaaaaaattctaaatagcttgaaatgccgaaaataagatttatatatttactacatgcataattgttttttttttgtatgcgtggtaaataactgtttaaattttatttttggcaagataaactatttagaattttttaaaaatttaaaagtaatttgatagaactacaacattaaatcacaaaaaaaaattggactcaaatatatttctaaatataaaaaaactgattgtaaaattagtgtaatatattttaaaaatatgatattattaaattaatagtgcaagataaatatctttcagctggaaaaaaatgataaaatgcgaatggtatttttgcaacccaaataatagctcaaaattagccaacaaaatctatcaactgccatgtgtcgaaacataatcttctctcccactgtagaagaccccattgatgtagcttgttgtttcagactcccacgcgtagttgaaggacacgtacccatatgggcctaatatgttgctcacggccaactttccacccaattttcttcaaataatcagttgtatataaactcaataaaatctgtatacatttaattttcttgacttattattggtttagataattttcctatagcatgaggaaggatgtgttattactacactagaactttcctatatatattataaaatgatattgttaaaagattatatttcagacaaattatagcttttctctttggagtcttctagcaggtatgcaatacatcatttctccttgtgagatcttggcccctcccatggaggaattcgtccacccttctctgtttagtggtggtttgtcttattcccatctaacaagtcgtcgttctttctcctcttctccctctttatcgagtatttattgctctggggtttattattaccccctttcccatctcattaattctagccagagtattaaatactcgaacccttctttctcttcacccttccactttcttcatcattcctttttgtcttctcctcatttactccagatctcccaaatcctatccaagaaatatgcctttagagattacaaaatggaggcagacgactgggttctcgaagccattcagctctactccatcattatagctaccatggacgcgactatggatgtgaccagggaggttttgagaagagtactttgcgggttctgattctttctatatataactaagctcaggtattgttctcctcacttgttcctttttcgattccaattctctatactgttgttttacgtgtctctatttgtgctattatggatgagttcttgaataatgtctctactgctttagtacttcctcctgatgaaaacactatctttacttatgatgttggtttgtctagttcttcccctgctaccatcagtcttctccttaagcttcacaccattcaaccttataatcgttcgtctctcatgaaaaccctctctggtatttggtcatcccagtgtcatttccctgtttttgtgtctgaacatgctgatggcatgtttctggttacctttggctatgagcgggataaaggtagagtcctagaaggttaaccttagcattttgcccaaagtatcactatctttgctacccctaacagttgttttcctcttacccatgataatttgcactatgtcccattatagattcaaatgtacggtatcctgtttatgtgaaaatcttatgatttggctagatttatagaaatggaggtaggcgaccataataaggataccattaaggagggccctggcccttacatacgtattcaaatcctccttgatgttaatttgccaattagaagaggaatgaatatcagatttattagaatgggtagagagtttgttatatggttggattttaagtgtgaacgacttctgaacttttgttttttctgtgaaaaacttgatcataccaagaagtattgtctttctttcttgcaaaaatttgatgagattatttttgaacctctctatccgtataatattctcctcagggggaaagaaaagatttttgaaaagcctatgccttttcaatacccggaccctcctgctatcactatggtggatttacacccggttaatctcaacttacctcctggaaacctctcaagccattctattaccttcccgtcttttctaaatcccaatgctaatttctctggcccattcacttccccccattccaccactgttgtgatgatgcccacccctctcaaccctaatacttcaaatatttcccccctttccatagacctaattttgatatttttttgcgcccatctgcctttacctcctattctactgactccttaattattgctgatagtcctgtttgccagatggaaatttttcctctgcccctgctctctctgcggctggttttggtagtaccatccaagctggtgattcttctatgggaactagccctgctactggtcagcttgattttacagttcgtggaaaagatctggcatcggcctctggagttaagcggccttcttttcaaccccaacaggttgtggttggtggttttatgaggtcccaactcaagcgtgctcgttttggtgactgggaagttgaattttcccttaaagctactgatttagaacaggcgggcgatgttatgcacacccacccaaaaaaatgagtatcttgagttgaaatgcacgtggattagggagtacacatgcattcaggaggctctcccttttggttaaggagcattgccctaatgatttttttttgatggaaacccgtttgcctatgcaggttattgatagagttagagtttctttgggttttgataatggtgttgaagtgcccaggaaatattttggtggggggctttttcttttgtggaaagctactctctatgtaaatattttatcgttttcttgtaatcatatacactgtaatatcaactttaaagataatgatatgtttcattttactagtttttatggctccccttcttcctctcagcgtgttgttaattggaacctttttgaaaaaatattttataatgctcctaacctcccttggtttactatgggatattttaatagttttctttcttttgatgacaaaattggtagtaactattataatcataaagatgtggatcaatttgctcatttttgggataaattttgcctttctcctctctcttgtgtgggagataagtacacttggcgaaatagctcgatatgtgaacgtcttgactgggcaattggttctaaaacttggagtaaccttttccccgatgcggctttacatcatttgcctttttatggttctgaccatagagcccttaaggttatccttcaccctaacaactcaattagctatccttttgttaaaaaacgatttcagtttgaaaatatttggttagagaatccaaatttttataccactgttcaggactcttggcaccattcatctaattagtgtattgataggagtgctcttaatcgatttctttactatcaaaggtcttgtctctcttctcataaaacttggaataaatctgctaagaaaatatttcaaactcaaatccttgatcttcaaaaggagattgctaggcttcagacttctacttctgatagcagagagtcctttctttgtaataaacaccttcaatcccagattgatgctctatttacaaagaagaaatctattggaggcaacgggctagggttcattggctcagagctggtgacaaaaacactaagtttttttatcggtttgcgtaaggaaaaagacacactattaagtatttgaaggatgattttggtaatagtgttaatgatcctgaggcaatgggtgaccttatgttttccctttttctcttatctgtttcaatctgagggttgtgatgctgaggctactagtcgaattttagactgtttaggaccttccttggaagatcctaagattgatttccttgctcaacccttcacgactcaggaagtgaaaaaagccatttttgatctgtctggggatagagctccaggccttgatggtcttaatgcttatttttaccaaaaaaattgggctactcttggtcatgattttgttcatgctgttttggaatgcttgaataatggtgctaatttctcggatattcatactactttaattgctctcattcctaagaaataacatgctaactctcttaaggactttaggcccattagtcttggtactactttgtataaagttatttctaaggttttagctaatcgacttaaaaccgtacttgataaaattatctctccttttcaaagtacttttgtttgtggtagaatcatttttgataatattttaatttctcaagaaattattcatgccatcaactccaggaagaacggtaagagcggctaggctgcttttaaacttgacatggctaaggcttttgatcgagttgaatgacaatttttggaaagtattatgttccattttaatttccctattaattttggtaactttgttatgaagtgcatttctactactagtctttcttttcattggtttatattgacagcaatttctatgtataaggtatagacttgtgttttgagattaaatgtttatttggtttatactgacgaaaatttgatgattaatctaggcttaagatatatattattcaaattaaattttttcttatgtatcatttaccgattcaatctcataatttggtttcatatttatatgtaagccattcaaatttattattatttaaaaaaatgaagttcattgtatataatttggtgttagtttccttacctttgctaggaatattatgttgtagttatatatatatagactaattaggatttttgccccctgaattttgacatgtatcaaatcatgtcccatgaacttttcaggccgttaaaaaatccccctaaattattgaaatggttagatttaagaaattctgtctaatttcattcaattttactaatataaaattttttaatatttaggtttaaatattaaaaatcatattttataaagatatttagggatttgaaatgatgggaaaaaaatccaaaaaaaaaaaataaataatgaaaaaaccacaaatataaggtttttaggtaaaaatcacgctttgcccgaggaactggctacatgaagcccgtttcgcgtgcgcaggtgggtaattacaggatcctggtgccgagatttctcgacagttgcagcatctaggcatgcatgctcgtgtctgagcgaggagctgaccgagcatttagacaaggctttgtctgatttccggacgcatgccccctccttgtccgagtgactggtgcgatggtacaccatccttgacaccatatgcacccaaattttcaaatcaccatatctccctcattttttttatcagaattgagtttcgtaaaaaccaaaattgcttaattnnnnnnnaggaatccaaataaattatttccagtatgaaagtaaaattatttttcatgaaaaaattcataattcataaacattcatcaattcacacataaaccaacatgaacacatctaaatcaacaaaattattgttttaatccatatttcatgaaagtaaatcattaacatggctctgaggccagttgttgaaaattatttactaggatcaagatttactaacatgtatgttgattacaatatataatctaacaccttaaacatgaatatcctaatacgatgaaataaacacatatannnnnnnnaaaaccttacattgatggcagtagaataatatgtcttcttccactcagatctcnnnnccttgttcctttctgtcgcagaataataacaagatctgagcttggttctccttcaggtgttggattcttcacagtcttccacactatgattaagtacttgacttgttatgagttggtatggtactctatcactaaaggttttgaatattgatgaagaacaagaaggcaactcgaaaatacaaaggaaggaaattctcatttactagttgtttgaaaaagaatgaaaattccattcaaaaaaaaaaatgaaaactagcttattaggttagatgagaatgagagcatcttattccttttatagtatttcaactagggtttaggatttaattatatgaattaaaaaagataaaataataagtaaaatattaactaagtggccgaccatagtagtgcgcctcactagttacaattttgtcactttaattcagaattcatcttttctttcaataatgtcatatttttcaattttaatcctagaaatgtcaaaactatttatttaataattataattannnatcaaataaaatttccatttaacatatttattaattagaccttacaaagtattttaattaataaataaatcccaaaatctcttttcttcacaattataccttgcttagtgaaaattcataaataagacagtctaattttagaattataattgattaatttaaaccaattaactgagtctacaagcaatattatctcaacttatgtggggaccatgagcctatataatcatgcatccaataagcagatctagaatttaccaagtaaattctctaactaattaattcttacttgcgccactatagattcagaattgcactcttaattacatagaatgctctatatgttccaagatatagatactatataaattatctatcgttctaatccaatactcgaagatcctctatagtgatttacatcgagtagggagaaatttatcgttttatccctcaatgtattttatccttaa

SEQ ID NO: 112686 - DNA, 3998 bp, Cannabis sativa
  modified_base (3951)..(3954): a, c, t, g, unknown or other
ttttttttttaaatctgaaacttttttttagtattttcttttattaaatatttttttaattaagcaaaaaaaagtacaaattctttcattgttttaaatctaaaactttttattagtattttttttactaaatataatttttttttattaagcaaaaaaaatctttttttttttaaatttgaattttttatactaaaaagaacattttctaacagtttataagtattcccaacggttgtaaactgtttcactgtttttttttttttaaaaaaaaaagtcgtttagtattgcccacggttgtccaccatcggcattggtttttcccaacagtttctttgcttcagttttaaaccattgggaaaaatcttcgcttactttttccaacggttttcataattaacccctttattaactgttgggaaaacccaattttgtagtagtgcacgcatgacaacaatattcacacaagataaattccagcaggattgactaaacctacagccaagaaggatatggaatatggtttcctcatctaagttacaccaagggcacataatagctcaacattcacatgtttagtgttcaattgtccctttgttgggagacactccattattgcacgccacaagaaatgttgaactttgggaagaatatcaagctgccacagtctcttatacccttctctgttggttccaggttcacgacattggttgactactgcaagaatttgtaagcacttttaaccgaataaaaactcgatgcctccatgttccaataccatgtatcgttgtctactgtatcactcaactggatagagagtagaagttctttatctctatcgtcaaacagaccattcaccacttgaaggtcccattggtttagccccactgagaacaagcttgacatcatttgaccctccaaagcagggtgatttgagctaatatatgtccattcttcaatcatatataaaaacttgatataatcatttttaacaagtgccactcatcttaatcaattatagttagctaatttttttcaccatatatgtatcaaatttttctcttggttttgcatgtgtcgccgtttagtgtcttatttctatctcttaggttaaggttcattgactcttttttgggtttggtttgaggccatcggggatggtttgttcggcctttgagattgggtttaatgattgctattattatgggttattttttcgttcctgcgatgtctttgttggtctatgatatctctttggcttggtcgtgttgattctcgagccatgggtcacgtacttttctagatctttctgcagtgctggctctgaaatgggttgttttgagtggaccttttcttcgttggtggtctatttcagattgggtttttaatcagtggttttgatggatctttggcaggaccttatggcctgtatccgggttttggggatctcttaggttgtggttaatgacagttggggtgtggtcagtgaggcaaggatcgttggtgtggtccttttggtgattagtaccattggtttttgctctcaattgtgacttgtcttttattatgtaagggtcttggtatttttttttcctaataagggtgtttttaccttcctttttgatctctattttgttttagatttagatgcacagagtattctaaaatttttatcggtgtcgtttgacacattgttttatgattctttgatatttattgtcgagaatttaaacatagtttgtcatgattttctccattattctagttagaataattagagtgtctttacctaatttttattgatagatctttagctatttttcattgataggtgtgatccgtcacatgttcattttgaatggaaatctagctctcctcacattgttttgatgattcacatttgacgatttatgagtcctttagttgaggatgctatatggtttttatcctatttaatgtaaatgacttggttaacctatttttgttgattctgctcaatgagtgaatgtgcatgtaatggactatgtctagtttacctattaatacaaattctatttaccttcaaaaaaagaaaaaaaaatagaacatttttatcaagcaaattttgacatttccgtcccgatttgtacttgaaaaattctaaacattttaaatactaaaaaataaatttcaaacaatttattatgtatattttttatttataggtgtaagaaagtaactattaactcaaaatttcattaactataaataagacattagataattaatatatcgaattaattaaggaatgaaagtaacaaatacttaaactatattaatgaagatacaaaatttatgtggtttagttgttaactctatctagtccacgagtcagtattatttttaaatttgagtgaatataatttttcaacagaatttctgtatgtaaaaattgtcatcattttctcatggagtgaaccactatttatagaattaggatagtggttactcaaccttactttagtggaaggataaaaataatggagataatactcatatttaatgtacattcatatatacatgaaataaataaaaataatgacctctatccaaaatacaaataggtgggctttgactttgttagagcatgttatattcgacaagattgatattatgtttcttccagattaagatattccaagccaaagtcataatatagcatatctcgaacaactttaatgatgtgtgtctcgaggcaatgggatgaactgcttcttagagtaccaagcaattccttttctggttttccttgctagttagttgaactaggttcaggtttgtccttagaaatttaatcaatttagattttatttttggcgctaaacctcgaccaattttggttttctttgtcggcatggaggggtcgatctctacttcttctaatatctctactggcccaaagatgtacgcaggatccccaaagcgaggatatatgtctttctccttgccttggttggacccttaatgcccctggctggactcactgttctagctcttggcggactggttctccatttttgctttggacagagcggtgttgtagcattgtcgagtagactgttggtctccacttaggcccacgacactatactttgtcaaaaacttaatgcatatgtggtaaattaaagtgactgcttctaggtcatatagggttggtcaccctatcatgacaatgattgcagatgccacatcaacaattttgatctgggtcatgattgtcttttgtgcgggactttcatcgattgtcgatggtaatcaaatatatcctataggagctagtccttattccgagaacccatacatgagctgtgtacaaggtgttaggtctttcgaatgaagccccatcttcttgtacacaatcttgaggatgatgttgcaagaggctctatcatcaactatgcaacatactaccgtaatattccctatttgggtggttatgaccagaggatcattatgagaaaatctgacatgggcagcatcttcttcagtgaaggtgatggcaggttcttctacatttggctgctttggatttctttcctctataacaaggacttcatttctttgctcatgactaggagtttgagcatatttctccaatattttgtttgatccccaacgatgtagggtccgctgatgatgacctataaatggctagaaatcggtggttacaactagtcgttattttcttggacttatgcttggttttggtcggcttggacataccagtgtaagtggggaatattccttcatatcagaaactcaatttcttctttcaagttcttatactcattagtgttgtggccgaaatatttatgcaattagtagaacttggtgggatccctcttactgatgtctttcttcattaaaaggggcttcttgttgggttttgtgccctaaataaaacccattacnnnntgattagttatcaatttaaaattttgaagtgatttatgtttaca

SEQ ID NO: 112687 - DNA, 2671 bp, Cannabis sativa
  modified_base (118)..(120): a, c, t, g, unknown or other
ccgaaattgagaaattataactctaatgcttatttctaataatgaggtccacagataattaaattcataaataaatctaaaaataacagaaattagtgctaattgtctttactaatcnnnattactaaagtggtcattacaatttttctttaaaaaattaagtgacacctcacccgcttgctggcctagctcggatcgatcggacggatgatagcggcggtgcgcgcgcgcgtgtggtggtcgagtgtgagagtcctcacccatgcgcacaaaactgggtacctcttgggacccaaacccaaatgtcaaacttgcacattatttacacttctaatgaagtgtttctatcccatgtgggactccatttactaacacacttcactttttatttttatacgatttcaaaaaagttccaacaatcccccacttgaaatttttaaaaaaaatttctcgagcaatatcaaacaactataagaaagtgcttcagcaaagatatctttcgatttgaatcttgtgtagtgaatacgatttagattttactagagtgactcgaagtcttgaactctgtctcttacatcgtaccactcaccaatctttcaaggatgtattcaaataagctcgtgtgttaatggtcatgcacatctttccaagtatagtgaacgttctagaaattttacccaaaattccataggaagcggccccctcccacattcacataggtgagtctatcaagagtactcctgtagctcggtactttactctacatagagtatagatctcattaagagtttctataaactcattctcttatcgctttaggacttcatgcttctcatataacactagcatgattcctaccataagggcgagaagacctatgggcaatatttttcgtatgtcaaaagggtattgtgaacccgttcctttcgtacatcttggaaaggtagggccttttacctaaagataagacctttagaaaggcagtatataaatgttgggatacatatacccaatccattttctaacatttcctttttccaacattaaaagagacagcttgtacctatgcttgtcacatcaatagagaataggtcacatcaacttcacatattatcccaatgagtcttttcaattcagttgaatgttatgaatactttccattaagaaaatgtaattagccccattagtaggctaaccatgtttcattagatacttaattaaatggactattgctaataagatcagatgatgtccttgtctataaatagagaaacactcttattgtaaagggatccccaattttatttcttaagtttaaaacattgctaaaatagagagagcaccgctattgttgtgctcctatgaaattattttctaaataatatcgattcgtgaattaggattctttaacgtctgaaccacatatcatctgccttatttttattaagctctctaatatttattttttacttattattgagtttccaaaaatctaattaataatgtgtaaataagaaaagaatagagaaatagaataaatttattaattatgacaaatgcttaaaaatatttatttaaacatttaaaaatttgattttaaaacaatatcaatactgttaatataactatttaaattttataataaaatttaataatatttaataaataaatattatcttaatctatattaatttaaataaataaataaataaatattaatattatcttaatctatataatttttattttattcaacctaagaaaaattattatattatttttttcctattatttgttttatttcataagttgtgacaaatccaagagcatcatttagtttaagcgatattataaattgattttattctttttaaggaattatatatgtttaagaatgattgtgcattttaatgagactcttcacactaagcataaagaatattgaaaattccacaatctctttaaagcaaagttcttgaaagtctttctaaataattcttccttggaagcacattatggtcgttcaccatgatttgagatggaagattggtgagggtagatgagtcagatgtggttttgatctatgagttcctgatcacaatgaatttgttttgattcgttatacaggacctctagacggggtggtggctaactttatcaccgatgatagacaatggaatgttgagttacttacctaatatttttctctattagatgttgaccaaatgatcactcttcccttgagtttttttccaaatgcaaacattctaatctggcatcgtcatcatacgggcatctacacagtaaaatcaggttatcatcttgcttcatctttggctgaacttaatcaatcctcaccatcctctaatgcctcttaatggtggagttatttttggtctccccagataccacaaaaaattaaaatttttgcttggagagtcctccaagatgcttttcttgtagctacttcactagtaagaaggaaagtgataacggactctagggttgttcatccgatctaattcgtactgttttggtcaaacaacatgaaatccgcactaagtgcggatttcatattttggatctaatccgatccacataacagtttaaatccaatctaatccgcaatagtgcggattgaatcggctatttttttaatgataaattattt

SEQ ID NO: 112688 - DNA, 1636 bp, Cannabis sativa
atacctttagccacaaattttttatttataattagttacaatttttttactttttgttaaaaattttgttgtgactaaaagtaaaattttgtagtattatttttttaaaaacaatatcatgtcatttattaaaatatagtattggcttttgtaaattaaattttacttcaatgttgaagcacaatttattatactaaatattataatatatttaactattgtttaattttcaaattaagaataatattgtaatttgtaattaatagtgataggacaaaaatatagaaataaataattaatcttcagccaacaaaataatacaaaaatcaagttacgtagtacttttcatgaaatttactgcatggtaaaacaaaataaaatgggcacgtgataatattttgaaacatacgtacgtagtacacttttctgaattaatacataaataatccaaatttaataatagactcatcacaattcacaactgtgttatatatatatatatatatatatcacataattatatataattatatcatcagattaagtctcattttcattcgagagattgattatttttattataataataattctaactgattagatattgatcgatttgagagcatccaataaagctatctatataaatatataaaatataattaaatatataaatacactaatatatatgcattatgcatatatatatataaaaaataccttaggccaaaatattgttcggcctaagctttttgttttgtttggttatgcaatttgcttgccactactacactatatatataattaatatatatgtatatttatatatataaatataatttatatataaaaatatatgtgtcggtgcaacaaaggataaaaatgcattggttgggtgtacattacaacacacctcatcagaatgtgtcacatttggctctgatatataatttcaaagagtggtggacctaacccttgagactataactaattaattaattaataacacaaaataaattaaataaaataatttatatatatatacacacacacttagcttaataaagataaaacatattcaacaaattaattcaacatcaaaagtaagtcttcacttataaataccctttttgagctttgaggtccctacttgttttaacttttatataaaataataatgataatgggaaaaaaaaaaataatgcatcactttggcatggaaattaaattataataactttaaaatataatattgatttataattttgtatgcttaaaaaaggtaactttttacagcctgaaaattactttgaaattaaagtaatatttgggtaaattttagaagttaattacttgcatgtatggttatcaaatgtactctttcttgagaaataaatatgaaactcatttaaggtaattattagaaaaactattttaaattgtactacatttttaaattttctaataatataaagtcatatttcatatttattgtgaaaataatcattataaacatattttttattttatgttttagggtgcgtttggaaagccacgatgtaattgaatttgtatgtaattgaaggtaattacacaatttgacatatttgtttgaccatgtaattacactgtaact

SEQ ID NO: 112689 - DNA, 7419 bp, Cannabis sativa
gtatatatagctcttctctcttgtatttttcattagattgtattcttttctcaatctcagtaataaagacattttgttcttctctgttttctcttctggtttatgcttactgataagctactgttctcattaaaagttttgcgtgaataattatcggtttaactccagggaaagatcattaagaatattattatcataatcatctaatgatgtatgtgtaatgtttgaactgattgttttgtttgattatatactgcatagctaagcttagctataatttatcctgttatatatctatattatatacccatataaattactgtcatgatcttgtaatcaaatcaatttagtaaaggagtagaggcctcttatatatgaagatatttcaactatgatatgaacaatttcaggcaatagttttgtactctttttttatctttatagagaattaatgcttcttgtagttgtactgtctacctgagcaatagcaatctagttgaatatgaatccattcttttgtagcttgtttggcccttctatatacatataaatatatatatatatatatgtttctaaattatattccaacagagatgggagcatataaaactatccaatttctaatcaccaccagattcttagtcactagctagcttagttttaaattcatacacacacaaaacaaatacaatacatatttttcagaaaaattaaaactccaataatataaataggagacaaagctaattatgttcatttcccaatctactaccccacttgtatataaaagtaatacatatataaacctatcattcatgaaattggcagtaggatcacattccaattaggaccccacacaaatacatgtatatatatatccacatatatacttgttattcttgatgagattttaaacatggattgattgattaattctactataattttataaaataattttggaacacttattatttattacatgtcattatggggccaattagaggaggacaacagaggctaaaatagggtgtccaaattggtttttatttttcattttattggggcttgagggagtgagagtgagagtgggagcaacatggaggagggcccctctttgcataattttggtggtatttgcataacaaaagcatgacatctgaggcgtaaagttggttcccaccccacacttatccatctaaatcctttttttttaatttttaaataatttgtgtgagatgggcccaccacttcaaatccccacgtgtcgcttcctggttgctttgggaattacacgtatcaacggcccacattccagttcacgtcatggtcaggtacccatcgcctgcgacccacccgttcctatcttcctaaccacctctactacttttcccattacacccttaatcgcttcccttatttcatatttagccaaacttaatttactatttagccacatcacgtaggtcctattggttacccaattatagtccgtcgaaattcgtgccgcagcaaataattacccgtccgcagcccccaaatcaaaatatcctattagtatatttttttcccaaactccataaattttatttttataaacaaaggccttcgccatctcaatacaaaatattttgatctctctcttattttacgttcttatttctctctctcaaaaccctaagctgtcactgaagaagagatcagactctgctacttctagctagtgtttctacttacatctctcccatggagagcaccgactcctccgccggttcccaacaattacagaatcatcatcagccaaacctcccgccagggttccgcttccatccgaccgacgaggagctcgtggttcactatctcaagaagaaggttatctcagctcctctccctgtttctatcatcgccgaagtcgatctatacaagtttgatccatgggagcttccaggtactcaattgaaatcttacacaatgaattctgaattcgaatcatgtattttcatttttttgttagtgtgtgatttttttttttttggatttttaaagctaaggcgacgtttggagaacaggagtggtactttttcagtccacgagatcggaagtatccgaacggagccaggcccaatcgggcggcgacgtccgggtactggaaggcaactggcacggataagcctgtattaacttctggaggatctcagaaggtcggcgttaaaaaggcgctcgtcttctatggcggtaaacctccgaaagggattaaaaccaattggattatgcacgaatacagactcgctgaaaacaaagccataaacaaacctcctccaggttgcgatttgggcaacaagaaaaactctctcagagtaattatttattattagctttttaaattttttgtttgggggttcgaattttattgatatatattttacaatttctgaagattaatactccatactgttttcttctgtactgaaatatatagcttgatgattgggtactgtgtcgaatctacaagaagaacaacacgaatagggcagtgatggatcacgagagggatcaagaagcgatggaggagttgttggggccaatgaacagcaataatcataatcacaatcacagtcataataatattccagtacctcatccgatgggcccacataatggcaagctacaactactactaccaaaggcggcgacactactaaattatggggcgttgaacgaaaatgaccacaacctgttcgatggaatgctaagcaatgatcatgccaatattaatagcaatacaacaaatactactaacaatgcttcactgctcttgccaccttcttcaaatatgtccctcaaacgctcactcattcacggtctttactggcccaacgagattgtggacgatgaagaagcagcggctgctgggcccttatcgtcttcctcaagcaaaagactgcaactggatgatagttgtacggccgccacaacgaccacctcgatgggcgagggaaatcaatcgacttcaatagcctcactgcttagccagctcccgaaccaaacggcgtcgttgcaccaacagacaatgctcggagcattggggggatctgatgggctattccggggatcttatcaattgcccggaatgcactggtattcataatttataggtacttactatatagttcattttacaatgaaattaacatgaattataatagtactagctagtggctgttgttgctgctgctgcgcgcgtgtcatcacgtacggcgtagggtcgctttgctgatcattatttattcttaagggaaatacgtaccccaccctcaaggacttaaaatttcaggtatatttatatacatagatgtagacatataaaattatactttgttatacactttatatagttcatcatgtataagctgtaaagattggattgggaaaaagattttgttgataggaatgttacgtagtttcaaagcaacaaaaatattatatagctagaatggcctcaaattccttcgagtttgattggcccattattatatttcagttatactttatgtatgtatatatttacccctatatatttatgtataatcatgttcataaaatttccctgcagctatagatagtttatacgcatatttaattaatcttttattttgtactttttgaggagctacgcttttgtttgttgtaatataataataaaatcagagatgaaccatatgtatttttcctctaggatagaacacaaaactcttgtgtagtttcctttttatataattacgtacccgcacacatttgaagattatataaattatacaaatttgtgggatcaatattattaattatttatgtacttattaacatagacatcttattaattagtgcaatacttttctattccgttgtccatcgcttatctaactagtataagtaatgttcatgttagtaattctattacacactcaaatttcaaatgatatgtatatacataagttatataagtgtcaaattgacatatatttatgtgataaatattttcaaccaattatctttattttatatggggtaaaactgatttacatatagttgtgtcaaatttataatttttaatggaaatttctaattttaattgctcaatcattgtattagtatatgtaagcaaagaaaaaaaaaaagaaattatgaaaattttaatttttctactaacacgtacgcaatgcaacttgatatcattttgttgaattttgttgatttttcaaaagaaaatatacatctaacatgttattggaaatattgtggactttattttcaatgctgcatatatatgatagtaataatatacacccgtattctcttctcaaacctctcattctggctttgattcaatatttacaaagctaatttctaaaaaatatatcaaataaatgatatttatttattgttttgtgaaaacaatgattaatgaagggccctacacgagtagtagttacagataaaaaaaaaacaataaaagatttttatttttttatgaatagaaaaaataaaatagagcataacatgctgatatttttttttacgtagatcaaccttgtttttctttcattctattcgcagccatgccatccgtcctgagagagaacagatcgagacatataatgtggctgactacgactgattgtatatattataccgtaagaaaacaacggccaacccaatacccatccacatcgctttctaatgacgtattacatgttggtttcaaatcatatcctacattttacatatttatatataaataaattcataagtaatattaccactttatattttatgatataggataattactattttaataattacagtattacctagtaattatacaattatttttaaaaaacacttaattaattccttggtaattgttcttagtttttttaaaaatacttatatgcaataatagttaattattattattataatgcagagaaaatttgaatatttcactcctaaaaatctaaattgttgatcggttttgtcaaacggactctggccattaattttaatgcacaaaaatgaagagtttaattcttttaggctttccgcgtacaaataagttatgtttcctgaaatagataggttagcaagttaattagacattattattgttcagatttccacgattactaataacattccgaacttaattaaatttttttaaggaaaaaatgacaaatcaattcatataagttatcctagctttactagcttgttaggtttactttcttttccatttgactgaggataagattctagcacatatatgtcaatagctttctgattatacaatcctaacagaaactatttcttcctaatttatataataaaataaatgtgattcattttgctattatatatagatgtgtataatttcacactgcctaaatatatataacgtagagaaagcgaaactatacatagatctgatgagaggtaacaatgtgataatatcgaatttaattaagcctatatagataatatataactaaaaattagtggacactaaagtttcatttgtggtcaagatcgataaaatatctaattagctagataaaccttaaaagaattttcaaagtactagtaaccaataagacagatcttatctagataaaaaaactatgtccttgaataataaccaaagtagtagtactactaaatgaacgaaatacctttctggtggttattatagatagattacataatttctatccttagccacctagttaggtagctcataacctggaccaattgcagcagcacaactaagaaaacccaccagttagattattttgattttactttattaattacctttttacttaacctatattcttataatttatttatatatgttcaaaagaaaaatattttcatgtgtggccgtgggagtcattttcttttaataaaattagagtgtgattagacgtagctaagtatactccaatatgacctttgaggtcacataaattgacaagaagagactacctcacaaaatttatagtcttttctatatctctatgctgctgacaatatatatatcatgggaccccattctttgcaatcatcttaaggaatcattatcttcaaccacacaaaaattaaataacttttaattagccttccattcctggaaaaagtacaaaactgctttacaaaaattttgctaccatattacttaattctgcaatatatcattttccatgacgaaaatgcgctattatatctcctttgatcctcttatgtgtgaatggtataatacgatgctttctgaaaaaccctagagaacttttgccaaaactaaatgacaatagaaaattagggtaaataatcttgcttctctgtgccggccattaattctttttagtgtgcttttataatatatattgtgagaacgatatcgatatataaagcataataatacaagtacatatcaaattaattgtatacaaacaatatctttcacatttaaacaaagtggtgcatatatatacctccaaaaatagtagaacaagcattataatttatttttgtataggttgctagagtgatcaagattcgtaaaaattggtggttattctccgtagctttaatattgacgtaatattacatatatatacacaaggttattccatatcatatttaatggttgagaagagattaataaaacgaacttttttttttatgattatgcatagtccagtagagatctccaaagtcagcccctccatatatagtactacgtacgaactactaaattagttcaatagaacttctaatcaaaatattaatttgtaattttagtatttcaatttattaccaaaagaaaaattaatatatcattcaatatgtgaatttcaattgccagttgcttataaatttaagttgtgggcgcacattaattaatacttgaataaagttgaattatataattaaatgtccccaagcctatctattcacacatatatatatgctacggtcgttttccatgactatattgaacttgaccagagaaaaggggagaagtattattaattcacgatcacgtacgtcttaattggtgtgtgttactccaaccaattaaaaccctgttctcgattcttacccgtcatatatattatttaaatataaatcaggtaatttagtggcctggaattttagctctatcttcccatctccaaatttcaggcccatgtgaagcccaaaggcatcgggcctagtaattactattctgtgattgcactgatctttctttcttttctattttttttaggctaattagtaacttttccccatgaactttgacatgtagtaaatcgtgccccttgaacttttttgactgttaaaaattccccccgaact

SEQ ID NO: 112690 - DNA, 2471 bp, Cannabis sativa
tttgcatgatactataaatccttcttattccgtatacctgttggaacaccataacataccggtgaagctccaattaagaaaggcagtgtacaagcttcacgagcttgacccatgaaagacccaagctttggtctgtgatagcaacaacccgttgctaactctagctcgctagcttcggccaattttttctttgagactttccttttagcattgcctttacccttcaagctcaatgcttcaagctcttctgatagtacattgcattcatcacagcccgaagagttaccaaccctttcttccaaccaggcattgagcatggcctttccgaagcgatcaatatccttatctgtgacatcccataggttggcaacaattgcaggtgaaccagctagcagataggatagtggagtaccattgggtacataacagccgttcagtgtcagcgaaccactactgcaacccatcaggagagttgcagcacagtttttcagtttttgtatttcatgccttggaatatactgtgctcctgtacagccaaacgagtacatttaggtgatttaatggttcaaaattacgactactcaaggaatacattgacaagataaaaccaagtgactaaaattaacaagtttaatcaaccataccacttccgtgcccgaaatatataaagaggtcatggcttttcaatgctgaagacaattcttcagcagtgggtgcaactccagcctgcccctgcatgatcaattgacatacaatgattcatttttgtgtcaaatttaatttaagtgaattttcatttatgattttattaaaaaagaagagaagaaaagcaatttacctccaactgttgatctttaaaccaattctcaaattcattttgtgtgcagctaagatcaccatcaggattcaataaataaaatgcatccaagggatctatgaaggggaaggttttaacttggtcttgacagtggtaacttttatctagtcttgcggagatactccaaatagaaggcatgcgatagacctcttgggttcttagaacaggaatattctcccatggaagcatctgagtcatcattagtcagtcagttttcaggaaataataatggtgacagtgaaagaaaacctaattttccagaaaatgctgacaactacattgctagggaaggaggagaatatatctttaaagcagcttagcatgaatactagaacaacagatgatgaaacatgaataactaggctgcgagagccacagatgataaatcatgaataggcaattagaatatagttaacaagataaatataacattgacatgtctacccaaatttagtgtaccttgcattactacaaaaagaaaaatagcaagccatctacatatgcctatttatgatgagaggaaataataaactagttcgtttacttctttaatattaatcatttatgcaagaccttaactatataaattgtaaaggatctgtggaaagaacatgattcaatttttaaaatccagaaacccacctgcacatcagaatcaagtattaacactattggttggcgatccatagagccatcactttcaagctccttcactgcttcacagatttgttccaaggccaaactagacagtttctcacaaccaatcctaccaatgtagcaagccttactcaaatataactgtgaaatgagttcctcttcttcaaaggcctcactaggaaccccaagaataactttgagaacactctcatttacatctattttgcatttagatttcaaataccgagtcagcttcttctgtacagtctccatgcgcttgcagctagaccgctccccgagaagtagatatttccacggtcccaaccatatatcctctactttcctgccacaacaatagaaaattttccaatcatgaaatcaagttctgaagatgtaagccagggtaaaaaccaatgtgcatcttgtattcttcctcacatatcattggtgttggaatattagctgtatattagtagtaagaattaagataaattgtctttagtagtttcttatttagtctcttagttttatatataaatattaaatatatactatattatagaatacaatacacaagtcaatcaccatattttacatgcaaccatttatatataaatattattcaacactatcatttgtgaaacatggtactcaatataacaacaaataaaattagaacattaaaataatatatttgtaaggaaaaaaatggcttagtgcatgtttgacatcataactaaaaaaaaaaaattgtttttaaaaacagaaaaaacaatttggcttgtttgaccttgttttttaaaacagttttcaaaaaacaaagttacaaaaaacaagaattttaaaagcaacaaaatgttgttgtctgttttaaaaatcaattcacttttggtcaatattgtttttaaaaaatactaaccaaacgtgacttgtgttt

SEQ ID NO: 112691 - DNA, 2669 bp, Cannabis sativa
atgtttcggaaaatgttttgttataataatctaatgtctttagaaaaggaatccaaaaagaaaataattatgtctaatgtatttttattcataattttttttgatttaattttaggtaactttctctaatatatgagatagaaaataaatataaggggacacgtaccgacatctaatgagttaattatgtctttgtcaaaaaaataaaaataagtatgtatttggtccttttggtaaagaaatttaacttatatattaaatttttatttaattttttttatttttgaaaatgttgttagaaattcagaaactctctaacttaatcgcatattcacttcattttacaaataaataaataataaaaaaaagggaacatcttagcattttttttccaaccacatttactttaataactttgtgaacaattttctaatatgtgttaaatatgtaaataattatattaatatcattaattacgggcaaaatttgcatacatgcaaccatatagggaagcaccataaagcttaagaacttaaaaaagaggtaatgcatggcagtaatgatttaaacaaaatttaatataataattaatattatacgtactaaccacacaataaatggcagttcctcaaactgagaatctcattaaagaatgacctaaaaaaataaaatcaatttcaccccatgaggaaaaagttagcaaatcaaatagaatcttaagcattcatgtggtgggtcccaaatacacctgagcttatcatcaccgttggattaaaagataatgaaacggtgaaagtagattatcaagaggggaccctagagtgtctcataattgggctggacaaacatcaaatcaaagactggatggctatgattggagtttgacagataaaacttcccattctatctcgtcaaaaactgggtcccacctcatccccttatttttattattttctaaataataataataatagaaaaaatccttgcatgcgagtaccacgtgggtcccccgtcgagggaggtgggttccgacgaaaaaatacatcgctttctcactcttttcttctcttaaaccgagttttacgctttcccatcgcgcgtgtccttcactctcccttaaaaagaaaccaactcgttagagcgtgttggttagttcccacaagagcgtctagccaaaaagaaaatatcattcctaagtggctgagttgaatttagccgaagccttttagaccggcttgatagaactcacgcctttcttatatttgtttttattattattattgttaattattttgtaatattttttttccaccaattgagatgaaactggtatcataaataagagaaataaaaatgggtaatgaattattttagtcaaagtcgcagtgtgtaatccgtgtcactcattaatgagcattccatttatttagtattttaaaagattattttcattgactttgagctttatttttctttttccttttaaaaattttaaactgctcatcaaattaagaaaggtaataaattgttgtgcgtgaccctattcagtcaacttttaactcctcaacactggcaacgccagctagcaaaattaacgtcaaaagctttcagttattcacaatataaacgttaaatttagattaaatattattttgaaaacagctttataacgtattagaaagtaaattttatcaaaataaatttatttaattaatttcatttaataagaattttgacaaaagcttatagaagccgagagagacaggggacaaggaagagtggatttcacgtgaaagagtgagtgtgtggtattactattactaccgtgttttgagttaaaaaaaaaaaaaacgaaagaagcgtgggaggagagagagatgccacgtcagataagtcacgtggaccaacatgtctaggctgggaacacgtggattcacacgcacactaccccttctaaccatacacgtgggacccactattcttcgggtcacacagtcgtgcgtgctattttgtctctcttctatccgacattataacttctcacaatcatttgaactctcaattctactctcctcactttcccacgcgtctactctggcgcgtttaccattctctgtttcctcaatcatttggtgccaccaacaaacatgcataattacagaaactttactcctatcatttcttttttattatatgaaatatataaagtgttatttacgaaaggaaaaaaaaaaaatcttaagaataggtgtgtatttctcgcatcacacactcattacgatttagtttcctaacaataatttatttttcatcaataaatataaaaaaattagtaatgtgtttgttcgaatttcatgacacacatcatattcttaaattttgaaaataaaagtagtgttctcaaaaaaatttttgaaacaataccgtccccaatttagtttacaatctattttactatttctaattttgtacaatgttaataaatctgattttttttggtgatccatctctttctttttcttcatatttatctctcatctcttttctctatttctaaaattaatttctagttacataaaataaaatatactattgtaatctattttttaatataattattttgaaatagaatatatatatatgttataaatattaataattatgtggat

SEQ ID NO: 112692 - DNA, 897 bp, Cannabis sativa
tgccacgaaacgggttcggatcctcatccgaatcgacggtgctcagtacacatctcggactatccaaatcaaaactatcgaattccttcccaacaaattcggattcggattcaaattcctcgagaaatgggtggttaagaagctcgttgacggaccacctctctaatgggtctctcttcaaacacttgcccaaaaaatccttaccttttttcgacacaaaactcggaatctccggcacatcatccgtaaacccaatacggtaaaaagccgaaaccgggtcaaacacatctgcccacggagcccgacccgtaaccatctcgatcaccgtgcacccaagagcccaaacatcggcggcgaagccttgttgttcccctctcgctacctccggtgccatgtaagcaggggttccagctacagagacccaatcaacacacgacacgtcatcgtaaaatcgagcgcaacccaagtcagcgatcttcaacccatctttagtgaccaaaatattccgacccttgatgtcgcaatgtactacgccagcggaatgaagatagtccaacccaattagaatttccctcgtgtaggctttgatttcagcttggctaagccgaccaccgcgccgggaaatcatatcggagagagagccaccgtgagcatattccaggcagagattgtacataatctctccattttccgaagagacattgaaacctctgtaatctatgatttttggggagctcaacgcagacaaaatcctctgctctctctgaagagactctgatttggaaagctcggcagacttgacagcgaaaatctcgccggagccatgagctgttgcgattgatacggtggcaaaggacccccggccgatagttcggcccctggtccaatccataagga

SEQ ID NO: 112693 - DNA, 3600 bp, Cannabis sativa
  modified_base (3564)..(3575): a, c, t, g, unknown or other
ctataaaggatctttgactatttgtattataacaatgggtaatacaaatcacatctatttttggtaatagtgtgttctatgtaattaagagttcaattccaaatctatagtgacatgatgacccattaacctataagcaggtaatggcaagtctggaacagaacaacggtcagccaacatggattcaaaaaaatggattcaatgaagaaaaataaagtctgggatggtgtagttgcacttaatgactatcatccaatcgggtgcaagtgggtctaccaaaagaaaataggtattatggactagtcaaaactttgaaagctagacttgtaggaaaggtttacatccaaagagaaggtgtggactatgaggataacttttgtccagccgccatgctcaaatccatcaaaatacttctctccatagctgacgctctcgattatgagattttgtaaatggatgtccagatagctttcctcaacagaattcttgaagagaccatctatatggatcaactcgaagactataagattccatgataagaggataaagtctgtaaactaaacaagtctatttatgacttaagcaggcttctcattcttgaaacaaaaggtttgatgaaatcataaaaacctatggtttccaccaaagtgaagaagaaccttgtgtttaccaactcaaggataatcaagtgatagtttttctagtccttcatgtggatgacatcttgatcattggaaacaatattaaaaggatgactaacatagaggaatggctcaatactcaattcaaaatgaaagacttaggtgaagctaaattatgttctcaagatccaaatttttagagacttgaagaataaatcactcgctctcgtgcaagcagtttatatcgataaggtgcttaagtgcttcttaatgtctaatgccaaagttgcttgcatgccttctagacatggtttgcatctatctaaggaacagtgtcctactgatcctcaagagatataagacatgagaagaatcacttatgcttcagttgttagaagtctaatgtatgatatgctgtgtactagacccgacatctgctatgcaatggggattatgagtaggtatcactctaacataggaaaggaacattggataatatttaagcatatactaaaatacttgaagagaataagggactctatgttggtttataagggtggttcactcaaccttttaagctatactgactcagatttttaggcttgtgtcgatgactgaaagtctaggatggtattcactcttggggtggagtagtggtctggagaagtgttaaataatccgcgatctctgactctaccatggaggtcaaatacatagctgttgctaaggctgctaaggaattggtcaggctaataaagttcttcacagatcgagcttggtattatttcgaacatgcaaaagccactagtgttactttgtgacaacactatggctatcaccaacagtaaagagccttgaatccacaagaagaacgaacatatagagagagagaaaataccacattattggagaatacatggttagaggagtcgtgaaagtggagaagatcgataccgaagataatcttgcttacccattcacaaagacattgccaaaggctgcctatgagaagcattttagaaatttagaattagtttaaatgtattgattgttttatgttagtgcaagtgagagtttattgaattttgtgccctaactaacatttaatttcaatgtaatcttatttttttttcatcaataaagaataaaattaattttattacttatttagtactttgcttgtttcacatgttattattcataattatatgattgatatacaaattctattaaatccctatcacattgttcttatgattatagtattttctacatagtggaaaataatcatggttatatgattaaactatctagtcctatgatttatcaatgcactgaatctatactaacatgataatcaacgatatggtttacttcaacttatataagtggagtgtctttttccaagacatcagtttagtaagtttgtattagatgtaatggctatacatcaaactagaccaatatttatagtggaacgatacgtaaacttactgtagtatcttttctaagtaaatatcactatatgttgatcttagatcaatgctctcaatcctgagatggttaagttctaaatcatattgcacatgttctttgacttattcattaccaacttacctgtaggattagcccatacgtatatcttgagaacatagtagtacaattgagtgggagtgctaatcatagatatggaatgtataactcttataaatacttctaagtgaagtgatggtttccttaaagcttggctaaatgagctaaatggtggagtacttattttagtaattatattagtttcttaaaatatcatttacaagcagctatgtgttttaaggataaaatatatttaagggtaaaactataattttgttcttattcgatgtagactatctatagaggatcgttgattgtttatattaaaacaatggataatatatagtgtatctattcttggtgaatacatcattctatgtagtcaagaatgtaatttcgattctatagtggagtcagaagaaattaataagttagagaatttactaagtaaattctaaaactatttattgggagcttagttacataagcccatagtattgttttgtagacttaattaattgatttaataatcgattaagattctaaatgagaatatatcttatttatgaattttactacgtaagggtaaatttgagaagaaaagataatttaggatttatttattaattgagagactttggaaggtctataattgataaatacattaaatggtaattttatttaataattaattataattattaaaaagataaaattagtgtttaacaattagaatagaaaaaaaatattttgaagaaaagataagtttcaataaaatgataaaattcaaacccatgggcttcattgtataattcggccaagggatttaattaaacttttttttttttgacttctatttaattttaattctaaccctagttgtaacaccataaatataatatgatagcttttgattaccataacacttttgactcattttatcagacaaatagaatcaaagagagagctattatattctacatataatttttgagattcttttgttcttcttctcttattttcaagtactttgagtgttaagtaactgcctacacatatcaatgcaatactcaggttagtgaggaagaatgtgtagtctgtttgtcaactgaaggagaattcaagttaagttcttgatcaccctgcaacagaaaggagaattccgctgcaaccaatgtaaggatttttataaactctttatatgctttacattattgttttagaaattctatatttagaatgttagatgagttagattagtaataatctaatatacttgaataataaattaagatgttgtttggtaacatttttgttttttaattttttnnnnnnnnnnnnaaagtaaaatttttgtttttgaaaa

SEQ ID NO: 112694 - DNA, 783 bp, Cannabis sativa
ttctcataaaccaagaattcggttatataggcacactttatatagaatagatttatcattattttaccatttatttattaaactatccctttttgacaaaaataaataaatacgtttttatttatgattttataggctaaagaaaaagtatatataagacatatatgtttatgtaataatagataattgacaacaacttgatcgatttgaagttattataataagccagcaattatatcatgaattaatataatatcgagtgtacttaaagtataagttgtaattttcataagtcttttcagttttctttaaaccataaatgaataactccaccaatcatataaatttatgagaaatattaaagagaatcattaaccttcctatgtattattaatatagatatttttattgatcaaattaaatattaagtgtgttatataatttaatataataattttttgagtacattgttagccaatcgcaatgtcactaagcacgagctagatactactaacacccaattataataatactctaaatataattacacatacatatggacacaaccattaatagttttgcctaatatttttgacattaattactagctactacttgatttattattagattcttgtctcgatcgaatatattttactataattttttttatttttagttaattagaataaaatttgtgattaaaaaataaaaaaattgtgactaattataaatcatatataattcatatgttgtgattaaaatatctgtgactaaaagtat

SEQ ID NO: 112695 - DNA, 5318 bp, Cannabis sativa
  modified_base (2636)..(2655): a, c, t, g, unknown or other
  modified_base (2943)..(2950): a, c, t, g, unknown or other
aaataatattatattattatttatcatatattaaacaaataaattttcctatgataaaatagtaataaaaaaataaaatagagaatatataaagaatactaaagtatggtattctttagtggcattctctttttcattccaatagtaagcatcaattaaaaaatactaaaaatatatcaatgtcatcaaatattcttcatagatactataaatagaagctcatttttagttattagagtgtaacttttaaaaaagagtaattataaaaataaaaaaaaaaaaaaaattctccacttttcttcttagaaattttatgagaatgattaaggttagggataattacatatgtaaagtgatgttattttgtatttttgattacttgtaatatttatttgaataatacaagttgttattcgatttttattattacgttcttcatccatttacactattatatatgctatgattatagtaatagtaatattacttatattatatgtttaatgttcatttttatttgcttgtcattcaatggtataataggtttaatcatgttttccctgtgtatatataaaaaaaatatatattaatgttcatttcctttactatataccaccactatatctatctttttgtctttattttttactaatactatatagatcatcctcttttctatatgtttctaattagtaaaaataatatcgatttagttttatgtataattttgttttatattattgcttaatgtgtaatgtcatttataggttctatattagattaaattttttttattattatttagaacttgtatactcaaaatataatgaattttaatgttacatcttttgtgtcaactttatgaattaaatgtataaaataacttaacaaacataagaatgactcatgaagtctttccctctttaccattgattgcacatttttgttgctttcttttactatattattttaaaaacaaaaatcacaaatttattggttatcattgccattttttattaatcttttatttttatttttttaccaacacttttgtcccatcactttcttatggaatcgatcatccgatttatactgcaaccactgttattggaaatcacattttgggcattaaacatccttacacaagctagaactaattgttgagcttttatcacagctagataatgcttggatttgttcacatcttagcatcaagaattttcagatatgacaaaagataatggttgcgagagagggcttctggcgatggtggttgggcaaatgtgaaagggttttcagatatgacaaaagataatggttgtagcctatggaaataaatttaagattttcagattagggtttcagagctaatatctccgtacatatatgtgtgtgtttattttttggatttggatttgtttaaatttagttcaaatttggttcgacttttattttgttttgttttatttttgtgtgatttggatttgaaaaaagattggggatgtcggtgataggttgtcgtgattttagaagcggatggtggtagttttcgatggctatggatggtggtgctggtgacagtttgtgactggaaaaagaagaagaagaatgaaaactgcaaaataaatgtatgaaaaatatgaatgttagggaaaaaaatgtattttttatgaatttttattttctaaaaaattatataattgtgtggactaataaaattgtgtcacgtgtacactatgtacaataaaatttggcacttaacaactaaatttaaatagaaactataaactgataaaatggttatttgcggcataacccccaatactttcactttacttgcacttaacctcaaaaattcaaattttggtagtaaaactcccgaaattaggaaacatagcaatttaccgtttccatccattttaaatgttaagtgtcatgttagactgtccatgtgcacatctatgtagacacgatgtacgtatgacataattttattggtccacgtaataaattattttaaaaataaaaaaaataaattaaaaataaaacatatatttttcaaaaaataagtaacttttttccctttttttcttcttcattctttttttttttaagttcttcactttcacatataccatcaccaatattattatatgaaaagattaacaatcaccacccaccaccctcctccacaacccaccctcatcaaccatcagcgcaacaaacactaccacttcaccctactgtttatatccgaatcacacatagaaaaaaaaattaaacaaaatttaaactaaatttaaacaaaattagatcaaacaaacacacacttatctacacaaaaatttcaaatcttcaacttcgaaccagatctaagatctctactttcattgcaaagcccaaccccgactatccacttacgagatctccacacgaacccataaaaccacaaacccacgaacccatccatccccatcgaaccaagaataccatccctgtcatcgaacaataaacccacgaagctagaccatccccgttgaaccacgaacttgtctccatccccttcgagccacgaaccccatcgccatcctcatcaaacttgcacaaaaaaatacacacacacagagagagagagnnnnnnnnnnnnnnnnnnnnagagaaagaaaaagagagagagggaaaataaaagagacgagttcgggaggacctgagttttgggggtcgtagatcttgatttcgtggtccaaatgcattgccggagtgcttctccaccaccaccgacgacttcttcgtgagtgcatcttcgatagaaaaagagagagaggggcgaatatataggctttaagggacgaggatttcgattttgtagtttgttttaataataggtggctggagttttgggtttgctctaggcaaatcccattgagagagagagagagagannnnnnnngagagagagagagagagaaatggtttggaattagggtaaatggttgaagaagaagaaggttgaggaaaaagaaaaagaaaaaaaaaaaagaagaaaattatattttttttcaatttttcttttatttttttaaatgaaaaaaaaaaaactgaaacgaaaaaaatgtttttttttttatttataatattttctaattttagggcatttcccgtcaaaatttaaattttaaaggttaagtgtaaataaattgaaaatattaagagttatgccgcaaataaccgttgataaaagtatcttagttttgttttttgccaccaaaatttaaattttgagttaagtaatgtaataacaaagtaaaaatattgagatttttaccgtacttaatttaattttatttattagtactagtacatactatataaagtcctcgccaggtcacatgctcacaaacggaaaacaaaaatgaaaatgaaaattggagttttattcttcttaattctgcttctacgtacattttcccctacttcggcccattgctccagtgaagaagaagaagaagaaattcaaaggtctcaattcccagacggtttcttcttcggaacaagcacttcagcctatcaggcactcttcttcttcaattattattcttttaattagttccttacgacccatttttctgaaatgttatgttctttactacggtattcttaactatttttaggttgagggagcatttcttgaagatggaaagagtctcaccaactgggatgtcttcgctcatattccaggtataaatatgtcaatcaaattaatctatgtataaagacaaggatttctctttaatttgttattgttatttatcccttaatcttatatatcctcaaatatttcaggaaacattataaataatgaaaatggtgatgttgcagatgaccattaccaccggtatatggtaaacattaatttgttttatttggcttggttaaatataaatttaaatgccattatttactctgttttttaatttttggtttttacaggaagatattgaattattgcattctcttggggtgaatgcatatcgattctcaatttcgtggtcaagaattctgcctagtatgtttatattttggattattatcttatttattaactttataagctaatgataatataatctcttgagtttttactacatcaggaggaatatctggcgatgttaacccagaagggattaagttctataataaattaatcgaccacttgatacatagaggtaatattaatttcatgttcgcccaaatagtttatagaagagaacaaatctttgtttcttatttatttcattaataagagaatttcttatttatatatggtcaggaatcgaaccatttgtgactattttccactttgagtttccacaaactctggaggacaaatacggggcatggctaaatccttcaatgaggcaattcttttattttgcaaaataatttgtcagcaaactaaatagtaatcctagatgtatctgttttatctaaaaataaaaaagaaaaaatctgcaccaattgaatgacatctttgaaaaggaaaaacaagctagattagctcagtatgtggttttttcttttttgtcatttgataaacagggaggaatttgtatattttgcgtcgatatgtttcaaggaatttggagaaagagtaaagtactgggtgaccctaaatgagccaaaccattgggcggaatttgcctataataggggagagtaccctccggctcgttgttcgccgccgtttgggaattgctcaaggggcgactctgatacagagcctcttgttgtcatgcacaacatgttaatttcacatgccatggctgctcatctttaccgcaaatgctttcaggtactcaactccaaagtttattacttttgttttttacacacacacagtaatgaaatgtgcacacaaatcacacacatgtgaatacacacttatttgtcaagttgttttaaccaattgtttatatttaagatagattttattttcacttattaaattattaagagtgacttgccatttcacttttatgtgtggaatgtgtgtgcctaggcgtgttcgtaaaatagccgatccaatccaatctgcacaatttaattcacaaagtgtgtatatctgcatttgtgctgattaaattaggttggaaaattcaaaatccttggatgttgattgacatgtaaaagtaacctattcaatccaacccacacatttttataaaaaaagttaaaaaattatatatataaatagtattttaatataaagaaaataataatttaaaagtctaatgcatataatacaattatatttcaaa

SEQ ID NO: 112696 - DNA, 3814 bp, Cannabis sativa
gggggggggggggtgggagatgccatcaaggtgaaatttacgaaattgatctttgatgttgtagtaatcctcccaagtacatcacaaagacccaaggtatttgttgagcctgtttttggatgttgtagagctggggtgaacatccaacatgtgatttggttccactttccattccaagacctagggtatttgttgagtccgtttttggtgccaagagaaggatgagacacaaataaataagttgtatacaataagccaccttgttgatgcgtgcttacacttttgtaatggctttaattgtaaatggcaacatttcatggccctcttcgagaaaattcactttagctttcatgacgataagtaaattcttttgaaattgcacaaaaaacctgtaggatatccaacggtatcttaagtgagtggacaaatttcttggaaggtctgttttcctttgttgttgtttttttttttgaatgtattcaggttaatattctctattctacaggtttaacatggtctattgttttgtagtttttttcttatcccttttaataatacaaattttcatttatattttttttattcttcgataggaggccgaggtgagagaagcaaaaaagttgaaatcatctcatgaaaacattgagttgttaaaagtaaagcttttggaagaaagagctcgaagggagagagcagaatctgagttgtctaaattacaagagatgcagctaagcatcaacaagttagaggatgaattgtcatcttggaagttactgattaatgacatacctggtgtgtcatcttctgaggacatatgtatcaagttttcagccttacagaggtaagcatataattttatatctgtaacttgtattattagattaatttaacaactttggtatcattaataagaaaagtaaagaaaagtcttagctctcgggatttgctcccctgtaactaaaactgaacacggtaaataacatctataatgcataattttgctgtatttttatgatggaatttttcctttgcatattggtgatgaacgtgtagaagtttcatatgagatttcattttattgtattttattccgtggaggtatgcatcacatcaattatcattttgcacatatttttacaagccttattttgtgcacgtgtctattgtcaaaagaagtaattactactttattttgggttgtaacttggatctacaagtccaaggatttttggtactatctgtcctagatctcaacagagattggggaagttttctgcattaagcagtatttgtctaattgttttgttttacattgctatatttataattgtattcagattggggtcatatgatctcttcactatgtatttctcacaatattatacaaagttgtttctctaaaagaaatgaaaaaagaataaaggaagtaattaccactgataacatgtaattgtgtgtatggtgaggagaatgattaagttgcttcttttctttactcatagcagaaaggcttcaatttagtgggctctgtcttcaaacagataatcattgttttgtttccctgttattgtaatttttttcaccctttattttcttaaaggttttttcaaaacatctgatagaaaggaagagttccctaattataagaagataatgtagttggacataataaccttccaatttagaccacttaaacacgtaggaaaatcataaaattctgctcagggtattttccgttttgccaacaaaaatatccatatcaatttcaaatccagatcttgttcctttgggagcagaagtcagaacgaataccgagacgaataccgagacttttttttttgaaggttgcatccaggttgcatccttttttttttttttttgtttttaaataaagaaagccatatccatattatttttcaatctttcttgcattttattaataaaagaggaagaatctgcttttgggttaccaatttctgtgctgtctttttgttgtggactatgatagttgatccatcaggttaaaagccaacactacttaatgggaaagagtgacctgacttctttgcgggttgggttgggttgtttatttattttatttttattgcaaagaacccacctcaaaccaaaataactgacaaaaaacgcaacctgattaactcgatgaaaatccaaattgccaaattaatgcatggccaaatagttttgttaaatttcataataaacaaaaccagtaacatacgatcagattttgaccccaaatttactaaaaaacactattttatacaaatttatagatattaattattttcctaacaatatttaattcattaaaattagatacttagatttaaagttatgaataaaatactaaattttgtttatttatttaaaatattttgttagataatagtaatataacagtaaagttgacagaaaaaataaaaaacggtcaaaccaagaatcagttaatacataatatgtagtgttagttgctttaatggaggccgaggttagcaattactagtgttagtttcatgaattatttgtccattggccacttattttattgataaacgattgtatgtaaagatcagttttgctgattttttaagtagttttttttttctgatgcagagaggttattgatagcaccatgaaggtgggtgaggcaaatgctcgcttgaaacaacttgaggtggctttggattctgcacaaatagataaacaaaatgctgaagctgaggctgctttggctaaagagaaggcagaattttcaaaatctgagcttaaacagatagagaaaatggtaattctttattgttagagtagcttttttaaaagtaatataactaatagcgttttattatagaatgattaggttattatacaggacttagcttctgtatgatgtaaatgctgtttatctatcgcagcactttaaaccacacattgaagagttttcttatggatgttgaagtgatatgtacacttttaagctactatgataccttcatttttctctttctttttgctcattgttgaatcatattggacaattgcagctttccatggttactgatgaaagagagagcttgaagaatgttgttaacaaattaaaggaatctaatagcaatgaagcaagggaccaagaagcaagtggaactggaacttttgttcaggttgagaaacttctcatttgttgctctgttctggcacaattatagttacacaatttctcctaaggtggtttcttttgtcgcatggtttgtgtttgcaggaacttgaatcaacacttgcaaagaaagaatgctatattaaagagttggaggctagtttaattgaacaaaaagaattcaataatagtaaatgtgaggaggtaaagttactcaatgagaggttaaataatgaagccaagagaataaaatcactggagagggagaatgatagattacgttcagagatctctttgttggagtcaaaggtaggttccaataatttttgaggagttctttcacaattatgctgtcatatttaaagtgaatatacatactatgagcttgcgtatgattataattgtatgtaaaataaaaattaggcgagtgtgtgttcctaacctctgaaagtattcttaaagaaaaaatattattacgtgaggagtatcctttttcttggctgccttgaaaacgaccggttaatacttaagttagatattagatgtatattagctgtaaaagaattagatatttagtagatatttagtctcctaactttgtatataaatatgtattattctatgaaatcaacacacaat

SEQ ID NO: 112697 - DNA, 2124 bp, Cannabis sativa
  modified_base (2029)..(2029): a, c, t, g, unknown or other
gttaataaccttaaaagttgctttttcacacttgtcatggatatagatttgaatttagactttttgactactgttaataaatattatagctacttcaaaagatatataaaattcacgtgacttcgaaattgatcattttattaacaattaatctctgtcaccaaaaacaaggtaataaaattaattggaaccggcttcatactataaacataagtttggttgtatttctaatgtgaactgcctattttgtgaccttgatttagagaatcatcagtacttaattattatttaattgtgaggggacatatataataagtaggtggggtgagttgtttcattgcttaaaatgggtgaaaaggtgtaaacgggcaaggaaggaatgagagctctacgtacgtgactgttataaatgccttggtttataatatttgggaggctaggaataatgtcctttggattaatgctcaagtttatactgtacagtttcttgtaaataaaattaaccgagagattagtcttaagttctctcattttaaaagagagaaaactagctagtttagaagagttggattgattgagtatagcttgattgttatactaggctgtaaagatgtatttgattgaaactagctattttaacatgtggtgttctagctcctctttcaaacctttggttgaaacaagttagaaggatctagttaattaatgttgttcctatgtaccaattaacaaacaagcttaaaagacttaaaagggacttatttaaaggttgaataggaactgttttggaaatgtttagaatgataatactactataatttagctttttagtgacccggacaaaagtactggtcactaaagagttaggagtgacttttagtgacctacacaattagattctaaatgctcagtattagtctcttatgatttgggtcactaaaaatatagagagtcattaaagaattataaaactcaaaaaaaatttaattttaatttttttgaaaaatactggcatatacatagtgatgcgccaagtgcaacaagtgcaattggataagtatattctgacccacctggcataatttagaaaaaaaattaataaaaaacaaaacatagttgtaaagtaatgtgattaataaataaaaaaaataaaaggtggatagttagggtttacatgaaaagtatgagacaagataaaacacgtggcgtttctctttcttctccctctcgactgctctttcttcttcttcagcgaatggtgtcctccagactagctctcctcctgagaatggcatccatggctccttggatttgagttttccatctctcaaactctagtcggacagtcgtcatctccacctcgtctctctagtgaagggatcttggtaatcggtcgttgtctctattcgatcggttgtcatctctatgggtcgtcatctccgtatttctcgtcgaggatcgaagatcccaagaaacccaagataataagtcgaatctctattttattttttctatgtttctcccactctcttttacgcagagatctcggtgtccacagtttcggttcgaggtcaatgtgcttggaacttgtttgtggaggcatttgaagctcgtccatgattttggttctagctcatctgtggttcatggttccagtttgtgattgacggagtgaatctaaatattttttagcctttttttttattatgttttgttcagaatctaataatgcttgtgttattattttttttggttaaaatttatgttcaaactttgttattgaattattgatctaatttaggctattaaagtttatatttgagatttatttgtaaagttctaacgtgttgtgtgtatttcagctcaatcatatctatatatatatatatatatatataaattgttttaattttttttgttgggattggatattgttttgattgaagtttattgtttaattaaaaaataaaaaacaattttcctttcaaatcgaatctgaataaattatacatttaggtggcgtttggtnggaggtaatgaaatggaatggaattgaaaggaaacaacttttattccattcctttgtttggttgcattttcaagtattgaaatagcattccaatg

SEQ ID NO: 112698 - DNA, 3189 bp, Cannabis sativa
ttcaaaaaaaaaaaaaaaagatgggtgctgtacttttttttttacatttcatatttaataaaggaaactctttattttactgaatatgaacaacaaaatttcaatacatcccttaactgttccaaggctctaattgtgtttcaggagtgtagaagtttgtttcctatcttatttcagactcgtggattgctcttagtttagggacaatagaatccttttttagaaaaattagtttgctttgttttcagaagaaacttccatctttatttctttattccatgcttggactgctcatgtaatgaacagacatggtgatttactatcatcttaaatgggaaacttaattatcagtgtaattgactatgagcaaaatgacatgtaacttttggtctctgccagggaaaccatttttttaagctgtttcttgctgtattaatttgacaagtaacttttctgccttaatttgtattaaatttatttgttaactatgttagttttcttgccggctttgcagctagagatggttttcaaaaaggagtgcggtgaaaatgcaagcatgttgaatgaagaggtatgtcaatgatatccacttccatgctttgcattgctattactatttagcgattgccgtaacgttaacaaaattctcaacaacattagatacgcatacatcccatttaaaatgtaaaagctttgatgagattatttatattaaaaccaaatgccatacttttgccctaacatttgaattaaagattttattcacggtagtgacaaatatggattattagctcttgtggggtcattaatacattcacacaatgatcttgttcgttacacatttagggaacttattaattattttcttatttggtagcagtggaagtttggaggtagattattcacttacagtttagtgagatgtggcaccgatctaggggctacaacctaaaattctctaaatgatgggagattaaactgttgatgaactttaggagtaaaatcagcttagtctccattctaaaccaacattataagaattcttttatcatgtaaattttgaatcaatcaaaagtcaacctatgtacattattcttacagataacctttttcgttattcccggtaataggaagaaagagtactggtaaactaatcaaggtttgttttacccttttgattgattcaggtatgtcttccctaagacaatttcctctaaataaatcaaaaaggaatatacctaagaaaatatcaatgaaaagggataacacaggcatgcctgttcagagttttaaggactttgcgtgcaattcataaatatttatgtatgaacgcccccttttaaggatcagagttcctctttggcgggtcagatcacttagatggtagagtatgaaattcactgggttacattgacttgtgcttagcactcttaatcttggaagtttttatttttagtctttctgaatagatttaagacatatgattgctcttgtgattaaattgttttggcattccacagaattcatgggtgaaaatatttcaacatatcctcatttgggtggaagagcaaacatactggatagcttctcggtttctaattttgggtttcgagttagagttatattcccccaatgaatattgcatggtgtattggtatttatatgttgtactggttaagcttgcagaaaaaactcatcttaagatggcagtcaccagtgggtctggtaagtgtgccattaaaaattctaaccttctctgagcaaatgcacatttgtatagactttcatatttgatggttatgttactacaaattttgccatgttttgaatttttgtacctctgctaatcaggtaaaaggagaggaaagaaaaaaagggatacttcaaaagatgtgtcgaaagaatatcaaatcccaccagcggttttgtttctgcagtgtcaaatatgtttggctgaagggctcactatggtaaatgtgcttgattaatatgtttcctagataggacattcaacaccacttccaccatttaacagtgacaccgagtcactgacagtagccaattgaccgaaaagatccctctaccctctatcattggtagatgatttggtttattatatcttgagccctacactcaattaaaacactcttattcaatccaatattttcagatgcttgctgctcttaggaatgaacaaagaattttcgagattcgaagcccttttaataccgagtatgaggtatgattttattttcctcttcagctatttgggctgctggaagttccgttggttggattcttataaagatcttttgtctccctaagcttaagtttgaacttgttattccagagatttattcaacatttcgagcttttacaaaaagcaagcattcctgatcacattgcatacccttcatttcaagaatccacaacctacgctcgcttctcggtgagtaatccacaagcaatcttcatattgtttatgcgatcctctgggagacttactggttttttcttcttcttgttcagaacctgcttatgtacaattgcttcaaggatgctctgaggatggcaaaagaggtgaagagtagtttctcaaatgaaccggacaaattagccgaacttagaaagttagagcaagtagcggagcacaatagtatcgcgttgaatgtgatttgccgggttggaactcttgacccttctctaaaggtttcttttgagttcaaccaccatccttactttgctaccgcagtagttaagagatcttgatggtgtcttttaataatgatctcaacaattttgcaatgcattaaagatacagatagagtcttgttacggctctttcagtatcaatatttgttaaagacgtcaatttttattacattaattgtaattgcaataatagtataataaaaccatattagttttcatattagttttatatttttttttttttaattttgaaagagaataagtaggtgtatgtatacacccgtgatagcgattccagctcgatgttgagtgttgttcacacttcacatcgtataatacctcgtatgccatctcaagttccagctgtcattctttttttggcatttttatgttttttaaatttggatgtgttaaatatatatcttctaaaagaaaggggtttttttttttttttttaaattttttgggttttttttt

SEQ ID NO: 112699 - DNA, 1236 bp, Cannabis sativa
ggaaagatcaaggatggcaagtgattttgaggagttgagtaaagaaagagaagaagggatagtaatattaggaagctgacacagactcaacactaagtttgtaaggtatgggagttgactaacagtttgaacccagtcaatggctttgctcatgtttgtctcagtaaggtcaagtactctcaaagaagaaagatgagaaacccatttcatgtttgtgatggtgagctcataattattgccaagatcaagaacctgcaagctagaaagatttgcaagctgaggaggaatttctccactcatttgtgtgtgagagagattgaggtaccttaattaagtaagagcatcaatgaaagttgggatttggttcccttgaaaatcaacaaaactgaggtccaaataagtaagaaatttcaactcaagaagccaactactgatgttacctcgcagaaaccgatcttcttctttgtagaaaagccgaggaggcaatctatttgttgaaggagaaagatcaagagcagtgacatgacctcctgattcattggaacactgaacaccataccagtcacaacagtctgtgttttctttctcccatgatgaaagaaatccatccttgatttgataaagttgttgtttgaacttgaggagtgcttgtctttcatggtcgatgcacctcatgatttttgcttctccaattgatcctgcaatgtaattcacaccatggatacctctcaagtaagtccaaaacatcaccagaataacaatttgaggagctaatctattcattatggatggacctttgttcagtgaattcaattgatcaattcgcttctctctcactaataaagtattaaataaaaaatctaaagcttgattgattacattcatttatagtcgagcattgctattgggcacgagtagtacctagcacccttaagacgtgtcgctctacgattggctagcgatactctttaaaaattattatattaaactatatgagacccaatatttaattagaccaataatcatatcaacacgtaggaaaatattaccactgatacttttaagcatttctctttatagtcatatgttttttttctttgatgaagaagatttatagtcatatgttggattagtcaaaaatcctccttttgactaagtatttaattatgatagaggaaattacattctataccatttttattttaccctcttttttaaaatctatcatttttacct

SEQ ID NO: 112700 - DNA, 3409 bp, Cannabis sativa
atcgtggaggagatgatgacgtgtcacgtcattttgtgtgtgatacattattaacgttatttttgtaaaaacttacctaatatagtatattcctaaacaaatcccaaatgaaaagggatgggctaagtgggcggggctgggctgagttgggccggcccgggctgggctgagcgagagtgcttgcaatggcccatgggaatgagtactttagactgagtagaatagattgcttcggtgaattgaagtaagcagtgagcactagcagtagtagcttagctatggaggccatgtcttgttctgtgtacctgagttcaccatcatcatcatcatcgatactacatgcactaggttatcgtaattccagtttgaactccaaccgacatgatgattatcatcaacaactactgattaaaaccagaagaaacccttacagttgcagaggtggtcatgttgttgtttgcggcagcattggtaattatcaacaactactcgcagaggtcgctccttctacctctgcactctacggcctactcctctcctccggtggtctatatgcctgttagtcaccacccattcattaatctctatccaatcgatctcttactattactacatttttatacatcaattgaattccatatgggtatgtgtgtgtgtgtgtgtgtgtgcagtcacaaaatctggaagcaaaggctctcttttcggaggccttacaggtggagctctgatggctgctgtaagtgctcctaattctcaacttttgaaatgttatatatcaaattctcaaatcaaatccatttgtttaggtatgagattttgatttagctgtaattaatgtgaataataatatggttatggttttgtaggtttacgttctgatgcaatcagcagagagtagacccattggggatgctttggggtttggctctgcattcctcttcacatctgtatttggtaagagcatattagtttattttcatatgtaaaaggaaaagatgcaacattttcaattcattcatttctttaattctcaggtattcggttggctgctactcgaaaattgattcctgcaggccctcttttaggtgtctccatatgtgcattgctcatctttatctcagcttatctacaagatatgcctcctttagctacctagtcccaacattcatttgtatgtctctgcttttacttatgttagtaatttaactacaattaattacttttggctgttgttgttgttgttgttgctgagtatttaatgttctgatcaagactccagttttcattcacaaagagtttgttcgtaatatggaacacctttggtttttgggtataactggctattaagtgactggaaatgcatgtttaaatcagctaaatttaaccacatatatacactaattctgtcaacaaaactgaaaagtttgtaatttagtacctagttgcacaaatgtttgcttatgaatacatatcaaaattgttaatctttatcctatttgctcaataaaattctgcttctgtttttggtcttgtctttctgctaagtgaaaatttcagtaattaagtaaagaaggtaggcagcttacatgttggggaagctcgcggacaagaaaggtgggagagcaacaaggtagttacagagctgtgaggtaggaggtagaattatatttaaactactttttgcataaatagctaaaataataggctaggtataggatgatctaactactaacgtacccccagaccaaatatagagttgagaattgagaagagagattgtacaaaccagtttgagtaccgatcgactaagcatgaattaatgttcattcaagtcaagtgggatgcctattgcctattctctatatctagcctaggaaatttgagaacataattcccacatgctgatgctgctacacaatttatggatatccatttaaatatgagttgtgaatgaatcattttggtttattttatgatcattgactaatttaaactgggggcatttccctgtgtatatatttccattaaattttaaaaatctatttttataaaatgtataatttgtgccttaccttaaaagataatttacaagttaacgacaacacttattagcgctgggtaatgtgtaaattagaagcatattttgacccgatcgatgatgaacaatataattcgcttatttttatttgtttatattttctataataattaatagaaaatttgaaaacatggcagaaaattttaatataatatttaatatgtatacatcaattccacttaggcataataatatgttgagataacgttatttaaccagaaaaaaatatagtcagagcttactacctttcattatggaatatggaacggtcgatcatgcattattaaactccaaaggttacaataattaattaagaatcacttgctaccacgtccatgtcaaagactgacacaaataataataataataataataataataataatgctccatggctagctaccttaattattattcaatacaaaagtcttcatgtatgaaatttacacaacgatgtacatgtgcccctatatacatccctaattataaatttattattagctaattatataaattgattgttagcttaaggaaaaaaaaacagctattatgtcttttgttttattagtagcaaataagaattaaaagtatacatgacctcattaaggaaaaatctgtaatattaccccaagagatgttgcgttacacttcctaattaatttcacatctaagaaaattgtttagtttattttttttcaaaaacgtttatattgtagttttatagaacttttaaatttttttttttttaatatatagtttagaggatcttctaagagaggtaatatctatagttatcaaaagtaacatatgtatataatattatcgtgtatttttctataaaaagtactcaaatgaaaagtagcatataatattatattttaaatattaaaataatgaattttttggtaaaaataattttatttttaccaaaaaagaaaaaagaaaagaaaagatagacatggtcattgtcttttttaggcaaccctcaacaccttaatttttaaaatttgtcttaaaagttgaatcacattgtatatgtggcaagatcactcttataaataactccagtattgaaatatacaaaaaaataactacttccgtatatataaaaaaaatagtcacgacgtcatatttgaactgaaaaaattaacattaacaatactattatcattttaattaattttctttgaaaaaatttgtataatccacagcctacaatagctagcagtaaaatgaaccaaattaattaaggttgaactatacctatattatattaaacactttgaattttacataataataataataata

SEQ ID NO: 112701 - DNA, 3835 bp, Cannabis sativa
agctcgagaccggatgagggactttaattcctgaactgtagaggtatgccctaaccctctacagttccaagcaatacctctcatggctcctatggaggagattccacattctcctccacaggggtgtgagagtaagcagacccactcgaaacagcatcatcgatcacaaatgaaccaatcaagggattcttcaaaataccggagcggcttggtgagttagaactatccttagaaggctcatccagtaccatatcaggggcattctcatcttgcttcgtgtcccagggaaaatcgcgaacaacaccggggtacttgcggtagattttgtgaggccttgaggaaagagaagcaaacgattcgaacttccttttcttaaaaggagtcgtcctctcgttaacctcgaaagaagccgggacaccaatatctcctcctatcttgcgaatctcatacaaatcaagtttgccaaaatgtttgaggtcattcattaactcctcttgagctttaaagaactgagacagagctagatcttcgttcatgcgaacttgatcctcacattcacccaagggcatagaaggggtgagcccatcttgtccaccattagcttggtccaaaggaaccggcccaatacaattgggagagagagaagacccaatcgggtccacacaatggccaacataggaatttttatttaaatgaagctccatcacatcaggcccacccttatttaaaggaggtaaatcctgatggttcggcccactaggtaataaattaccttgaaccacttccttcaacccacaaggtaataaattaccttgattaaaatccttaggcccataaactaaatgcttttcaatcggcccaatgatatttaaatctggcccacacgaaggcggcccaccatccagagacaagtcaacggcattattactagaattcaaattttttaatttcccaccctccacgcttaatctccccaaagaagcaataccctcagaagcttttccttgcaacagaccccccttgtcacctccattgcccaaaacagtaaagctattctcatagcctgcatctgattgcttaggatgccactccaaacgctagacttccccaggcttagcagctgcacgatgggtcaccatcacagggcgcctcggtcgatgaactatcccagagaaacccttcgaaccacctgcaaccggagtcggggacgccaacaacggacggtgcgcaccaccattcttcaccacggccaaggaggaaaaattactagaaccaccatagaccggtccagagaacacatcgtggtaggtggaggacgttgaaagccacggaccatacatcgagaacggaataccatcacacttcgccactgtcaccggcgatgacaacgaacagccacgtcgttgatgacccaagcggccacagttataacagaaaataccaatcttttcaaactttacttgcagccattgtttcactcccgagtttaaatcgaagaaacaccctgaaaacaggggtctatgaatgtcaatatccacctgcaccttgaagaaagttgtccaggaagctggcttgtcctcctccagatcaagctttatcacgttaccaaccagcccccctagtagatatccattggcacttgagtaaaactcatggggcagatggtgaacttgcacccaaactcttagagagttaaaaacaatcggcccgtcgacactcggagtccaatcttgcagagccaatgtataaccacgaacacaccaaggaccgttagcaatggcccagttcctgtcgttagcgttatcaaagccaaacttgaaaacattggaggtcttcacatcatccaccatagccacaatactaaccggctttttccaggtcttagccacaaattccacaacagtaggtacatccacattcatgggagcaatcactttcccgtacaaagaagacgaagctaaagccttaactgaagaagggcacggtgaaagcttgacagaagtttccatgcacgtaaagttctttcctttaaggggaggctttgaagtaatgattggctccataaatgcacacaagcagagaaataaatggaccccaagaacacacacacctacccaaatctcaccaactacaaaaactgttaatgaccgaaactttacactagaaaaaggtcgctccaacccaccccagtcaacctaaggcaaacaaacacaaagggccagaaaaggataataaacaaaacacaaatacagactaaccaagcacaaacacaccagagagagaatgaagaaacaggagacttagtgaggaccttgttacaaacacagaaggacggaacaggagactaagggaagatacgaaagaaggaaacacacacccaagagagaaagtaaatgaccatccctcttgtctgaaatattctttaaccttatactctcacactggtccctgacatatgtcatgttcctctctctctctatcccattttgccacattctataatggtacaagtaatatttcttaagaaagaaaatctgaatatagagaaatagataaagcaaaattaagaaacaagtagatgaaatataacattattattttcttaatatagaaaaaaacataaacatattaatacaaaagaaacgaccttacaaaaaaaaaaacaacataaatgaaataagctaaaaaaaaaaagaaaagtataatagtaccaatattgaatttaagaaaccaatgtaaaattactatttttgatcgtattttgtaaaaactattaattgaattatctattttgttaaatgacaaatataaatgctatatcttctaaattgatacaaaatagtaccttgagctgatttcttaataaatttttataataattcgatatgaaggtgctacgacaagattagttatattttctacatctgttcatgccaaactttgtcctaaagttggttatattaaaaagggtgtctacacatttggtaccctgtattttatctaaatacaagtttggtaccctgtatttttaataatgcttatttggtaccttgtattttacaatcatacgtatttggtaccctaaattcaaatttttttgataaaatttaatcaatacaatcaatttactaaaattttatgaattctgaattcaaatttttttatttgataacatataattgagaactgtttggttaaattaataaaactgtattgattaaattttattttaaggtactaaatatgtatagtttaaaaatatgaggtaccaattaagtattattgaaaacataaggtaccaaatatgttttccataaaaacacaagatcctaaatgagtatattccctattaaaaaaaattaagctcaagatactattttataacattttagagaatagagagtttaatttattttttcagtaaatgagtaagaatgttattgcagaacttcaaacactacaaacaaaccattcttactctaccttttacttgttttctcattcttctaatgagaaaacctcaaagaaatctttactttaattctatttataattgaataaattgtataaaccttttgattctataagccgttcatttttagattctgaaattctaatttatcatttaataataaaataaaagggaattactctacatactatttttttaattttttttttcaaatttacggtttaagtttgtaaagtggtttctccggtagtttttatgtgagttgttatacgattttttgttgcgatttaggttgcagggctagttacaataggagtttatgtagaatttcgtaaaaatacaaaaaaaaagatcggaagagcg

SEQ ID NO: 112702 - DNA, 4282 bp, Cannabis sativa
aataatacgcctaatcttaccatgaaaatcgcttgaaatttcctgcaaagtgcaaagtgacagagacaaatcaaccgttgaggcagcgatttcgctctttgttattaccaatggcctgtttcgaaaatgaaatgaaatgaaactcaaatcatgatatctaatataagataattagagcatcaacatacacaaaacaagcaaaagcagaacaggtttacctggagttaaggcagcaaaatactaaattcaatcagttgataatttaactctaaatcccatcagtcatatcaattaccagcaatcaccacaggagcaaattccatcctgaaagttatggaaccggttgatatctctgacaacaatctctctcttcacaatcttggatatagacttcattacagcatggcaatcaatgcatatccgcagatttttaatgatgcgtatagggctcccgggtggtgttctaatcaacccaaatgctagagctaatctctcgctgtgtaaccacaaaaggcgttctttttcatcctcctccacttgaagcagaatagccttgcaattaggaacatatcccgtcttccaggtttttatgttcaaccattcaagcattcctcttataagtttcatatcagaatgagaattgtctcccacacagaaataatgaaccgcgccttggttttcaatccagcttaggcctagttccttctttactcctttctttttcatgtttttcctaacaaaagccacattattccacctctttgcattggcatataagtttgacaataacacgtgtgtagcatcatcatggggatcgatttcaagtattcgctcagcagattgttttccaagttcaacatcattatgaataacacaagccccaagcagagcacgccagagcataatgctagggtcatatgggatttcctcaatcaatttcacagccttatcaagatgacctaatcttccgaaaagtccaaccatgcaagtataatgttctatgcacggttcaatcccgtattcttgtgtcatggaattaaaataagcttgtccttgctccagtagtcctgcattgctacatgctgatagaacaccgacaaaagtcaacttgctcggtttacaccttgttttctgcatcatttcaaacagttctagagcctccacacctaggccgtgcatagaataccctgaaatcatagcattccatgatacttcatcttgtttgtttaatttgtcaaacatcaatcgggcatctttgattcttccacatttggcatacatatctatcagagaattaccaactgcaacatccttgtggtgtaatgttttaattgccaaggaatgaatctgaagtccgggatccaaggctgatatactagcacatgcacgaagagtactagagtacgtgactcccgttgctgggatttgtaacctaagcattctagaaaataaacttaacgccttctcgtcatcccctagttgcacaaatcctacaatcattgtattccaactcacatcatttctattcggcgattcaacaaatagtttcatagagttatctatctctccacacttagcatagacatccattagtgcatttgaaacaaacacatttgtgtcgagacaaaccttggttacatgagcatgaatttgcttccctaaaactaaatttccttttgtagaacatgcttgaagcacactggcatgtgcaaattcattgggggaaactaaagcttgcctcatcttaaggaacaaatcaatagcctcatcacactggtccttttgagcatatctcgcaatcatgaagctccaaggtaccacgtcagttttgggcatttcttcgaatacccgacaagcatcacctatgtcccctgacttggtgtaaaggtcaagcaaagcaagaccaacaaacttatcgtcgtgataatgtgattttataacaaatgcatgcatactttgccctgcatccaaggcctcaagaccaacgtaggccttaagcaaggaagcaaaagtaaaattatttggtttgaaaccaactatcctcatcctaaagaaaagctccaatgcatcttcaaaacactcattctcagtataacaagtaatcataccagtccaagataccatatccttgaaaattatcccattgaaaacatggctagcaatatcaacgtgcccgcaaatggagtaggcatcaattagagcagttgcaacaaaagcattagaatcgtgccctaacttaaagatacaagcatggagattccaaccaagctcagcacgtcccatcttcacaagcaacttcaacattgtagtaaaaacaaacccattaagctcatgaccttctctatgcagcctaacaaataagttaatcccctccacaaaatgctgagattccgatataccttgaatcaaagtaacaaatgaaatagtatttagtctaggcatttctttgaacaggttgtgtgcatcagaaagtaagtttgatttgacatacatgttgagaagaatgttattagcaaacaagtccaaacaaccgcctctttttaaaatttcacagtgaagtcccattccccttctgggtttgcgattttcgatggagtcttgaagcatgtcagcatatttgaaagaatcaaaaccaaaatcaggcaactctagaagacttctgctttgttgggccaagcaaatagcttgggaagaaaacccacaatgtaaggaacttgtccaaattcttatacatgggaagtttctaatcagcaacctgcaaatatttgtgagaaagtgagggaataaacaaaactatatgccaaataaaaaatgaaaatatcatcctacaagatatctaaactcagccatagagaatttcaaatttcaataagcctaaagcactaaaaagtttgtggctaaaagttttagccacaatgaaaataatgttgttctacttaaattcagtaaacagagccaattttaatccaaacttgttttttcatataaatcatatcaaggaaagaaatacaaacagtttgattcacctttcccaactcattctgtcttagcttgatgaacccagccccgtcgttccacctcgtgtagctagtacccttgtcgcctccttgagccactgcaagatcttcgcttttaatatcacctttcaataatgccagagccaaatacattggcaagagcatcatgatcgatttaagttgaaaatatatagtgattgttaccattgacccatttagctaggttggcacaatgcaatgaatattaaaccataatagaagtacctacataataacaataacttagtatcagtgaccaattcatgtgagagcaaggtacatgagttcaaatcatcagaattcattcaataaccaatgcaatgctatcttcaatatagatgaccaacaaaagaaagattcgtaaaaccatatcattacaaattgtcaaacaatatagatattaaaagagtaaagtcatacttagtacttgatagaaatattatgtaatgttaatcttaaggtaagcaccaaacttagtcacagtacaaaagcaaattccttttatttcaaattaattgcatgaacacttaagctgaatgcttatgatatatatttttacctgtctagcagaacaaccataataagtattagaaaccttcaaaagtactataaattctttttgaagctcaaaactgtgtctaagaacacaggacagtaaaatggagcaaaaacctcaaatgttatgtgctaagaaagatattgctaggaaccatgaagtgattttagaaatggaaacaaaatgatacaaacaaagatttattcttttcaaaaatcagaatattacctgttcaaaaccaaaggacaagacttgcccactgtaatcgcgattggagacacttggacgctgccggagttgccgcggatggaagcgacggagagagaggtttgggccgtggatggccggaggtggtggtgcggccttggtctgaacggagaagaagaaacggtaaggagggagagaaacgagcggaagaggaagtgtaagagaaagaaaaaaaacctatattcttattttattttatttaaggatatttgtggctaaaccattttattatttgtaattaggctaattagtattttttttcccagaattttaacatgtattaaattattttttttgaattttttttggcggatagaaattcccccgaactattgaaattgttaaatttatggacttttgtctaatttcattcaatttactgtttcagtgattgtttatgtac

SEQ ID NO: 112703 - DNA, 4415 bp, Cannabis sativa
ttagcccctaggaatgaaagagaagaattacacaccaaaaattgatagttgtgcttcaaaaaagcaacttcagtgtataatgcatctagttggtgctttctctcccacccgtcccaccaataagatggaaatgagagaaaaaactcagcaaacattgttaggaggatagaaaactgatcttggattaaaatgttaattaaaccctgttgctattccttagcccttttaaagatgattggcttatttccacacaaatttcccatagcttctctcaaggccaaaagttcacaacagaattgctctgtgtgtggcagcaatcaaattcagtgaagcccaccaaaggtgaagagtttacccatttaatagaatgccctcagaggaaggctggaacactcgttggcagagcacggtggaaagcaccagagacttgttcatctacccatcaccctcatatggctgcctgaaaaagttcagaatgccaagtacatgttgagatgagtacgatgaaacatgcacaataggcaggaccaaatgtgaagtcagaacaggcttggccatctctgctctatgtagtttgcttgtgtaaggtggaagtcgtgtctcctccattcttgaacgtcggagttggagacaacggttgtcagagcaagcttgagttttatgtgggacagagaagtttgaatggactctacctgagtcccattggaccagcccatcacttgcttaagtgggcccccttaaaaatgtgtaataagttgggtttaggccctacttgataggtttttttgctccattaaataaagaaaacattaagggatccatttatactcttttaggccagatctgaatagcaagaattgggccaaggtagggtttcaaaaaaccaagcccacatgtctccaccatgaacgcagctcccccacaatcaggactaataggatcacacaggagtggcttctcttagttttccttcaatgttctccaaccgaagttctccaacgagacgcatgtcttcttcaacactggtgagctgtccatatcgtggtgtaaggtcggtaatgtactcgaccccaaattgagatcaaaaatcgttgtccattattaacggcatcgacgactcgctggtcatgctttccacaatcaaagagcttgtgagcctccattaacaatagcagaagattgcgttcatgccacatcgcttcccttgtcgagtttgacgaattttaagtggaatacactggctcaccttctcgttgtacaacaccgacatcgtccccaatactggcatcgttaccagcaccgacagtacgatcatctccggcgaggcaagcttcgtcactggaatggatcgatgatggcttgttatattctctacttctttttcaaagagcttctccgattgatagccatgatttgatcccttaatttccccctgtatcgttggagaaacaagaagatcaacaggtcgtttcctatcattctgcaactcttcctcctatgtgctagtttgatattgaaacctcagttgtccttcaatgtaaaacgccttggcgacaacatcggggagcgttctcagcttatattcatgcaccttcttcacctccattggaagagtcccaatatgtatcataaaggaaggtttcggggatatctgacagtgttgctgcaatcgaaatgaaccgaatcaaaaactccagcactgaatttatcatatcggagagccattaattcatcgaaaggatcgtttgcgattttcgggcaccagctgaataacgtgatacgaaattccaaccaattttcgattggatctagttcttccactgcttgaaaccatctccaagcaacaccctccaaacacgcttgagccacaactaccttcttgctttctggggtccaataagcctgaaaatattcttctatgcgaagaacccagccatacgggtcatctccattgaagagcggtagcaccatgacagaggtcacaagatcaagctctgataccatttgataggaattttctaccaaatagctaagaataacaagaacaatagatagaaataggaaaataagagaaaatattgtattgaattgatatctgggtattcgagagacctagtactctcccaactctaagaacaatgctctcttacaaattctacctcaataccccattacaataacctatttaccctcattattagttaaggataacttatcatcgaactagttaaactaattagacctatcgaaataaaagaaataaaacaaggaacgaccaagagaaaagttctctaagtggttagagactacataccaatccattggatccctttctggtgcatcattggctgacattaactcataggccacaagattgtgcattaggttgtctgacaccttatatacaagccaacaacctatatggtcataaataagaaaagttacaaagtaagtattgaaaagaataaatcaatttagaaatcaaagcagcaatggatagatcatactataacctttttactatttcaaatcaatatacttgaataaaggaccacaatttcatttggtctaaaataatacctcgagcaccatttggttcttcccatttagttgttcgcattccatcaaatgcagaagtggcctgaaatttatgaagtaaatttcttaagagggtaaaaattaagataaactataaagatgcaagcacataaacaagcaaaatacaactcacaattccgaagggaagttcttcaccactcgcgagaactgaaccagaatgtattctacttaatttcaacagaggcaatgcgagagaagctttactcaacttttcacaattcttgagattatgtatggtgtaatcgaaagcatccaaggctacaagaagagctagagaggttttaacaggattgtcagctaaacaaatatccacattcccatctgtgtcaaccttttcaagtgagagagcgttaagtaactcattcaaaaatggcagtgcttgacgcacaaatgattggctactattcaaatgtagcgagacattcctagttctaaaaggagatttttggagatctttgataatgtctttaacaaagccaagcagttcaagaactactgactgaggaagttcttccttaacaaaataagaaaagagtggaagaaatgcatcataaactctagtcacatgctcatctacgcagattcgaactggacaacaaaggcaactcaaggaatcagaaccaatttctgatctcaacttccgccattccttatcaccacttagtcttccaggtaatgagattgaggcatcatttgtagaatataaatctctttcaagtgtttgtctttccttctcatcacgatctttaagtgcagagataacttcaaatgaaaaaccacttcgacattctgttgttatcttattgaggacacttgtcaatccagactccgtggtaataattcgtcgagttagaacctacagataatgattcaatttaacagtatgcctctggtaagagttgcttataatcttcttctttttccttttaatctaagcagctatttgaatatataatacttttgtagacactatttacctcatgccacttccttgtgtaacgtttggtgacatcacataaaccgtcttttgcaatggcaattacataatttaatttcttgttccaccttccacaaagaaaaatattgatagttggaaagcagcaatagaaaatgcagcaacaagagaaaaactgatgagataattcataagtttctctttagaaattattaagtttggaaaacatacccattctcatataacaatggtttgtcgtacactccttcacaagggtcaagatgcatccatctgttcaatatagaatcaagaccaaaaattaaatacggaaaatctcacagatatagttccaaaaaaaaaaaaagcatatatcctttaacgagttacctcccaaaaaatggtgaaaagcactctgtccaaacatgatcagtgaaatccaaaatctgtccgaatgatcataaacaaacacaaatcacttgacaataccactatggcattggccatgataacagacatataagtgcttgtgacaggacaaaaatacaaagtattgtttattacatattttgtctgttgcatcccatcacataaagggataagacttaagagtactaaagcattgatttgtttctcaaaagtttaattgtaatggatgaatttccaatataataactaaccaaacgggattcatatccaaaagctcgacaatataatgtgaagcaattggcccactccccacaacgtccccttcttgtttctataagctgcattgatcatgaaaaaaaaaaaagaagactgagcttgtgtattacaaaccttaagggcttgtttggaacgccgt

SEQ ID NO: 112704 - DNA, 3325 bp, Cannabis sativa
taaaccatctatagatgatcattaattattttgatagaaacaatgtataacttataacgtatctatactatatatatagagcgtttcatgaaattatgagtgcaattttgagtctatagtagaatcatgagaaattaataagttagaaaatttatttataaaattttagatatatcttatttggagtctaaattttatgagctcatggttcccgcagtaatcaagataaatacaaagtagtaagcctcaataattaattcattattaatcaattgggatttacattattgagtttttcaattttgagaatttttacacttatgaaaataaagatgaagaagaagagaaataaataataaggtatttattagtcatgaaattttttgtcaagataatgaaaatatttaaattatgttttatttaataatttagtgattattaaattaaaactagtatttaaatgcaagagataaattagttatcttaaaaataaaaataaaacactttaagtccaatgaactttgaacaagtgaatagcaaaatccacatgtgaatttcggctatggtgtgcttggagatcaagcaactgtctattttattttttaagttatttatttaattaattgcgaggaatcaaacttactttcttattattgtattacactttggctgtaaaagagcttttccaaccctagcctccactctccttctcttcttcactttagaaatttttgaattgtgtattgagggaataacccatactataaaaaaaaatttgtgtttgttataaattgaagattcgaatttagtatttggtgatactctactacataaaagaattaatggttaaagtactgaatagaagaagacataatttcgcagcaataattctaaaagtattctagatctctgtttgttgttttgcatgttataagaaataatcatttacgttaaatatttgtttacatgaaaaataataagatcgtgttttattaatttctaatagccaccactaaggtttcatgaaggtcaagtttaacgtcatctccattaaagatgagacaatttatggcgtttcgctacgctatttttagtggagtgcctgaagcagttaattgggacaagatttctaatttcagttaaatgatctttgaactgcgtatctaaattttctccacccctatcagatcgtaagatttttaacgttttatctaactggttttgagtcattgctaaaaattcctataactttgaaaaatttctaatttcccatgcattaggtaaagacatgaatatctagagtaatcatcaatgaaagtgagaatgtactcaaaactacccaggctttaacattaaagggtccacaaatatttgaatgtaccattttcaatggttctttcgccttttctcccttagcggagaatggtcgcttggtcaatttgccttctagacaagattgacagacaggtagctcaccaagagtgagttcccttaagggtccatccttagcaagtctattaattctatcgaagcctatataacttaatcttaaatgccatagatatgtcatgttgttatgatgaaccttttgatgtttctcggttataggtttaacttccttgaataattcgttattggatggaaataattcatttgatcactaaacctataccctattttccatacatgttatatataattgtaatctatttaatgaatatatattaaaacttgtaaaagttaatacatattgtttcaattacagcaaagatgcaaaaattaaatttctactaaaatttaaaatttaaaatacattctctataaaaatttattattctcaaaataaaagcggacttttccaattgctttaactagaataaactcttcatttccaatttttagctttaatttttcatcttcaatgtcctcccaacatttaagatgttgtaaagaagtatatacatggttggtagatctataatagggtcggcccaaatattgggcagattgggccattacacaagacacctatttttttaaggccaatttttttttttttaaaaaaggcctatttttttttcctattatatatacataaataaaaaatttataattgaaaatttatgaaccaattttaaaaaataaagtcactaataaaattgtagttttaatatacatgattttttatttatttatttttttctaaacaaaccctcaaaatgcttggaccggcccggtccataattaataatttacacaaatttatcattcttaattcacacaaatttatcattctttgaaatacatgtttctagtacaaaagaactagaatacatacattgacttttcatagcaagaaacttaggacaattatgtttctaatgtcctttttatttgtagaagtaacacatatctttcaataacgtgaaaaacattctcgtcctttctcatcggaagactctaccactagaaatatttgccattacagcttttcctttggttttgtcactagcgactgcaagaatatccttattgaccgagttaatagaaattgagggctcgacctcatttcttcctttgtctgaagtaattggaacattaggactattcttgtactatagagttgaaaagtaacagctgagacattagctgatatatgtattctaatattatgttttatcatcatgtacttgatgataaattgtttgtatgctggagctagactactaaggattatttgaacacaagattcttcattgagttcaagtcctttagttctagcttcttgaaattggcaacacatatcatgaaactgactatcaagatgctcgtgagcaaccatcttaatttcttcaaacttgaaagcaaatgaattagaaagggaagttctatgactaattttctctccactgtgagagagttggtgcatccatcttgcacacctttctctctccaattgttaaacttgaaagagaggatcagtagcaagcccaattaaattggtctatgcccaaccatttggcaaaccttctctctccaatcaagtaatcaaactcatgaatgtccaactctttgttcgtgacccaaaatatattccaatagtatgacgaaaaaaatcatcatcactattttttaaaatatggaaaaaattattaaagttataataaatataacataaaaagtaaatgtcactaaatatgacattatctaatcaattaaaattaaactaaacaaaaaatcatataaaacattaaaaaaaaatatgcatttaaaattcacaaaaaataaaaacttaattaaattaccataaaaaaatattaaaatt

SEQ ID NO: 112705 - DNA, 8713 bp, Cannabis sativa
taaggtttctcataccttttatgtatttattttatatcgttttggaagtttatgtttaggatgttaaaaaaaacatacttgttagtaaatctagatcttggtaaaatataaggctgttcataaaaaccaaaaaaccgaaaccgaccatcaaaccgaccagaccgtaactgaattttcggttccacgtcatcactgaatttggcggtcggtttcggtttttgaaataaaaaaatagttaaccaaaaaaccgttaaaaccgctaaaaactgcctaaaaccgccaaaccgaaaacgccaaaaactgtacggtcggttttatacagttataatttctaaacggtcggttacggttttcgtaaaataaaaacggtaaccgacaggtcggttataaaattgtaaaaactgaccataactgaccgattttcacccctagtaaaatatattccaacaaattacagcaacggtatttgcgctaaaaagttggtggcattacctatatggcgagaaatgtaaaatataaccgatcttaaaagctttagtatttcttcactgagaaggattagaatatgagatagagacattagctagagttggtaaaggattacgagtgtgaaatcttttattatcctggataatggcaaacgtagtaggtgatgccctaagcaggaaatggcaagggcaattgagtaatataaaacagatttcaaaacaattcgcaaataaatgacaaaggctatcatggaatttgttgtgggacagttagccaatattatcttgaaatccacgctatgagaaatgattagagaaactcagtatagagatcctagtttaattgagtactatcgtgataagttttagttggtaaggactttaccgtggatggaagtgatgtgctacagtttatgaattgtgtatgtgttcttatagacactgatataaggaaatatattctggattaatcccataccactccccttattctgtacatccatgtacggctaagatgtaccaaggttaaaatctatgtattggtggccatgtatgaggaatgatatagtggattatgtttcatggtgtttgacttgtcaataagtgaaagaagagcattagaggcctttgggattattacaaccattgagtcttctagaatggaaatggcaagatattaccatggactttgtggttgggttacctaggattacggggcaatataattctgtgtgggtaatagtggtcaggtatacaaaattagatcactttttgcctatttgaatgaacttctccattgatcagtatgttgagttatatattagaaaaatagctcgtcttcatggtgctccaaaatccattgtatttgacagagattcgaagttcacattaagattctgggagagtctacattgagttatgggtacacagtgaaagttcagtacaacattcatcctcgaacaaatggatagttcgaaaggactattcagattttagaagacatgttacgggcatgtgtgttggactttgaaggatattggataaagtacattcccttgaccaagttttttataacaacatctaccaatcaactatcgggatggctccttatgaactactttatagcaaaaaaaatgtagactacttatgcagtgggataagttaggtgagaaaaagtttttaggtcccaaagctgttcagagaatgagcaaggcaattgataaaattagagctcgaacgctccatgctcagagtaggtagaagagttataaaaattcaaagtgtcagaatgttgacttttaagttggagatatagtatttctctggattttacctatgaaaggtgtgaaatgttttggtaaaagaggaaagttaagcccaaggttttgttgaaccttttaaaatcctgaaaaggataagacaagtggtgcacaagttggctgtgcccccagtgctgatagctttatataatgtgtttcatgtttcaatatgtgtcagactcatctcgtattttgagttacaaagccttggaacttcaaccagacctctcatatgaagaacaactagttgagatgcttattagaagagagaaattcttgagaaacaggacactaacattggtgaaagtattatggataaataacaaggtcaaaaaggtgacctgagaattggaatcagatatgaaacaaaaatatcctaagttgttgaagtaaatttcgggacaaaatttctgtaaggagggaataattgtaatatcctaaaaatttagaagtggattaacaaccctaattaacttaattaagaataaataaaggattatattataatataatcaattgtatgatattatttgagaatatttgaatataagaccccatttatgtgataggggcattttcataattttaacttgagaagggtgaaattataattttaatatctcttgtgctaatgagctacattattatatagtatgtttgctttattgtattataggtgaatttcaataagtttgcgcagtattgtcacaatcgagtattttggctcagacctggttcagagtctaaattaaaagtgtatttgtttccattaaatgatagtatctaatttaatatgtggttgtgtgaatttgagctgacatttgtgctattggtgctcttttaaagtaaattaaagttatagggcaaactagtcatttgaccataacttggttaaataggactatgatattttatttgtgaaaattgagaaaaaaataattcattctcagcctaagaagaaactcccaccaaccccttcttctcctctttctctttttcattgttcttgattttgagagaattgaagcaagatttgtgtcagatattggtgtgtaattactggtttaagtttggaagctaattgaggtatttatttcatttttttttaagttttaatttttgaaatctcatcctaggattttgttttgtttggtgttcgtgaagtgtattgtgttacttccttggatgacaaccaaagttttgtgtattaattttgtggtgaatatggagtttaagcatgaaatctattcatgattctagttgatgttgttttgtggttattttggagttatgcatataggagctgaatttgaagtttgagcttgagaaccattagttttcctaagctttaatgtgtgaaattatgtgttttttgagctaaatctttgtgtgatttaggcatgaattattatgagatatattatacttgcatacgctctgttttggtcttagaaaccaatggcataatatgtgtaaagtttaatgtgattttgtgcatgttgtaagttgttaaatttgggttttctgggtttttaggcccagtctccacgatcaaatttatggtagttgcagcaaggctttacccaaaataggggatagccctttcctagtttgatcgtggcgaccacgaggcgacaattcaattttttttttcattttgctttggttataacttttgactccgaactccgttttagatgttctttatatcgttaaaaagttcgttacaagctctattatttgttatatagttggagtcctaaatatgaataattatcttatgatattgaagattaaccctattatgttttaaacttggaattgtgactacggttaccgggacttgttcgagatcacctatggattagaagtctcctcatactttggaatccaggtatgaaagcgaaccctacacttagagtatagcgcggtggcacacttatatattatgtggagaatttgataaaaatgtgagttgggattattttcctaaagtttctatatttgagcaagtgttaaatgaattatatgtatatatatcaagagttatgtgtgtaagataaacactagcagaatagacccttgtgagagcataatatatgaattatacatatatgataagagttgtgctatcaaagcataactaggttatactcggtaaccaaaactaacagaaatcctgataaggccttatatagtaaatagtcgtgtgagcgtaacacatggtgtttatacaatatagacttaggatgtggtggcattatcataagtgcaatggcgtgttatattagtgtaggagcatagttatctacacattagcgtattaaatgtgatatatattatatgttatatttgagtttgattatgctttcttgttgagccttggctcacgggtgttctattgtacagataaaggtaaagcaatattaggctagtcatgaatttgaggattttgttgatgaattgtacatattttagccaaactaaactacgaggattgggtccaataggaagattgtataaaaatctcactgtcacttaaattagctttcatgtaaacaactttaatattttataaaagattttatgggatctaagattgtattaatattttggtttaaattagaagttattacaagttgtttttaattatgaattattatgttttaattcacttggcttattagatctcggtcaacgggattaacacaatgtaatcacgacacgtggtgttcctttaattagggcgttacatacaaccaccacaactgccaccttaaagctctggtttacaccaaaatactaaaaaaatggtccaatatcgacaatgtatttttaggtataaaaaatgagaaattttgcaaaaaaaaaaatgaataaaaattgtgggaaaatgtgatttataggttgaaggggtggtggttgagagggtttcggctaggtttactaagctaaagggtttggtaaagaatacgaaatgtggcatttggcctcgctgaagtgtttttgagccccttcgacatcggttattatgtagtaaccgtcgccataggagtcacaaaatcgtgtgacccctatggcatcagttattacataacaaccaatgccaaaagggtttaaaaactcttcagcaaggctaaaaggatttagcttccctttttttataattcaactaaaataaccgcctctaaaggctaattttatagtagggcagttacacccaaacaccgtactatcgtcaactggctaaggttgaatagctatgttttaaggagcggtgatcagaattgccctaacggactgggcagtgtgttcgcgctagagagaaatgggagggagaatcacaagtgattactctacaaatatatatgtaaagtgtatatgagtacactgtccaacccctgcgcaaaattgccatcgctaccttcgacgatcccacaaccacgtgaaattccaccctgaacccctccacaactgacgaaacccctctctgaatccatcacctccaacgaaccctcaaagggtttttttaagttaagcccatttttatactctctaacaaattatgaaatagtacaaaagaaacgatgggaaaagaaagctaaaatttaatgtgttaaaaagaaactgcccacagttacagtagcgagagtggaaggatgattgaaagtatgtgttaaaatttaatggtgtgttactgagtagttttggtacctttcagcctactagagaactggttatttttccagtatgtggtctaaacccttcccaacctgtgaggagaaggaaatagttggttgtttcagctgtgctgaatttagagaaatttgatattatactaggattgaactagtttgcaaggtgtaatgtaactataaattgtaaaggaaaaaaatggtaacctttgaatcagaaggggaagacccattttgtgctcgtgggcatggttcaagggtcccgaatcctattaattttactaagtaaagtaagaggtttgttatggagtagatgccttttcagaagagccaccagggttattgataaagtgggaaattaattttgaattgaattgatattgggggtaaaacctgtatctaaagttctgaattggatgataattgtataattgaagagggtaaatattttgttgtaggaaaaaaaatgttaggcttgaaattgctactttgagtattttcttctggaatacgtcagttttgttgtgaaggacaagaatgaaactttacaagtgtgtattgatcgttggaaattaattaaatacatgatgaagagtaagtattcttttatcaaagatagaagttatgatgattaattttaggaaagaaccgtcttctctgagattggtcttcgatctggttattaccaattgaagattcaagaaaagggtatttctaaagaagtttttcatacccgatgacttcgtgatgatttcattaatgatattctgatttcatctaagtcaagaaggcatttgagaggaaatttttggatggtgttgtaatgattgggagcctaagcttcacgctaattacaggaaatgcaaattttctgactctaagtaggtttcttagagtatgaaatggatatagatagtatcttgatagattcgacaaggattaaaccagttcagagttgacttcaatccatgtttacaactgaggttagaggttttctggaattaacagaatgctacagaatatttgttgagggatgtttacactcttagtggaattaagttgaaagaattgaaacagaggttaactattgtaccaatgttaacattgtcagacaatgaggataaatttgtgatttagagtgacccttctaacaagaatttgattatattttgatatagtccaggagagttattacctgtgcttttaaacgattgaagaagtgtgagtaatagtatttcagttattgaattgatagcagtagcttccgtcttgggagtttgatgcttttacctgtttggcaaaagtgcgaagtttatacaaattatgggagcctcaaatattttattatttgcaagatttattaggaagaattaaaatggcccagcagggtgactttgaattactagggtacaaagaaagatttgggaccggttcgacaaaggactttttgattttgtctaaaggaattttatgatatgaagatagggattgtataccagtcagataaggatattgaatagacgattctgaatgagtcttatagtatgtcatactctttacacctgtgagtaactaagatatatcacgatgttttaaccctttgttagatgtgaaagatgacattgtgaagtatgaattagatgtccaacttgtcagcaagtcaaggaatggtagggttctatgattctatctcggtaagtaggaacaagtgtacaaagtcagtacacttttctttatcaaagcagaatataatcggattagtgtgctaatctatttgtcaaggaaatagttcaaacttgtgatgcatcaaaagtaattatctcaggttgagatttaagtttatatctaaatgctgatagagtctgtaacaagcatgtgtgatagattttgagagttcctaaaataagtttcgtctgctgaatgagttttcatataataacagttattagagtactgttaatgggatactaatgtagtttaaagatccaaagtgtagagatattaaattccaagttgggtattttatttttcttcaggtggttcaaatgggaggaactcgaaaatcgagaagaaaggaaagttaagtcccaagttaatcgacccatttgagtttctggaaaaaagggtaggtcgggtagcttattagctagccatactccctgctttatttggagtttccaacatgtacttcaatgttttagaagtatgaggcagaagtgatccatatacgaagtcacgagaatattgaacttcaaatagacttatcatatgaggaacaatcggtacagattttctgaacagaaaagagaatgtgttgtggaacaaagactatatcgctagttatagtgctgtgaatgaacaacaagatttaaaggtgatttgagagttaaagtcgcagttgcgggaactatatctcgagttatttgaataaattttgaggacgaaatttctataaagagaggatagttgtaatatcccaaaaaaatatattgatattttaattggacatattttgttaaatatgtaattaagtgggcattagagtaggattatataatcctacttaaactaattacgagtcgattagggagataagaataaataaagcgtaatttattaattacgcagattatattggaatatgtgggtaatcgtagataccataacttgaataaaatattttcagggctggcaactgtggaacttgacggggaggtcagaaatgtcatggcaataaaagatgacttgaattgaatattataccggtctagtttagaattttttttaagttatcgatttggtggattaattagggaatgactaaaatacccttagaattttctaaaatttaagtgttaagggaaggggtagaatagtttttttataaagtgaatcttttgtcttttagtgcctttctctaggctgagatattactaataataagtttatattttatttaagtcttatgtgttgataaatgatgatacaacttagaaaacttaagaaaaagtcaacacaagttccttctcttctactctcttgcacgagcctaggagaccagcagcactcaagggattttcataactgtttcttcaatttcttgacagaattaataagttctagggttggtacaagcttgaaggtaagtttttcacccttttctcctagtttattcaagtttcaagttagatataagttagggttttggtga

SEQ ID NO: 112706 - DNA, 873 bp, Cannabis sativa
  modified_base (87)..(87): a, c, t, g, unknown or other
aaggctcattaacgccccaaccacgtaaaaaatccatctcttaatttcttacagttctctaattttatattattttattggttgccnaaaacctcggtcaacacttacaaacaagcgtttggagccccttcgacaccaaccccttccgcatctactccaggatttgctccgtaagttcctattctcggaacccattacactccgactgtcttcgaaccttgtacatccgtgcaagcacctactcagaatcaattctttgggtatgtagtggcacaaactagatgaagtattactccctgacagtcgaagccacaaatggaagttttagaacaaaatgtgagtgggtcccaaagcaagagaggtggaaggaaccaaaattgaagtgagattttgaagaaactaagaaaggaatacgagccaaagtacactaagtacaccaacttggtggacactcgggataatgtgtacaagacgacctacaaaatggttcactacaggaagctcccaaggatgcctctaggaggaaagtacaatagagatcaaaataaatggtgtgagtatcatagagacgtggggcacatcactaatgaatgtggctatttaaaagatgatatagaaatgttggctagagccagatatctcgttcaatgggtctaaattcctattatttatcctggataaggggttgttcgctgaccgttgattattttgggacagtagggtgatgtaacccttcgtaagaagtgaaccgctctaccagcttaggctgcaatggcagtgttagctccaggaccagggaacccatatcctctaggcctagctcaaccaccagtagatggacatgtagccatgatctcaagaggacctcacatc

SEQ ID NO: 112707 - DNA, 6592 bp, Cannabis sativa
cagcccagtgaaaatcctcaatatgttgatacttctgtactaacccaggacaagtatcaaaggacactagttcaacttcagctgggtctgctaagaagctattatgtttatctccaagtccaaacacaaacctcccgggaaacatcacaacgaggcaaccgttcggaaggacttgtgagatcctgccagttgcaaaggctcctccactcttacgaggccattcaaatcggggagcacggatattttcctttagcctcacaaactgtccaacaaaataaccgcttgctatttcgagatcagataaatgccctttccagagaatctctaaaccaataaatccagctgtaacacttccatctcgctgtatagaatgaagaattccaacagaagagtgtttgccaggggattccttcaagcgcacccaatcacccctggaaaggccagatgttaccctctcaattgttgagatgagtactctaacagggttccgaactccagtgatcttcaccagaacaaaatcatctctgtcagagttgctgtctagactaacaacagtgccttcagggacatccatggtctgaggtctacaggaattcagtggcttccttgagcgaacggtatcaccaactagaagatgatcttttgagacataccatgcagtgtcaccagaacttgatcgacctataagtgaactggttcgggaaccaaaccattcttcttcactgtcgatagcattccgtgagctgcaaattcagttggaataatagtcaacaatccatgtgaacacaaatagaaaaacattaaggcttgaatagtcgaatacctttccaacgcatttaatatatcagctatcaaaggtcgattgcgaagatcatactcaaaacacccactgatgacattcccaagagcaagaggcaaaccacttggaatctgtggcttttcttgcttgatcacaacagaatagtatatttctttgtatgactttccaaaccacgggggaacgccagtcaacatctcaacaaagcaacagccaaatccccatgaatctgtctcaaaagatataggacctctcacttctggttcccactgttctggggccatgtagtttggagttccaagtctaagaaccatatcaggactagataatgggattccaagaagtagatacgggatcccaaaatctcccaaaatggcctcatcattttcatttagaagaatattcgaaggctttaggttcaatactagagtccctattgaatgcagttctaaaattccttttgctagccctattccgtacctgtaagcaatagaattctaaggccatgtactctagagacatggtaaacttcataaagaatagtatagtatacaaccttaaagcgctggaaatctgaagcttgccaccctttacccgagctactctatcacccaccgatccctcataaactttcatagcaatgcaaatctgccaataaaattatggcttagaaacaaaaatccatgttcatgatatgaaaaaatagaaacataattaaaacagaactcaaaacttagtttcacaacttcaccttcccatcaataattgaaataccgtgcaaccaacaaacactgcggaactctctgcacttataaaatagctcctcaaacttatccagaaacttctgtgtgtggtccttgtcaaatgggtgtaacacctttacagccagttcatgaaattcatcaaagtccagtgatgactggtgatgagtagctaatgaaacatcaccaaaagggcctcggccaactctgtacttaagtttcaatgaggaaggatcaatccatggaccagctggagtaggcgtagccacaacagttctgaggtgatcaggatctccttcaaagagctcatactcaaaagatgctaccacctttcccttctgttcagccatttattctatttgtaatggtaacaacaagaaaaagtaagtatccaattcacaataatacaaatcaaattataaacttagtgaaaatattctccaggttaaattatataaagacattatctgtgtcatgtagaagagaggccttaattctaacctacatagacctgaggaacctcaaacggagtcaactcaatagaaatggtaggatcaagttagggaatgggcaatttaacatagaatcagagaaccgtatcagttcttacgaagagattattacaattccctaaaaacggtaaaagcatttacctgaaaaaaaaaactacgaaaacaataaaaagaaatgcacaaatccatcaagttcaataaatgaaaaacgaaaatactgactctaaaacaaccacttcatgctgttgatatcatataagctacaggctaagcaaacactagccacccataccgttgattaagaaactaataacgctcctaatgacaaatcggcttcataacaaacaacacaataattaaaagtaaaaagaaaaaagtttaaatgaatccaatatattgatgagattatacaaatcaattgccacaatcaaaacatttcttctgcccagaaaaaaaaataaataatggcaaacacctaaaaatcacacctcttcacaaattagggctaacggaacaacaagataatcgataatctgagtctggtaataacatatatcaaactccataacatttttgaactaaaaggtaaatcgcaagtaacaaaaaaaaagtcaaacccgtttggttgctcagaaaataagtaactcatatacacatataaatatactcaaatcgttttgtgctcattgagatttacaattaattgacttcacaaatacatattacagtgttgttaaagacagtgaaaactaacacaaaaatggaaaaagaaagtaaaattaactaatctcctcagtttctcagtaaccaaacacataaaagcatactaagcagagaagagaatacctcgattccgtagacgaagttcaaataatgatccagaaattcaaagtttttcttttagttgtgcaaccgaaaatggaggaccttacgcaagggagtacgggatttcggtgcaccctaacttatctgaacaccacgccaccagtactccaacgtagaacgttctcagaatgacacgtgtctataatagttcttatttggtgcaacgtgtcagatttatatacctttgagcacccggtcaaggttactctttttttttaattaaataataataacaatatttttaggagttatcgataattttggagggacttaatggggtttttctaatttgtccttggtaatggttagtctattttattgtttctttaagctatacttttttcttctttcataaataattgaggaaaaatacaacattttaagagttttttctcttcttttcctttgaaaggacaatttaagagtttaagacaattaattatggattatcatttgtcctaataacattatgctacttggactttctttcaagaaacaaatagtccctaatcgattgcaaaaaatgaaaaagaaagaataatctaattggaccaattgaaagtgctttttttctttcctttttaaaagactaaataacgtaatgtacaaattcttcgaggggaccaaagacaagactaaagttcagagcgttgttgaataagagatgaagctatttttgtttcaacttctccaacttgtagtgaccttaaaatcctaaacattttactacgttttgagaaaatgcagagagaatctggtaggacggttggtcctactactacagtctactgctgatgatgatgatgatgatgatgatgatgatgatctcgttctcgaaaaaccccacaacttggaatatgaaagtaaacctcttaagaaatgagccatcttaaactgaggagcagcattttcttgatcttcttcttcttctttaatgggatgcatcaaattgttatcttgatcattttcctggcccttaatacaaagcttcatgtcgtttgatccagacgacaatctgtaatagtgtcaaaaaagtttcttagtcttgttgtaacactattcatgcaaaagcataaatagcccacagtataatcaaatagaaaagtgaattaaggagataaagaagcaataaaggagacttcttactgagattcttttttccaagcaatactttctttctttggtctaattttctttaatggtgtataattgatggtcatgtgcctgacgaattgaagctaaaacaacaccatgaaaatcataacatgagaaaaactttttctgacctgttgacccaccatatccataaccataaagaacccaacatccccaataatacaatcaagagaaatctcagactcacctctgttactctgtacatggacgatgaataataaaatgaagactaattagtaattttttcccttaaactagtaaatcatgccccctaaacttttttgaccgttaaaaattcctctgaactattgagattgttaaatttaaagaattttgtctaatttcattcaattttattgtttcaatgattgttttttttactaaaattagacaaaagtcctttaactttaacaatctcatctcaataattcgggggaatttttaacggccaaaaaaattcaggagacacgatttagtacatgtcaaaattaagggaaaaaatttactaattagcctatgaaatcaaagttatgtctctatatcaattgatgagtacaaatcagatgatgtgccttattatttgagtatgattatgtcatttttgaaacttagcaaccatatatatgcattgtaatctcatagtaacttagtcatatttaatttattataatgaaaactttgagatcattataatgaaaaccaagctatagctacctgatcaccttctttaatcccataatgccgaactggtgctttgtcattaactagtttccgaccttgatagcttaagcagaaatgtccccagactagtgacctataatattaacaataaatagtaacaaagtaataggcacagaaattattttcaatgattcattttagttatttaaacctaattaaccattaatattcatttgatggattttacttaccaggaaatcttgtcttgaccttctttaggtgatgtactaaaaacttcttctaccccttttttaagctctgctaccgtagcatttttcacaacaaacacatctgtgagatcaaatttcacatgaatcatagtttaaatttgcattttaattcaaaatatatatccaaaatattatttaaatcgtcacgattttttcttatttcttcgaaaaatagaggttgaaaaggaatgaaaagtatcaccaaacacagttccatcgagcttcaaaacggagagtttgagatactgaagctgaggaagcttgcggtacgagctgcaagagctcctcacattacgatcatcgtgaccgttaacgtcttcgtttaatgtcagaggagccaaacaccgcctctctatcaaaaccttcaaagtactagcaggacctctagttttacttttaacaatgctactaccaccgccattgatgtgcctggcttcttcacctctattgcttcgcataataaccttcagggttcaaaattcttctctccccaaggaaaaaaacaaaacgcagaggactcagtcagaggtttactgatttttggtggttttgaaacgatttgagtgaactgatgaagcagtagttgcagaagaatactgaagcttggggaagatgacaatggaaaaaaggagtatgggaaagcgtgggttcgttttaggagctttgaaatcggagagaccgttgtggttctgggagaattttggcctggtattttgtactcgccattacctctactcgcgctaagatcgtgatgttcttattttttggccgttcgatcagcgcgtgttatatcctccaaatgattgtgattgggcttattatatttcgtcaacgggtagattttactcttgggccgtattcgagtaatttacgagtcaacatggaattcgtgatttccttttcttgctatgattccatttttattagaaaaaaataattaaaaaaccattcattttcaaaactaagggtgctctcttcaaacaaaaaattaagggtgctctagttaatatttttttaataaatttgttttcacttttttaatttttaaattgaaaaaaatacttataattttttttttaaataatgttttagacttagcctcaacctacacttttgaacccaaaatcccactcgaacctaaatcttagatttagacccggactcagacccagacctacagcccaccctagcccaaaccctcgactcggatcacagctccaaatttggacccaaacttggacccagatcctagcaacaaacccaaaccccaacccctgacccgaacctggccccgatcatcgccacgaacctggcttaaataaaattaacaaataaaaataaaattcacaaaacacacttttattttttatttttaaaattaaaaaaacaaaagtaaacacaaaacacattttgttttttaaaaataaaaattttacttttatttttgtaattaaaaaatttaaaaataaa

SEQ ID NO: 112708 - DNA, 5787 bp, Cannabis sativa
aattattaagtgagcattaaatagcatattaaattttgcatcaagatttacaattatgtattggagcacaatagtaaaagttgatgtaaaaatatcacaaaactagtttttgtacaaaatatagtttaacttttacctatgggaaatggtctaacaatgacattctttattacatcttctctttttttctttctttattattattttatcataaaattaaaaaaaaaaatatttattaaatcataatataatattattttaataatatttagaggtacttactattgaaatattttagaacaaaaaatatcaaaaataatatgaaagagataaaaataaaataaaatatattattttagaccttgtattttgcaaaaattaccgattagaccctctattttttaaataacaaataagattatgtatttttgaaaatagtattaaatagtaccttaaattggtttttctcaaaataaaacttggtaataacctgatctagatgtattatgacaaaacttgttacatttatagtatctattcgtgctaagaattatctacaagttggttattaaaaagagtcaaaaattgagtttaggattgtatttgtaccattttaaaaatatagagtttattttgtcatttaacaaaatagatggtcaaatcggtaattttttatccaaaatagtattaacctaataaaataatatatttttaggctatattgaggtgttcgacggaacctgtcccttttcccttgttccctactgggccctccaataaataaatgacacatacttttatttttgccacatcatttattcaccttttcgaaaggtttactctccgattttctcggtgtcttcacaactcacaggcatcattaactgcactattcatttattctcacaatttttctaattttacttaaaaagaaatagaaagtctcagtttttttaactatagaaagtcacatttttttaagaagagattgtaactctatgagataaagtagtgaacaacaatttacaaagatccaggattcgaacttgaatcacacccgttccaaataacctccaaatcagttcctaacgctctctgagcaagattatgagctaaatgatttaaacttcttggaacgaagctgagggaaagagggaacaatcttctgaataatgttcgaaagtggtgatctatccttccacttgtgcttgattttctttataagaacttggcagtcaaaatttataatgctgatagggaaacaaattgcagaataccaacttagagccttgttgagagcttcttcttctgctaagagaggggagaggctactagaaactgaagaaaaacaatctgcaataacttcccccttacagttctgaataacagcaccaaaactaattttgcaattttatcccgaactaaagcatccacacttagtttataagttccaaaaggagggagaacagtatcttaggacgaaccatcagcaaaatggctagatgacatgttggcaacttctatattattgttgtgtgatggaatgataatctttgcttgagccgcatgattctacatctataaaagttgacttataagctgagaaaataaatttgttacaattattctagacaacccataagataccataaaataaaggcaaatcgtttttattaagaaactcaaaacctctcaatttctcaaaagaaattcttttacatcacaatctttgttagtggcgaaaaagtgagaaaatctagtatttgaccaggttttagctgttctggaacactctaggagagaatgagaattggtatcaacgtgattgaagcaaatagagcagtatggattatcaatcacatttttaaggaaaagattaagaccaaatgtaacaagtgattgaaagctttccaaacaaaatatttaatcttaggggacatcttaatagaccaaaaagttttccaccaacatttaaaaaaacccagatcagaagaagaagggaaggataggacagaattagcaagtggtaagccgaattgacagttaggtttccaaagggatggtatccccaaataagacagtcctctctagctagatcaatagggatttttaaaatagaagttaccacattagtggggaagtaagaactgagtttattaacatcccagaaaccctcctctttaatgaaaaaagaagtggtatcctcaggaggatgaagatcattattgtaagaaacagccctcaaatccaggatccaattcagactagttatttgaatagggttaccattgcccaccttccgaactaaacccttacaaaggagttccctaccccaaagcagacttctccaagtgaaagaagggcaatggccaagggaagcacaaagaaggtcattatttctaaaatatttggctttgagaagagtggttaaaagggaatcagggttagtgaagatccgccatgcctacttagcaagcatggcttgattgtggtgaacaatactacgaaaaccaaaacgcccaaaaaattttaacttgcaaaggtaagaatattttttccaatgaactttcctatgattattccccgaagagccccaccaaaaattagccatgaacttctcaaaatgcctgcaagtagatgaaggaagcctgaaacagaacataacataagaaggaatagcttggataactgctttaagaaggatttccttaccagctctagaaaataatttattgttccaaacagtcagcttgctactagctttttggagaagatagtggaaagaggatttttttcgaatgaaaaaaatattggggcacatcgagatatttattaataaaagttttatcctcaagatcgagagaatcaaggaaaaaggtttttgtcttgcacactagtgttatgagagaaaagtactgaggacttagaaaaattaacagactggtcagtggccttattatatatataaagaatatctttaatggcattactattttgtagggtaacaatagtgaacaaaagactaacatccgcaaataaaagatgaaaaatagagggagcagatcgacaaatggaaataccttggaaactatcattggacactttacagcgaatagcagtagagagaccctcggccaccaataggaatacgtagggcgacaagggatccccttgcctaatccctctagtagggaggatgacagaggataaatgataattaatgcagagcttaaaagaaacagtagaaagacaacgaagaattagggaagtgagttggccaggaaaaccaaacttattgagaatgcacctaataaaggtccattcaaccttgtcaaatgccttctccatatccaacttaagggcagcccactcaactttactacttttcctattattaatggcattcattggctagaaagatattattaaagataactctttcacacaaaaaagcacactagttgtgagagaagaggtggttaaggacaggtttgagtctatttgcaatggctttagcaatgaccttataaatggtagagcataaacttctaggctatagtcacgaactttagaaggattgttattcttaggaataagaataagaaatgtctcattaatagacgacaggtcaaccccattgtttaaaatattaagagtagccttgcaaaagttagccccaatgacaacctagttcttttagtagaaataggaatttaaaccatcaggactaggcgctttgtctcctgaaacctaaaataaagcacgcttaacttcaacatgatcaaacagtttagccaaaagttggaaatgctggtcactaacacttatggagacaccagagagaataacatcaacactattgacatcaacagcctgagaggagaaaaggctagagtaaaagtcaacaaagtggttataaatatccttaaaatcatggacagtggaaccattatctagggtaatatacctaacaaggttattccttcttctagttaaagctttattgtggacgtatttagtaatctagtccccagctgtaagccaattgaccctagatctctgtttccaatacaactcttccttgtacaacaaggtatctaaagaagattgaagactgttggctttagcgacatcatcattagtaatgatagggggtgaatagatatgatctatagtaatatataaatttctaatatcactcttaaagttattcttattcttgccccaaactcttaatttgtgaatgcaacaagtttgtttatgaagaaaattcacaagattagcattattattagggataggatcactagaataccaagaatcttcaataattttaaagaaatcaggttctaaaagccagttattttcaaagaaaaaatgacctggagaggacctataattattcatatcattgaaaagtactttaagagccctatggtctgatccataaaacgagagatgaaacagagaagcagacagaaaaagaacagaccaaggctgattaacaataccccaatctaatctttccataggatcctcatgtttccaagtaaaatgatttccaacaaaatgcaagggagacagatcgtacttatgaacaaaacattgaaaattatggatagcataagggggaggagtagaggagctgttacggtctttaaagctaagaatatcattgaagtcacctataattaaccaggggcaataggagcagtatcatacaaatgatttaacagtaaccacaactcatttttggaggtaacataaggagaaccataaaaacaagataaatgatagttcatattatcatcagcagaaacaaagcagtctatatgatacagggagtaagataaaatagtaatattaactccatcattccaaaagagtaacaaacctccccctaaaccattcttaggaacctcaaatacattaccaaaagacaaagaagctttcaacctagaactagaattagcagtcagcttagtctccatcataaaaagaatctgaggatgatgttgagtaaccaaaagggagaggttgcggaatactcggggactccctaacgcccgagcattccaacttataaggatcatttttcttggtggggttgttgagcaacacccgcctggccattagaatcagaaatggaagggaccatagcaaagtcagaagtagaagctcgagctctcttcaacatacttctgaaagaagagtcaacttgttggttctatcttgagaaagacctcttggtactagaaacatttctaatagcacctggagtagcagaaagaagggaagttcttcactgatcaaattgcataattcctttgcccttggaggtagatgagacaacaacaaggaccattataggactcaagttaataggacaaggaacaggatgagtaatgggccccaaatacaatgggcgagaataggtcaagagattttgaaaagggccccctgacatcgctttagtagaactatgaagggaagaagtgattaggatagtactggaaatattagggacgagaaggtgatccataacaccgtgaaggctttggttcgaagagatgatatgactggaagactcctcgaaaggaatagagtttgaaagctcaaaagtgctctttttatagacagacttagcaggagctcttagagtatctttatagcttagagagggagagtaggcatgatcatcacaatgcttaaggaatttttcacacttattaaaagtatgatcaagaattccacagtgtattaaatgttgggtttatgccctaaata

SEQ ID NO: 112709 - DNA, 3553 bp, Cannabis sativa
  modified_base (1520)..(1531): a, c, t, g, unknown or other
  modified_base (1719)..(1722): a, c, t, g, unknown or other
atttttttgcccaattttttttttcaattaaacagccacaacttatataatatacaaataataattttttttaattaaataaaaaaattaagcataaaaatttaaattcttttaatactatacatttacgagtaatacccattaaaagtcatatgatattattttaaaaagactaaaaaaaaggtgtgcatgctataaataataataatataatatttttggggggagtatataataagaagtagagagacaagcttagatcatacgtttcaaaccaatattattattattattattaattttctttattgtaaaattttgaagataaagaaagaaaaaaaaaaatcaagtccttgcaaatctcatgaactgtggagtcgtgttgggtttctattgttggggttgggagttcttaactgcccttcttctcttctcttcttcttcttcttcttttctaattcatattattattaatccatctaattaattacatcctatatcttctttcttttaatttctagggcaatatataataataatatatataatggatcatcataataatgatcatgtattgattagtgatcaaaagggtttgttggaatacatgagaaagtcaagtccaccaccatttttgctcaagacatacatgttggtagaagatcccgccaccgatgaggttatctcgtggaacgcgcaaggcaccgccttcgtggtttggcaaccggccgagttcgccagagatcttcttcctactctcttcaagcatagcaatttctctagctttgtcaggcaactcaacacttatgtatgttaatcatataataactctctttctttatatattttcttaattattataaattattttattatatatatgcagtgacggaatcaggattaattatttttatttataactttataaaagattctcaggttttttatagatgatatttaacttagctaaatatataggaaatgtttttccttttattcaatgttcatacattattaatttaaaaatacagtactatatgtaatcaaaggtgataaaaaatgaatataaattaagaattttgccaaagtattaataacttagctttataatattgttagattttgagtccctattattattaggttaattctggtttttctttaactaaaaattaagatataataatttttattgtgattgtcttttgaaaatggagtctatatgattaagttccaaaaggaatttaataatgaataatagagaaaagtcatcatatggaatgtattaaatatttggccttaaaagagaagaaaccaattcttgtagaccatggactttgaagatatatatatatatatataaatatataaatatatatccacaataatatactggaattaaaattcacatactcactataaaaaatagttaattttagtgacaatcttttagtcacaacataaattttttgtgattaaatgtaacttttaatcataacaaaaaattacttgtgactaannnnnnnnnnnnagatacaaattgtcactaatttaggttttagtcaaaacaaatattgtgattaaaaatacatttagtcacaatacaaactgtaacttttgtaactaatatatttttagtcacaaactttttagtcataacatgcataaaatgataatttataattagtgataactttttttatttttagtcacaaattnnnntgtgactaaaagtaaaaaaatttgaagtgacagtactttttacaacacacataatatgacacaattaaacacacataatggtatatataacaaatatactacatatatatatacttataggccatatatagtaattaggagcaatgttaatagtggtgtcaacacttaattttttaagtgttataaattaagtattgagttttacataaatttttaatttaataacaattatagaattcaataaccatattcctaaaaagtgttagacactactaatatttttatagatgcaaagtggaataatatgtattaattgctcaaatcaatttattattgtttgtcaacttaggaaaagtattaaatatgaactaattggaaaatatatgtacaatgtcaacttaattgattcattatcaactatagataactatattcatatataaattatcaatcaatgattatattcatcaggtggaattaataataaatacatattttattttattttcacacataattagagtttggtagagagcatcagctctcttaaaactttggttatactctcacatatccattatatatatatatataattagctaattccaaataattaaagctctcaaacaaacattatatgattgaaacttttagcaatatttcatgcaaattttaatacatttgttgtctttattcaactagggtttccgaaaagttgcaacaaaccgttgggagttttgcaatgacaagtttcgaaaaggcgaaaaagaccacttatgtgagatccgcagaaggaaagcatgggccaataataacaacaagcaacaatcaacaacagctgcggccacagcaacaaccgaggaggaggggtcagtggccgcagctgtaggaggaagaggaggacatgtagtagtagtggagtctgatgaagaccaaaggtcttcatcaacttcttcatcttccgaattattcaccactctagttgatgagaacaagaggcttaagaaggaaaatggggttttgagctttgagctaagaaatatgaagaataagtgtagagaattacttgatttggtggctaaatatgagaatgatcatgatgatcaaaggcctaagttgtttggggttagattggaagttgaaggagaggtggaaaagaagagaaaaagagctcaagtacttagtgaaagtgcaagtattttattgtctcaaacatgcaaataataataaaataataatatataatatataataaataagtaagtaagtaagaaaaaaaaagttagttatatgatcaaattagaaattaattaatatggttatattatattatgtatacgtaagaagtgttgattaattaatctctctatcatgtgttgtaataattagttacttagatatagaagagttattacgtatggtgttttcttagctatgtacaatgactgaattgaattaagaacagttcagatattatataaatttatataaatatatatatatatatgtacaatatttgttcattgaaaaagagtgacaaaatgggaacaatcccatttgaatttcttttctgttagtctttcttcttcttctcttcttcttttttattacaattttggtttatctaaatatttatgcagaatttaattaaccactataattgttttaactcataaaatatacaatcatatgactaaaaatgaaatgcgtattttaattttttttttcttgtgttagctgttgttttaagcttatagattaactaagggaaatttgattttctatacttattaaatttaaaaatttgttttttaaaccaatacattttaca

SEQ ID NO: 112710 - DNA, 5245 bp, Cannabis sativa
  modified_base (248)..(248): a, c, t, g, unknown or other
  modified_base (1648)..(1648): a, c, t, g, unknown or other
  modified_base (5197)..(5218): a, c, t, g, unknown or other
ctcaactttttcttttcttatttttcttgctaaatttttttttaccgaatgagagatttttttaattagatagaaaaattaaagaataaaaacttaaaactttttaattttacctatttatgagtaatacctattaagagtgtatccatataagataattactaaagatattttaaaggtcatcaagacctatatcatattgtgattggtataaattaataatgagtcttatatattttaatttaatnaataatataaaaaatcactaattaatcattgagtctttgctctggtaagatattagaagctaattttctattgtagaaatattttttatttttaaaacttagagacaatttttatatagtactatatattgtagttataacagatattttacattttttgaaaaattctaaaaaaagttacagaattcaaaatagtttgttgtatatacacgtgtttaaaaataatatgtatgtttttcaaaataaataaatatgtatgcgtactacgtacttatttggattctatttttgatgttataaattatttacattaattttttgaaaacattcaaaatatctaatataattacaatatatatataaaaaaattagaattaatatataatttttttggataccgaaaataggatacaactataaattaagtaaaaagcaaagatgaggcttagaaatgatcttattatacataaattacatgtgcaaataacattattatacgagttaataaagagagcaatggctcgttaatttgataggttgttgtattatattaaacaataaataataatatattttgataaaaatattatattgtattaattattacaactataaattgtaatatcatgtgaatcgtaaatacaaaaataaattatttgtataagcttgtactataatatttacaaatagtttgggattgggtaccctgaccttagatccaaattcagactcagctcctgacccagactccgaatgcggcctaggacctgaaccctggacccagactcttgccctggatcccagaccctgaccgaagacctgaaacccagacccaaaccttggacccgcattcgaaccccagccttggaccccgggtctaggctggggtcggggttggggatgagtttttggtaaaggtaatataatattgcacaaactattaatacaagtcaatatcaaatataatattggattaaataatattaatataatacattacaacacgacatactaaacgagctctaaaagtagggatgtacataaacttttccaattcgaataactcgcccaaatcaaactgagataacccgacaaaaaatgcaaactaaaaaacccaatgaaaatataacccgcccaatctttatattgggctggttaaaaaataacatcaattcgtccaatcaacccgaactaacccaaccaacccgattaagagagtttttttttttttatatatatatttatatgtttttattatatatatttatatattatataatttatatgattatttaaaaaatataaaatttaaattaatatattttttatggtagtttatttgaactttaaattcaatctatgtatttgtctcattattacaattaactaaaatataacanttgaatgtaaaaataaaaaataaaaaatattagtagtcggtttggataagttaacccgaccaaactgattaattttgttggacagattattattttatttttcttaattagacgagttgtacttagatttttgtaaccttatctttaggttgaataaaatataaataaaccaaccaaatctaccaacgtacaaccctacttaaaagtgttgtttctaataagtaactaattaattaagaatttatttaaaagaaaaaaaaactaattaatcaagaaccacatacaattttgtaattggttggtccacatgtggaagatttataaaaaagctttactcaaacttaaaaagtactcttcttcttaattaatgaaactttcaagcatgcaatagttagttggtactataattctaaatagtgtgctgaataaatatattattaagaggttaataacaaagacaaatttggaaaatgtgcatgtgtttaattgattcattccatttatatattcatgtatatacaaacttgatcgaaaatatattccatttaggcttcatcagttaataccataatcatttgaacaatccaactaaaagattttaactccaacaatttcaaacacgtggcatttctttttactctctctaattatatataatcacacatcatcatatatatatatatatatatatattaataaattgaaaaaaaaaatggagagaattttatttttagtgtaggagtattaactttttgtttatggtatatagaaaaattataaatcaatttttatatgatgttatatatattatagtttactaaatatatatttttttaattttttaaataatttacagtaaaaaaaattagaattcaaacatttatttgtacatatatatatgttttactttacacacatgtaacatattgttttgacttttatttttgatattacaaagtattcaaaatttgtcaaaaagggacaaaatatctattacacctataatctataaaacattatacacacacaaaaaaaatggatgtaatttcttaaaatataaaaaaattaaatttgatgtctataatagaattttgtatatatagatgtaaatgatagcaaaactcaagatttgagttggtttcatttatagtttgttttgatttgtaaaaagaaggtgtaggttgaacatatatctaagctaaatttgttttttttttttttttttttgacgaacaatatattgacttattcacccaaaaaaaaatttaaatttaaatataaaaaataagaaatggtactatagtaggagctagcacaagcagtgacggacccagaatttttgatctgtgggggcttaattgttataaaaatatttattatttactttacattaaaattataactattttgtggacgctttttactattttgttgtataattatttaactaaataaaaaatatttaattttttttcacactaacttttttttagtgggggctataaccccacactcttattactgtgtccgtccctgagcacaagtgatatccccatctaaaaaactccctaaatacctagataattattatttcgaatttaaaatttaaccgcgcgacctaatattatatgtgattgtacaaatatcaaaacaagcattcctaaatatttatattaaatttggtataatataattataaaataaaaatatataagaaaataacacatattaattctctctctgccgaccctaactatggccccatgagctatatagccactcgaccaatcacgttatatcaaatgagtgcaatgaaaaccatatggttgtaaatgtaatctcagttctagctaaaacaaatatatactataattatatttctctatatatttatatgtagcctagttcattggtttcacacacacatatatagactcatggcccaaccaaatgttcccacataacatatatatggctttttcaatggagagaaagagatgatgatgatgatgatgatgaagaagaagaatagagctagaaagagtaattagtataatagttgaccaaaaaccaaaggctatttatatcctttttggagagaaacaatcatacctatcatggcacacgcaacaaaatgcaacccaccccatttatataattaattaaatttataacttttcatgcaataaaaaaagagataaggttttgacattatgtattgaaagagcctctctcaaaaagaaaaaattaattcattcccatttttggcctttctattaccatcataataatatcaatgtttggaataagtgattatgagagctatatagtgatgatcaagtgtgtatatatatatatgtatatgtataatataaatgtgtagaaagtataacaatcatgattttagaagtgttccactacttaagagaaatgacataatacatatatgtgtattatatatattatagtcactccaataaaaactcagcatttaaatgtgaaagggacatttgaatatgttccattctcattgaaattgaaaatgtaataaggagaaacttcaatgtcatgatgtggcacttgcaccaatgtcccatactaagaattaacaatgtagaatttgattaaaaatgtatatatattacatacatatatatagacagatttttattaaagctttataattctctttttagcttgaagtttgaaatggtaaggtttttataagcacatcatgatgaagaccacttcaattttttctctggctaaattaattaacttatgctgttatagaattatataacctaactataacttcttgtacatattcatatataaccaaattatatataaatatagcctgtttctgtaaaccctatttgtattggtgcttaaaaatattttttagttaaatttttttcattatatattagtatataaataaattgtgaagtgggaaaaagaattgattctcaaaaattgatatattttatttggatatatatcatgcatgctaaaagggataatgttgaaaattgcagaaaataaaaagttacatcaaaaaggagaaaagaaatattaaataaatatagaaacacaagaatcacttacaatattctttactacaaaataaaagtgataataataaaaggagccaactgacaaggaaaaagagacttatctatgccactctgctagcattaacttttttttttttttttggtatttctatttatgactcaaattcatttatttataaatataatatgtattagaaaaactaagctaattaataagcacttttggtttagaacccaattcagattattacatagaataataagttgagaaatacctaaatttttgtattcattaataaaaaaatatttttatattatattatattaaaatatatatttacttttataatgtattagttattaagtccatttttagaaaaaattaagcgtgtgatctatgaataattaaggggtacatgatttagagatatatgggctcgtttggaatgccgtattaggtcgtattgtnnnnnnnnnnnnnnnnnnnnnntgtattttatacaatatttttatgtaa

SEQ ID NO: 112711 - DNA, 1189 bp, Cannabis sativa
gcggtgtgggattgcacagtttacccggtatttccccttacggatcacggcactactgactgccacagagagagagagagagagagcaagagaacatatagaagaatgagagaatagaattcgagatactcagagaatacaaaaaaaaaaaaaacaaagatatcaaggaagtatctaaatttggtataatcttttggttaaatattatcactttaaatttgaaatatgagaattagggtaaatattatatgaggacaatttccaaaaaaaattgaaatgcttatttcattaaatcaactacgactcataaagacacgtgagaataatttttcgtaacggattccgcaacattcaagctcaaacctaatagtcacgagctaataaattatggactcaagggataattataagagataaaactaactttaaagggataaaagtaattgaatttgattatcgtataaaaactaataaagttatgtggcaagagtgattgaaaacacattgtttcactaaaaataaaataataagagcataggagagagtgagaatagtagctaaacataccttaattagcagatcaaaggtaaagcaggcgagaataaagagagggcatatccacgtggaccaatctaaagaaaagagatggtgtaggggaacccctcattctagataagagatgattcttgatcacaccatcccaatctgctaaaatacatctttaatatacttttgagttcaagatcagaaattgaagaggagaattacaattgatcgaggaagaattataaaatctagtagagttgtgttcttataattggatcaatcctagtgtaaagaattttgaataaaaatataattttattgttgagccaaatttaagcattaacattgtatgtcctcatccaattggtatagacaaaaatataaattaaaagagcccaacaaattaattactccatccaatataccgttcaccataaatgaatcaaactactaaaaaaaaaagaaagaaaaggaaacaagtgacaaaaaattaaagagggtgcataatattttggtgcactaatatgtttgctataacttttgtcaagtaattatttttttttagtaaaaatcatgggaaaattttaagagtttacttttttatggcataattaaatacagctaagtggttatgagttttttt

SEQ ID NO: 112712 - DNA, 2187 bp, Cannabis sativa
aagtacaaagctcgtcttgtggctaaagggtttcatcagcaacccggtttcgatttcactgaaacctttagccccgttgtcaaaccggtcactattcgtgtagttctctttattgctatatctagaggttggaatatcaagcaattgaatgttaataatgcatttctttatggggatttgcatgaggaggtgtacatgcaacaaccccccgagtttgtccttccagatgcccctcaccttgtgtgcaaacttcacaaggccttgtatggactcaaacatgcccctcgagcttggtttgataaattacacaccagccttattgctcttgggtttacatcctcgaaatctgacagatcttgttcattttacagacatcctcctctactacattcatcttggtatatgttgatgacatagtcatcacaggcagtgactccaatctcattaacactatcatcaactctctgaattcttagttctctcttatggatcttggcaacctaacatacttccttggcattgaagttcagacaacatctcacgggttgcacttatctcagtccaagtacattcgtgacctccttattaaagcccaaatggaggatgctaaacctcttccaaatcccatggtaagtggtttaaaactgtctgctcatggtcatgaaccatttgacaatcctcggctttgtaggtcgattgtgggggccttgcaatacttgttgattactcggcctgaactctcctacagtgtaaacaaagtctgttagttcatgaaaactcctttacaaccacattcacaagtctctctcaactgatctagttgccttttgtgatgctgattgggcctttgatcccgatgacaggcgatctacttctggtttttctatcttcttaggaggcaacttaatcacttggcaatgcaagaagcaacaaacaatcagccgttcgagtacagaagtagagtatcgcagccttgctaatgtcgtttctgaactcacgtggctccaatctctcttcactgagcttcagattactcaatccacagctccggttgtgtggtgtgacaacctcagcaccgttcttcttgctgcgaaccctgtcttacatgctcgaacaaaacacattgagcttgatctttactttgttcgagaaaaggttcttcggcaacaagtacaagtgaaacatgttcctgccgcatatcaacttgctgatggccttactaaaccagtttcaagacagagttttcctggttttcgatccaaactcacaattgctagtcctatcaattctgagtttgcggggaggtattaggggatctttgtttagagtctgttagagttagttaatcactgttaagtggttgttattttcggttagttacagttagttaagttttcttttctttcaattggttctggtgtgtactcaatatacataaaaggactctttcttgtactctgaacatattgcaataatacaatacagatgcctttctttctttctctttctgattcttgttctctctttcttctttctccattgttgctgctatgactcttgaatcatgaacagaaggattaacaatcctaataaacccaaacccaaacccgggtccacttcgagttcggctttgagtctaggtctgggttcagattcaagtccaggtccggatccaggttcggagtccggatctgagtccgggtccggagtccggatccagatccaggtctgcggttcgaggtctgggtctgggtccaaatttgagtctggagtttgggatccggagtccgaggtccagggtccaacttcgatcgggtttgggtccgagtccgagtctgagtccggagtaggatgaattcatgtcatggccgtatggtgaatattgaattttttctcctttttttagtaaaaaaatctaaaaataattttaaaaacttgagccaaacaccattaaattttttaaaatgacaaaaaaactattttctattctcactcttataaatacaataatatattttgaaaacttaaaacacagcaaacagcatcaaagtcactaatattttataactattaggaagtatttgctgctgggattgagacatcagcaacatctgtagaatgggctatgtcagaattgatgaagaatccgaagataatgaaaagggcacaagatgaggttagagaagt

SEQ ID NO: 112713 - DNA, 1591 bp, Cannabis sativa
taatttgacatgatttttgagaaaaattctttgattagcaaagattgcactgtaattggaaaagcactgtaccgtgccttagcatttgggcgttacagaaagtatcactgtttttataaatcaacagttatttacaacaatagtgaaaataagatagggaatttatcctagccaacaaacgtgttgatccaactctaaagcatgtttagccaaaccatgcgcaggatggttaacatttctcctaacatgagagctacgtgctttagggagggaaaaagaataaaacacaacgatcatccaagattaaatcagagaaactagacaaatctgtagatgtagtagttaaagcatgaaaaattctaagggcatcaatctctatattggtgatatttagttgttgctgcaacgcctaatttagactatgaaaaagcgctttgcttccatttcatctgaacgaaagcaaccttgcaccggcttcaaaagtgcagcaataacttgtccaaatcgttccgaacaatggcacccactcccaatttttcgctgagaattacaccagcgtcgacgtttagcttaaaaccagcagtagaagggagctaccaatgaacctcagcagtatcgttattactgctggaagaaggagcagcagtgtcgtagtctctttgagaagcattactttgcttccgactggacgaaagtttcaacttttccaagtaatctttggcaaatgtagcagtttgtttcccatacaaagttttactgccatgtaaggatttgtttctactcgaccatatagcccacttgatgcatattataagctcaaattcaatttgggaatgcagagtagataggtggaaaaggtaatcaccattgtacataagttgtgctttcttatagtccatgataaaaccagagtatttccaaactgatttcgaatgtgggcaattaaaaagagcatgcgcaaaggattcccatgcactggtacacatcgaacaggcagccgagtcaagccctttttgtcgatgcaaggcaacagtagttggaagagcattttgcataactttccacacaaatattttgaccttggaaggaagagttaaatacgaaaaagttttccactaggaactatgcaggtccaaagatgaagaatgttgttgctcatccaaatttccagccaaataaaatgctgagttgactgtgtaccctcccgatgtggtatgatgccaaactaaacgatctgtagaagggaagaagcgcaaagaaactcagacaattctatcaatatctagctgaccaaaatagttgttgagaaagtcaaggttccactcccttttatatgtgatgaaattagcagccgacatggatggaggaaccgtgtaagtgattggataaaactctatatgccaaggtatctatttatcaagcccacattgaatgtgaaatccattccctactttatatcgaaggcgtttaagaagcagttccggaacccaatggatgctttgccatgtaagtgagagggagttgccaaatctttctttaatgtaatcttttccattcaattatcaataaagaaacaaaattattttcatta

SEQ ID NO: 112714 - DNA, 1133 bp, Cannabis sativa
aattcttgtatataaaaatatatattaactaaaacaaattagttgattctttcaaacaaaaaataagataaaatataacatagtatgagatctttagattgaaattaagagcatttttgctacattttaatggaaaataatgaacaaaattgaagatatgaagctaaatgaaaatccagaaatttaattttatcatgattgtgtatttgttggttaaatataatatgaaaaaagactagacttacccccaacaaaaagcaattaaaatttggccttgggtagatagttgtcctcaaactcctttttccatcagagatttataaggggaaagaactttaatgtgtgagaaaaagaactaaaccaactcgagctaatataggaaaaatcaatttgacaatggtagaatgtggaagcaaccatcgattcaaaaacaaacacacacaattaaaataaaataaaatcataataataattatcttttagtttttcatatataaaaaaaataagggtctaaaatggtggacaatatgaggtcgattgtatgagggacttgttaggtgtcccaatggacacaccacaaccactagtataacattgaatgaaggttgttcattaataattttgtgatatggaatggaccaagccaaaccatattcccaatagcttttgatgtgatgtaaccttattagttatcaacatagaagctataactatgaaattaacaaatgcatcaagatacaacaagtctaatttttccacagttggagacaatgtatgtaggcccttcagcagaaaaaaaaaagggataatgtaggcccgcctttcctttttgcttaaaacctttccatttttttacatgttcgagccatgaattacataaaaatagtcaaaatgtttgattgaattgtgcatatcttgtaaagtttgattttttttttcgttcgagccatgaattacaaatgcatatatttatatacatacggggaagagagagaagcatagtcttctgtgagaaataattgcttatcataatatttcacattatatatgtttgggtaaattgcgacataaatacttaatatttaaatttatacacttaaaaacctaatatttatttttggagacaaaaatac

SEQ ID NO: 112715 - DNA, 4846 bp, Cannabis sativa
tgtaaagggttttatttagggcacaaaactcaacagataatgcgtcaaattaaaacgattagaaataattaataacgataatgataaagataaagaaaaaagaacactgagattgttatattcttatggaggttcaatctcgtgatggtggtaatatcctattctccttttacttatattgagttgtgagaagagaatcaagaagtttttgaactctctcaaaagcttttacaataatttctaagtttttatctcttaaatctatgtttgttttctctccgattttcctttatctgaatagtgaaatgactccactatttataagaaagaattattttaaaccgatttcttaaaactaataagaatttaaataagaaacttgtttactttccttaaacaattaaagcaaaagggaaaactaagtaagtttcattttatatcttatcaatatgaaaatattccacaaaattatagaaataatcgtggcttgaatcttcaaagatttataggatgtatattctgaagatattttcttcgcatttactctgcttggtgcatgcgagttgactgccggtcagatggtgtagcatactccgttcgggcattccaagtttcttcttcaaatcatttacttataagcaataaattaatctggacgacccatcatgaagcgtgctgttcgcccatgttatagaatcttttccacgtgtcaccaagacgaacgccacatcaccccgtacaaaaattaggataataagccaaattaaaattttccttgaatgctcattatatttggtggcctaaccattctaaatgtattaataatgctttgaagagatattcctatgattaatgttattatttggtactcttttttctttggaggtttttcccaataaatttatccttgagattttaatgagacattttttttaaataaaaaacatttaagttatatatattttttttgaaccaaggaaataaatcattcattaactttgagcaagtacaatggatttaaggtatggtattgattcccatacaattgtttactaaattttggaaagggggaaactagtgggacccacacaaattagggagaaaacaaagggaaaggttcttctcccatttttatagggaatgcctttccctttccttacttaatttattttaattttaattttattaattaaaaatgaaaagacaaatataccccttaaaatctataaacagaaaataatacatgttctaataatgacaattttgtcaaatttaagcattccgattacctttcctagttatgtaaataaaataatatctttctggttttctttccggacagtttagtaaacatcataataaaatattgtttctgattattttctattttaaaccgatacatttctcccattgattattctaattccaattacagtttagtaaacgcgtcataagctcagtaaaaatataatctgacataaaataagactctctaacaaaacaatgagcagccttatttgcagatcacttaacaaactttaaagaaccattattaagagtagaaattaaaaacataaatttcattagcatattggaaaacagcacataataaaaaagttgtgaatcccaaatagggcttatttatactaaaagacaaaatgctaaaattatttcacataaattggcttatttatttagctttaaggcgcaaagtaaatgcttgaagagctaaaagaacttcttttaacctctccttagaggattgatcaatcaaattgccatcactatcaaatggcataggagatttgaatgcattcaagaaaaactcaggcttgttgatgaagtgaatgtctaggtaaattccgatttgacgaagatggtattgcgatcgaccgcccccgaaatcccctccagcactcacaatggctgcagctttgtcaccccatacatttggtggcctagatgcccaatccattgcattcttcaaaggtgctatatatagtatagtatatgaacattgaatatggagggaaataataagtctacatataaacatgattttttaactataaatagagagaaaccctagtcgtttaaatgggttcctacttcctaatagattagagtttaatatcaaatgatagcctcttctcaatatttgtttggtaataataacgcaatattgtcaaaaagagataagaaagaggattcttgcggctgtgatctaatgcacgtgtaaagttttcatttttctttttaagaaattttcacataatatttggaatattttgtcaaattataagactagatttattttgattatacatgattaaagtaaaaaaatttacaaatttatgtaaataaaaaagtagttcaatttacacttattggttgccacacaaaaattaaaaatcattaatttactatttctttttttggacaagtaactaatccaacaatttaagcaataattaataattactgatttttgttagattaagcaaaggtgaataatataataaatattattgtcacttttcatatatatttttttaatttactgtttgattgctccattaattactgtaatagttttagtagtgtttatgtgccttcctcaatttttatatagttattatgtaaagttctgtaaaaatatataaaaaaaaatattttaaactgtaaaaaacgaaagattctaaaaataacatttaaataataaaaaaaaaaataaaaaatctttatccactcattaaaatccaagcaaaattaaaaaatgttataatgaagaatgaatcctctgaaatgccatttcaacttttttgataataaaaatattttaatggtaaagagattgagattgattacccaccagtgacggagtaattgtactccggtgaggcaaagagaaagctatcagcttctagaatttttcggcggaaagcttcgacgggcggcggataagttccatggacctcgagatcagtgttgagcatgggcaaaggcgagatatctatgtactcaatctctaataacccattgaaaattgggtccttgctcaactcaatcgctgcaattaataaaatattcgaccatgaatttatattaatgatctgattcaaaaaataataaagattatatataagtagtaccagaagtaataagtccacgatgaaaggaggctttacgaagagaaccacacaaagccgctactttgagtttgattattggtttctccataaattcttcttctttatttatcacttgataattgatattgcttttctaatatgtatgtatgtatgtatgtagagggagccttttatattgggacacaaacaaagtagcaatcatagtacctcgctaggaaaaaaattgggcaactttaatttttttttatttttttacaattagtattatagtgagaatttttttgcataaaataatatatatttgacacgtagactagattctcagataaaaaagaatgacgtgtagaattagcaaggatagagactagcgagaatgtgtgaccgtaacaaggtcgtcacacactctgtaacatagtagagtaaaagtaggatgacgagaaattatcataagtcgcgcatatatcaattatatgtgagtgtccccccacacacgtaaagattgcatctttaatgacgcatgatttcaatgatcaaccaatgtatgtgacaagtcatcttaaattcagaaattttatgttgttagtacatgaaacgcccaatatgcaaccggtatatataattgtaggcctcactattaaaaaattggattttcttgacaattttaaatagtcggctaatgtattgtcgtgagtctctataactatcgcctattcaaccgtccaaaacttatagaataaacgacggtgaaaaattaccagtaaaaaaatttgtcgacggatgaaaaccgtcgcttatagtttaaagtataggctaaggtgcaaaaccgtcactcatactataggctacagtgcaaaattgttgcctatactataagttacggtttacggtttaaaaccgtaacctataacagcaacaacagagatcgatgataccaacaaacttctcaagaaaaaagtcatcttccaaaaattacctatttgatcacaacatcgatttttacctcatcacctagactgtatcattacaacaattattaaatataaatacaaaccaatcaagcaaaagcacaaattaaagaatatatatataaaaacttttaaaacacgtgaagagtttgaagaaaaaaaaaacaaatatataccaaagaattcttaggaggagaaggtggtggctccatggtagtccgatggttgcagaagcagtggtgggtggtggtggttacatatacgttgtttttgttttattatttgctaatttactttgagtattcgtcgttctaggtgaatattcgcacttctttaagtaagtatccctgtttatcttgaatattcgtaatttttggtgttgtttattttcctctaacaacagttagtgttttttgaatttttcggacaccgataaaaaaatatattaagctaaaataaaatttgtttagaaagtaaataagatgagatttatgcatggttggttagccttagtctacgagtcaatattattgagctctttcacagtggagtattttacacaagtgtattcttgctaggttttctaacccgagaatttctatgtaaagatcgtttagtttaatttggaaattagcagataaatagggtttaattatggaaattatttattgatattaaaataattatttatgatgatttatttgagttcagaatgcattttatatgtca

SEQ ID NO: 112716 - DNA, 5082 bp, Cannabis sativa
taaataaaataaaaaaaattgtaaaaatgttaaaaattccgtaaaaccgtatttttttgttatttttatgtttttgtgaaataatccctaaaaaaaagtaaactttgaccctaataactaataagggtatataagaagaaagcccaaaaactaacccattaaataaggttagttagcacctcaatgaatccattttgttcattaattgtttggctccacaggccataaaaattaaataaaaaaaattcaaaatctgcatactcttataaagcagcggcaagcagaaaaaaaaaatcttctccagaccagcaaaacattatagagaatataaccataaaatattgctgcaaacttgagataaataatatttcaggccatgcatttcaataattcttttctgaattctgagagtctagctctagctaaattattaaccaactataacactacctcacttttatcaaaattcagttccactcctttaaaaggagggattaataagaatcctacagcaccaagcgaccgagttacataatcacaggttctagagtcatgaacaggtcaaactactagaactacttctttgtagctcacaagctttgcttttctgctgatggatgccattttcaggtggaagcatttggtaagttgctcacttgttcttcgatggctgccataaacagatttgaggcttggatcagtttacttgctgctgatgacttccatacataggataagctccatatgctgcagggtacatggttggatcatgaggtggtagtgcatatccatagttatcgtaaacgtgtcctccatagtatgccccgctccattggttgccaaaatcccctctgaactgtaaactcaaaatcacaattataaaatataaataagtctcagatactattaataaacaagattgtgcagttgtgcactaggccatatggacaagaatggaaattatcctcctttaaaagcttcatgctagtcccatgggaaatatagtgattataatcttattagtaaagcagtcgtagctgttttaccaccagtaacgtttacataacaatgtttcaagaagtctgaatcacagtcatgtccagttgttaagaggctcaattcaacaaagttgtttttggttgcataggaacataagttggttgtttatgttgttcttgttaagtgtgtgtgggtgtgtgtgattatggtgaaagaagaaagaagaaaggagagagggaggagtgcctgcttattggctggattgcggccccatgagagacgaaccgtttgcttcccaattactgttccattcaacttctgcagtgcatcctctgcattatttctgtcacgaggttcagaacaagaagcaatcagcaatttatacacagctttgaatgccatagcagatcattgaatgaaaaatttacctgttggcaaattgtacaaatccacatccttttccagctgggattttaactgaggctatttctccatactgagagaatggttgcctgagatcttcatcagtaacattagggtcaagccctccaacaaatatctgcaaagtgcatgcatgactctttcagagaagaaaaggtcacaatagatagataaacagggccaatagaagatgaaaaactcactgttgtgtttgaagaatctccttcagattggaagccttgggttgatgcaccattaggtgcataccctcctaataatcaaaacaacatagaaaggacattcaaacaatggttaataaggaatagagttagagtattaaataaaaatgatcacaattgttattttctattttatttaattacgtaaacatttgagcaagcatttcaaataatggacgaagcaatagtatcaaaccaattaacaatgagcgagataattcgtagagcatacaaatgttttagccaatatataagaaaacacatacaacatgttctaattataaatttcatatacaccctatgtgaacattggaattggattagagaataacaaactatattatggacaaagaagtaggcagtaaaataatctgcaaggacatgtgataagtaactgagaccagtacattaatggcgagacaaaacttatagtcacacagacaaacatatataattatgtaaatatgttagtttgtctcctatacccgcgagctgcaaatataattagttctgagcttatatatgttagctagacaatatgagattaagaaagttgaaattaatctatagtaccatgttgattatatccagaggacttccttggagttgcagcaccaattctcataggtctgctggaacaataaacaccattcatttcggtcattgcctgagtcctttcactatcatctccaaaccttacgaatccataaccctttgaacggccagtattggcatcaaagacaacttttgcagctttaacagatggatatttactggcaaaagtttcgtgcaatagtctatctgtaacatctgcagctaaatctcctacaaaaattgaaagatcagaggcattattatctgaacgcttttcgccggtgctaaatgttgcccagttgaggcgaaaaggcagatctgtatttggcatcaaaatgccagtatagttctgcagaactttctctgctgttgcgtgtgaaaaaaactccacaaagccatagccctcagacaaaccagtctgcttattgcgtataattttaatggaagaaatctgcatcaaacacaactctatttgttaaataataaggcagacagaaagaaaataatgtgcttttctgtatggaatcaggttaatatatttccaactgcttaatatacggttggaagaacaagattaatttgtacatgcttcaatataaatttcattgtaagtaagtagaaatgattgtaaaacgaaaacgttttacttttttaagtagcagacccaaaagagaaataatcttgatgacatcaagtacttaaatctgacaaaacagaaataaataaaagactagacagaaatagaaaaaatcaagttatcttgccagttgccattcttcctagtgtattttgctaatttgatcaaacacaaagttgatttgttccattatatatacaatagaatatctgtatatatatatatatatattaactccagcttaagtattaattacttttgttttaatgctaaatcatatctagaagaggaaaggaaactctaaccaaacatttatgttaaacgtgcatttatggtaaataaacaatgtctgttacattccctcatcacatttcaccctaaatcaaactctaaactcacacgtttcaattgatagctagctatggcgctagctccctgacattttgaaattatgaacaaatcattatttttatatggtaaactaaaatattgaattttttttttcagcaaatatatatatatatatatatatatatatatattacaattgttcgtataaggaaaaataaaaatatgcgacaaacaaataagcagtcgaaaggcggattttacttctgtaaatatacacctaacaataatcactagcacacatccttaatataataactatttcaaagaaaacactaaaaaaaaaagtaaaaattatattacctccccagttgaggcaaagcagttatggaggtaattttcatccatccaatggtgcaaatctccgacccaaatagtcttattctcactgccgccagatcccggcagctgttggtgtgggtggtgctgctgatactggtggtacgccatgtagtgctgcggcgacggcgagtaatgctgaggtggcatcatctggtgctgcattaccatagccgccgctgggtactgcatcgccatccattgcgggtgctgctgaggatgtggttgttgttgttgctgctgctgctgcggccgttgattctgctcctgttgctgttgtggttgcgacgaatcagaactgttcgattgcatattttctgctttttattatatcttacttccttcctatatcagtacaaaaagcagattcaaactaatattagcctgcacccacccaattaatgatcttgaacagtttcttttcttattctcctttgttgagagagagagaaagataagagagggagagagagagtgagggtgaagggtttaaggagatgggggcggaggctggagaaactagaggaagaagaaaactctctaaaaggaggaacacggttagggtcttgtaaaacttataaatagtgaggaaaattggcctttgtttattttgtttttatttaagatgacagattcatgggttggcttcgtaaaacgcggttattgtttcagccatcggatataaaacataaaatttaatctgagccgttgatacaaaggcaatgagtcggggttacttacttaaaagagttgcaagcttagctctggggtttatcgctatctttttctggatccgccgccaacattgccacatgccttagagggcttcctccttattgttatgtttggcttcgcccttcatttcaaatgatattttttttaaaaaaaaaaacaaatacaattttgtctaattttattttaatttttttattgatttttttgacgtcatcgaatgatctcctgtccaatcgagagagcgagttaattctttttcttttttattatttttactgcggtgaatttggtgattcctaggactgggagtacctaaatcagtaaagacgtgtgaatgagtggattatgagaaatagtgataagaatgagttgcttgcagccttgcaggttgtacttatctatatgttcatcaccgtcatttcattttgagggtattttttttggtcacaacaattttatagtggattgaaaaacttattatttatcgtaatgcaatgaataattatatgttttatgtataattaatagaaactagtaaataatttgctgtggatatttaaaaaaatttaaatataaataaaataaagatatttttacactaaaaatacaaaatacacactttattacatatatatcttcacacggttaaaccaacatttatactcattaactttattttattacactttt

SEQ ID NO: 112717 - DNA, 3261 bp, Cannabis sativa
tttgtgttaaaagttttaattttccgaaattagtttaaatttccaattcagcccccctcttagaaacatatcttgggctaacaccgtccaagtggggtttggagcggtaacttccatctggcacttgtgcataaagtttccttgtgataacgagagcattgggacagtaatgggtgatcataaaagtgcgtggaagtgctacaatgtctcgatcaggtcaatttttagagtaagagaataaattgaataggaaattcccgaggcaccagctagctagcacaaggggtggcttgggaagaagatgagttagatccccgcgtaagggtagagcaaatgatagagtcgcagaaggatgtggaagaagcatgcatcaacgagatagatgccacaaaagttataaaagtgggttggaccctgcctccaacaaccaaagagaagattgtatccatagttatacggatccaagacatcctagcatggagccatgttgatatgatgggagtcaatccccatataatttatcatgccttgaacattgactcggacgctgattcggtcagaaagaagctgaggccactcgattcagtacgttcagaagccatcaaggtagaagtcaaaaagctgacgaccatagagttccttagggaaactctttacccagtatggctggccaatgtagtacttgaccataagccaaataggacatggataatgtgtatcgacttcaccgacataaacaaagcatgtctaaaggattatttcccacttttgcagatagattagatggtggatatcacattcgaataggagctcctcaatttcatagatgcctactctggctacaaccaaattaagatgcacgtgacgaaccaagaatacactagtttccaaatttaaaaaggtgtgtactactgcctagtcatgccctttggactgaagaatgtcaaagcaacctatcagcgattggtcaacaaaatgttcaaggatgtttcaggaaaaaatatggaagtatatgtggatgacatgttagtcaagtccaagactattggggagcacaacattgatctagaagaagccttctccatcatctaaaaatatggcatgaagttgaatccacaaaagtgtactttcagagttttctcagggaagttcctaggcttcatcatcagcttctgatgaatcgaatcaaatctggagaagattcaagctttaatatacatgccatacccaaagaaacataaagatgtgcaaagtttaattgaaaggattgccgctctcaccagatttgtgtccaaagccacaaacaagtgtattccattttttaacatattatgtggaagtaagaagtttgaatgaattactaaatgtgaagaggccttccaaaagttgaaagaacatttggctaaagttcctgtgttgtcaaaatcggtagacggggagccgttgtacctgtatatggtcgtatctgattaagccatcagtgcttccttagtacgagaaaaaggaagagtacaacttctgatttattatgtaagcaagagattgcaagatgcggagtccaggtatctgatgatagaaaagatgtcttattgcttactgatagcctcaaggaagttaagaccgtacttttaggcccatgccatcaaggtactcacgaaccattcccaacgccaagtcctacaaaaactagaatccttagggagagtgcttaagtgggcaatggagctcaaccaatttgatatacattatcaaccgagaatctcaatcaagggttaagacctgacatatttcattgtataatgcaccgaaataaatgacaattcagaagaactagttccaggataggaggtttggaaagtttatgttaacggagcctcgaatgaaaaatgtgccagagatggagtaatgctagtttcccctcaagtgctccagctacaaagtgtcctccgcttcgagttcattgcctccaataatgaggcggagcataaagcaatgattgtcggtttacacctggctaaggaagttaaagtcgagaacatagaagtttacagcaactcctagctggttataaactaaatatctagagaatatcaaacgaatggagagaacatggttgcatatgtctccaaggctcgagagctcctctagaacttcaaaagatacaccatctggcaggtccctaaagatcaaaatgcctttgtagatataatatccatcattaatggttattattaatttaatttaatttttcataaataataaccattattatttttccattttaacaaataattttgtgttatcaagctagttcagggatagataataaattaatttattaatcatgatattagccgactaataaattataattgcactctcaaaacataccgtgtatatattatttacaagcaattaatcacattaatttaggtccattaatttaatcatttcatgagttatgatcctccactaaagattcataattagagtaagatatgttccttccttaacctctttaattatatgtttatcaatcaatactcttgatactctaatgaacatttctttaagtcatatacaaataaaatttctattctctaatagaaattgagcacagtactgctctcatactaaaaggaatatttagtttgcaaccaatcaaggaaggagtggattccgtatttgtgcaatatgttcttggctacctataatcatataactgcaagatatcaagaattggatctatgttctcttccataaactttactcgataagtcaaaagctataagcctatatatatgagttcataagtcatttcaagtttaagatcaagtctcatatggtcatcatgtgatgaatgtcgacttatagattttaacagagattgttagaagttctaatatttcattgtctccctagtcttatgcaatcatgtattgtatacgaatacgacacccctatctcattgtgtcaactacacttaacaacttaggtagattgttctgtgtctaacactgtagataaactgtgctcataatataaattaatatcaaagctcccacttttaatattaacgattaaaaacattaatttgtgttattctctccaaattaaatccttgtgtatttgtacaatcttatatatacatatttaagttaagattataatgaataacaaatgatttaatttgcggcgaaacccccttatgttttgatttttatacacttaacccccttatctttatttttggtggcaaaa

SEQ ID NO: 112718 - DNA, 3247 bp, Cannabis sativa
gatgctctattttgaaagtattttaggaatacaaagttaatgttgtaaaaacactattaaactattttgtgaacattttgaaaacagggggatcccatggttaataccacttatctttcatcatatagcttatatgttaaattgttaattattaaaatttaattaaccacacttttggtataattatataatatctatataagaattttatcaaattgcacacacgtggcgtccttattggacaaggcattacagtcaaactggcccttaatctgttatgtttggaactctttgcttagttaatgtccacatcaacatattttaagttattcattacaagtgattagttttctgagaatatacctcaatcaacttggtatatatatataagtatataatatgtatatatatatatcatggtctaaattttgttaagtttaatacttttaattggagatagtttttcttggttttatctttcaactcttttcgatcttatctttcttgcaggttaattatttctcaaaaagttgttaatggcgaactcaattttcgattctcaccagcaatctgtttgtgctagctgaaggaagttcaactttgtctgtgtgaaatgatctgaaaggttttcagattgaagaagcttgttgaagagatttcaacaattaagaagaaatggatcttgctcattttggctaaggggatttagggtaaattttactgtaagggatttgacaaaattgtacgaactggatgttataattttgatattatatagcagatgttacttaccctagtttggagaacttaagcaatactcggttggaatgtgtttctaatgttaggggaagcttgtaaattgagtgtatttactgttgtttctttattctttttaagcttaaaattgttaattgaattaggatcggaattaacgtgaaactcattaattgagcttagtaactatgttagtaagaacttatattcggtatcatagcaggaaaatttaggttaactttattggatcttgtttgcttagttacattattcaaagatctggttatttcacttgcaagattacgattctcgatttttggtttactcagtcaccactaaccctctctgtgttttcacttctaagagttgtatattgtcttcgttagctgttattgtgcttgcatgatggatatgttgagagaaagcgcccaatgcttgaaggtgtcaattacccgttctggaaaactaaaatgcaagcattcttgagggtagtggatgaaatagtttggatggtcatcgaagatggttggacattcccaacgatgatgggtaatagtctcaccaaactgaaacatatgagctcgtgtacaccttattttgtggtataggttttgttgtaattttttattttaaatttatttataaattttgttaaataatataacatcaaaaatccacaaatcttctattgatgactgagctcaggtttaaggagtaaatcccgtccttatcgagatgatgatatttgaaccttgaatgatgagccaccaaccccgaaggtttacggttgcaagccatgaggctcaaaggggttaatcacgtgatttctcacatgttcatggaagtaatgcaaccccatgcatgtgaaagagagggagctaaaccccatgatttctccgtgaccagagtaagtggggtcgaccgaccttccaaggctcgaggtcaatgtcaatgttggaggagctaaaccattgtgggccacagagcctcctagctcaaaacgggtcacacgacccgacttctctccacaaatagagctcggctccgtacatcctccatcactgccgatttcacactggcatccaccctcgtacgtcgtcccttagtggtcgacggccaccacctacgaccatataggttggccccaccaatgtatatatgtaaccgtatatgtatgtatagatatattatctttttatatattttttattttaataattagattattaatttggaaaataaaataagataaaagatatgtacattattctttttattttaattgattaaaatattttttttttcaaaaattagttattattattttttaagtatatattttattttttaaataaaaggatgtttagatattttatttttcaaattataattttttatatacaaagatatatatactatataaaagtaatattttttaaaaagtggttagtaataatttttgaaaatatattaaaataatattttttaaaatttttttgttataaatgtcctttaaattaattatttattttgaataaatatgataataatttataaatatattattatattattaattaatcattttcttaaaaacaagttataagttggtataacctattgtaaaattagtattatgatattattttaaactaaagtgaaagcaaaattatcttgattaatagtaaataaattaaaaatattttaattacttaactaatgtgatatattgtatacaataattaatttctaaaactaattaataatttattgcttgaaatattttaaaatatttttaatttaaataattaaacaaatatcaattatttaattattaaatcacaattaataatgacaatataaaaggggtttaaattacttaataaaattaattaataattaaaaaaggcatttccaattacaaggtggtggataaatggtgattggagatggtgtcaaattcctaaagctacatcaaggaacaataaagaagagttcttataggagagagattgttcttactgtagtttatttctgttttggtaatttcaacacgcaagtgtacgtgtcgtaacaagtagtagactcactaagagtaaggtcgatcccacagggattgtagttaaatactataaaattaaacttttacttctatttagttgaataaaattaagagagaaaatataattagaaaaaaaaaaataggaaacaaataaataaataaaggaaattaacatttaataaaaactaaagttttcgatttcaattgtatctattgattatggtctaatgtgattatcttcctattatcaatttctataaaatagttggtttgctaaggtaatttatagtcctcttagatatatacagcttaattatatacaaattttctactctcgtgataaattaaacatgtatcagacatttaacacagaacccctataagctatctaaaccatataggtactctcgt

SEQ ID NO: 112719 - DNA, 2238 bp, Cannabis sativa
ggttataagatttagatattgtgtatactatatgtatgtagaccttatagcgttcttttaaacgttaataatatgaatatgttgtaataatcatacgagattttgttctaatctggatggttatgagtttgtcctctatctttctccgtttgaaacgaaagaaacttttataaatttgtgattttggttcaatgggattacactttcagaaaagaaatttatgtatatatccactctagacattacatggccaataatttgtaaatgaatgttctgagccttgtggggaattcttgttttatttaggtatgtttgagtctaggataattctttctgggattttgtgaaataacggtattgatgttgaggaagtgtttggtgagattgagaaacttttctccaaataaaatctaatttatggtgtttctaagcaatttgaactggagttattttaagtatttatagtgtcaaataagtgacctttgcatgcactgtggaacaatgttgtgttgttgttgattggagagataatttgtagttgtttcaaattttattcagcatttgaatagtagaagcaaaataggtaatgcttcattaaatagttattaattattaatctgtttagaaaagttttgaaccaaaatggacaatacttcattgaatagctaccaactaataacctgtttagagaagatgttaacaattatgatttatttcatttgcatctcttctgcattatgttaggatcccacattaactacgggattggttggtggtatataattacttgggcaccctcttttcttaggctagcttttgggagtgagttctacccaagtggttgcatcacgttgttgttagtatttgacaggtttctgttaaaattgacagagttttaaaaagactctgttaagccacaagacattttgttaaataggcatttattttataggttagtgatgtattgtcttttcatttgtattctattattttctctattttcatgttttttcgcttgaaattatttaataagagaacaatcaaggaaagagtttcaacatttgatccacaattcgctctaatgggtgtcattgactttgtttctggtttaatttcttttgtaaaaaaataaaactaggtgagaggctcatttcaatggctttcctcagaggtgcaagacgttctcttggccctattctctataatagggtgttcactagtagtggcagtactagtactacttttgccacttctcggcataagttttctacttgggctttcactaaaagaggttctcttgatgaatccacacaaaccaagatctcaattcctgcctgttattcatctggctctgtcatctccctcagaagattcagtgtgggagcttctagtgctgaccaaatgagtctcatcaagcaactcagggagaggactagtgctcccattaaagatgttaaagcttctctcattgagtgcaattgggacattggtctgaattcttctggctaatgtttttttttttgcttatttttcttgtcttaattggctgaccaagaccatcaatgcagaggctgctcagaaggacttgaggaaaagaggaaaggtactggcatcgaaaaagtcatctcgcactgccacagagggaatgttggcattggcgcagaatgggaacagagctgctcttattgaactcaactgtgagactgactttgttgctagaaatgaaatatttcaacacttggttagtgtaactaataccaacccttttatagttgccattacctatattgatttgattctcattgtacttttaattaattataattacaatgagtgcctttgtggatatttttaatttttgaaatacttggtttagttttatccgtatgattattagaatttggaaagaactataaatccatgtgttcttcaggttcacaagtgtattctcattctaatgttgctgtaggcttcagctttggcaaagcaagctttgatttctaacagctcttccgagcaagcttctggtatccttccagttagacctgactatttggaggtaattctaacattgtgctctatttttgaattccttttatttactgtttgctttttatttaagaagtcttaaaaattttcagatcttattatatcttttttttgaaaagagaaaggatccaacagtctacaggatccttccaaaattatattaagaagcctcacttatggcggaggaaa

SEQ ID NO: 112720 - DNA, 4604 bp, Cannabis sativa
tttttcttccccttatctttttctagatttgagggtccatccccagggtggttaaacttccttatttgcagaactctggagttgaggttctcccttgttgccaagccttgcagctctaagagggtttcttgtatttgacttgtggcttcctcttgtttcgccaactttgcttattggtgaaagactatttgtctcaaccttacaacttttgggtcctccttgtaaaactccttatattctttgttgtagtttttgtcgtagtcgtccctttgatcctcatctaggccttcttggttgtcctcatcaagggaagttttgtcaacatgcttttttcggttgatggcctttctgaggtagcaactgactactttcgatgcttcaccgtctcctacaacgtctgcctaagcagtagcgtcttctttattgttgcgagcagttggtttcgtgatcacagttttggttgtaaccatcgttgtaaatgacaacaatggtagtaactttcttgaactctcgatgaaagcactaaaatatttaccaaaatttttagaaactaaattaaaaaatagattgagctacaagaaatttaattagaagtaaagaagacaaatatttttacgtgattgggacgttaatgagccttagtcaacgagtcaatattattaagctctttggctatggagtattttacacaagagtgttcttgccaaattttttaaccctttgcatgaaggtgaagagccttatttataggtcatatttaggttcttaggtggaccgggtttacatgtgtaaaataattccactgatggggtaatatattataatattaacattgggtcgagtatgtgaggcccaattaagagggtgtatgtcgtccatacagattcgtactattggacgtggacagttgggtacacgccagtgatcgtgaatagtgaatgtcagagtagtagacattggacaaaaaagtggttttcattttttattgtgcgcctttccaaagtttgacacaagggacaaacccctgattcttcaagatttggtgtcaaaagtgagttatgtcggattggtcccggacggtcaatactctgcgacaccctctcaactactcattcaggatgactcctgagggcatctggttgcattcatttgagcattcatttatttgaacaagtatcattcttctaaatcccataagtccagcttcaccatggtagagagatagttaaatctggagccacggtccagctatgctcatggttgactctggatcctacttcaactttgttcatggactaggtcgttaatctatttgggcttagcgaatgggcccataagctgacttgaaatgatacatgtttactcgtgtcatgttcccaaaaatataaacaataggtagcttaaaattattaagtagactttcgtactgcaattacacctaggggtgttcacctaatccaatccgcactatttttctcatagtgcatctaatccacactaagtgcagattttatattttggatctaatccaatccgtacaatagctcaaattcaatccaatcaaatttgcaaaaatagggattggatcgattactttttattattaagttttttaatatttaataaatattttttaacataattaacaataaaacaaaataaactattgttcttttatgtttccaacaataaattaaaataaataaaataataaatcaaaataagaaaaaaatcgtatgtaaaaagaaatgattaattttgttttaaattatacttttctcatatataataatggaatacaaatttaatatattaaattttaaaatatatttatatcatatatatatatattagattctcaaattattattgttttccattaaaatattcattgcatatataatttttttaaaatagataaatatgttgaatcggtaatttttaatgtggtttttacaccacgtattaaaagttttaactttgttacttttttactatgggacagaattttttcaaaaatactgtatttttgttcaaaaatattgtgtaagttttatattgtgtactgtgttaagctttcactgttattccacatttgttttttagttgttccactattattttaattgttctaatttgttgttttacagttgttttataaaaaagtatttttataaaaaaagtatttttagtaaacttttactaaaaatttagtatttttgtaaaagctcatttttacatatcaatcaacattcaatcagtacaagtacgaattttgaatttttcaatccaatctaatccgcacaagtgtgaatatctaccattttcgaattaaattagattagatcattatattttataaacactcttaattacacttataatacataatgcagggccacataaataaattattttataaatgaacaaaatacaaataaagtgaatatttgcaaagaattgtataattgggaagaattttcgcataaaaaaaatgtgaacaaaactctgaaaaacctatttattcctcatatattttcagttaccattgatatttgttaacaaatgtaagacttttattgaagtgcgtgataaaattggagacttgcaattgcaactatgctgacattttactaagaacttgatattttctttctgactagtcattgagccgccagtgatttttcatattcttccaagttccaacttgtaaatagttctcattttgagacttaatctttcgtttacatcatagtttttatgctttttcatattatagactttaatatgaatctatcgtaatacatatctgtattgtttaggataggatagaatagagcagttgtgtgattgtgtcttctccctagtcaaaattgatgatcccctaatatggcattatcctaagacatatatgtattgtttaggatagagctgtaattgtgtctctcctacttgaagcttgtattgggcctttatttaaaaatatttgatattttcaaaaatcagtaaaacaaaacatttttttgagattcccgagttgggtaggccttaagtgcaggcctaaaccgtgatagtccaagaccagcttgccactaagtagacttgtatctaccaacgacaatatatacaaggacgaatcctcgataaaaaataatagctagagagagttctaagtgatcatttcatggctcattcttagttttaaattgattgtcaacattgtttcgttatgcttccctatccaagatttgctgctctatttgattttcaggtgttgttgttagatgatgcaaatttatgctcaggaattaacaaagaatcgtataattcatccatagaaagttcatcaatattgtgagcttatattatacaccaaatgacataattaaattttggtatcatggttgaaggatcttatcacctatattatagtgatatccaccatcttgtttaattataatgagaaaattattgctttaattttagagggcgaaaaaaacacggttcctatactctaagatgattatcttaaagaataggtcacaaatcgtgatgatattactcttaagagttaagtccaaacaatcacaacaagtaaggatgttcaccaaaccgtctacatcgcactgcacaaactgcctgcactgcactataccacataaaaaatacggtttgaaattctttacagtggtttgtggttttgaatttaataattgcgattcaaaccgtgccgcactatatgttacgaagttatgaatttttacaatattttttttattttattttcatataagaataaatatatataatatatgtgtatatcacatatttttttagagacaattgacttaatgattagtatatatgttatgtttttaaaattttaatacttttttttgtattgttaaaaatttattagattgattttgaattttcattataatgtttgataataatgatagtgtaaaccacttaaactgcactgcaccataccgcatttccacggtgtagttttttgcggttttaagattttgcggtgcgattgcgatttgaaaaattacaaaaattacatatgcaatttgatttgaaaaaaaaaagttacaactagcaccacccgcaccgcgaacacccttaacaaccagtggtgtagccaaattttttaatttctttttgttataacaaaaaagttaaataaaagagaaaaagaagtagtgagaaaatgtaaattgactagagaaagtaaaaaaaaagtatgttaattgaaataacaaaaaaatgttatttcggtaaataatttggacgaatgcatgtaaaaagagaagagctagataacaagaaaagaaacaagaagagagaacagagtaatgaaatatatgccttactctgccttactcaacagggtaggcaattgtctttatttatatattgagtccttcacaaccaaaagccaagaatacaataacaaagagagtataactaaaataactagctaacccaatagaacaacaacagttaggtagtttaggtgacatcactaaaaaatttgttgatacctctgttgggttttatgccttaaataaaactctatttcaatgtaatccaga

SEQ ID NO: 112721 - DNA, 6662 bp, Cannabis sativa
  modified_base (58)..(62): a, c, t, g, unknown or other
  modified_base (719)..(726): a, c, t, g, unknown or other
  modified_base (1222)..(1240): a, c, t, g, unknown or other
  modified_base (6624)..(6628): a, c, t, g, unknown or other
aaataaaatcaaaaaaattataaaaatttttaaaattccgtgaaactgtatttttgtnnnnntttttattatttttgtgtattttaaaaataatcccgaattattgagacagttacattaaagaatttttatttaatattagccgtatttgcggcgaatttttttaatatttatgattgttatatatataattttaattaaaaaaaatggcagtaatatttttttagattttgttgcaacaatacccttttaattgttaaatgttacataaaacacaagtgtcaatatattattatactacatgtgaaatacttaattattatcatttttaattttttttttaaataagattaattgataaacaaaataaattataaataataaataattttgtaaaagaaatgtaaattctctctcttctttttcgtcgatgatttttcataaatattaagagaattttactgtaaatatcacattttattattaattatttttgtatcaaatagtctttcctatactttaatatgtgtataaaattatgcttataaattatcattcacgtcatatttctattaaataaaattaaaaagaaatccttcaatctaataattttaatagttcaaaaaaaattttaacgatttataaatccaaaaaacataatttaaaaaatgtcaaattttgaaagcgaaaatactaagtagtaataataataataatannnnnnnnaataataataataataatatgttacttttaatatttttttttatgttttttaaatatttttactatttgcaattttaaaatcgtatagtgcagtcgcggtttggtttaaaaaaataaactaaacctgtcgcaaataccaaataaagatttgattcagacaaataaattaaatatcaaaaagtgattcaaccaaataaaaaacaaatactcttaatgaatacaaatatatcatatttatttctttttctcttattaagtacaaacaaatgcatctatacctagtaggaacaagaaaaagaaatcttttaaatttatataacctcccttgagtggattcttttgtgacatgttatttttctcttcataaaagcaaagcatgttttcatatctttctgactaattaggatttctgtctcttaaacttccacatgtatcaaattatgtccctgaactattttagtcattaaaaattcgcctgaactattgagattgttannnnnnnnnnnnnnnnnnnaatttcattcaattttactaatttcataattgtccatgtactaaatcatgctccccaaatttaaatatctactaaatcatatccatcgaatttgacatgtaccaaatcatatccctaaactttcatccatattaaactttcttcactaaatttaaacaaaaacccttaaattcgcaatctcaataattcaagaaaaattttaacgaccttaaaaatttgagggacaaaaattctaattagccaatcttcccttttaaaccttttctaaatgatctcatttgtgtattttaactcatgtgttcttctctcaaagtggcaataaaatgttatgtcatcatatattattcatttgttgtattactaattcacacaacaaagaaataaaacatacaaagatttgaacaaaaaaaattatgtacttactactattcagcatgaggaataacaaaaaattgtttatgaacaaacttcttttctctactaaattatgtgaaacaactacatcttgtgatactaaagacaactattttctagtaatcaaacacaagaaaagacattattttgaagataaaaatgtggggtgaagctggaatattcagctatgttgttattagatcagattcagtaataaactaagacactaaagctaagttgttggttgattttttcattctcaatctgttgaatcttccccattttctgaatccaaatccaatgggacttgaccactgtattgttgcacaaccaaaactgatgctgctgtagagaaatctggtgaagtcaatagactaccaacaggccccagttcaggacactcactcctcttgttcaaagccaaggctacttcaccaactggatttcggccaaccaaatacagattacagttgccaatttcgcgaatggcagcaatgacttgttctgtgttttgaactagtttctcttcgtatttgattgagttgtcattggccaccttagtcttcttaaacttggccaagacatcgttgtccagtgaaatcaactcggtgtttgagttactttccacattaacaatggcaacatcccctgcaatgtttggttccactagaaagcggatgaccattagtctaatgcccgggtgttcggccattctgcagccataagcaagggcttccctgtcatcttggccaccaaagaagagaactgtgacgaaacatgacacattacttgcagccacatggctatttccaccgagccctcgatcaacaaagattccaaccgagcaaggtgcatgctcgagtacccttctgttaacccaacgaaaatcacttcttgtaacttctaatgagccatccaacctttggtgcttgtggaaaggaaggataacgattgcagcccttttcgcctcagcagttgaacaaacatcctcatgcatatttgacatggaagagattgatgtcattggcttaaccgacacccttcctagttgtcggtaagtctcaaatgccacaacaacattcccagagtctgaacgattgcccttgtgccaaaagggcaatccgtttcttcgtgctttgtgcaccatcagaatagctgatgacctctcggaaagctccatgaggtgaagtgcataaacagaaagttcttctctcttttcggttcctcttgaggcctcaagcaggttaagcaatgatgcaatgtttcttgtactatggaaacaagccaatatcctaagttgggtgtttggattttctctttcaactgttctatgcttgtaattagcaagtattgccctttttgctggcttatacactgcaatgacaacaggtgtggtgatgaatgtagtaaacacagccattagtaccataatggaaaatgtttgatcatttaaaacctgcaaagttaagaaacataatgtcaatatttagttacaaaaatagtatctatattcaaaaaggcaaagaatcaaaaacttacatttctgtctttaccaatgttaagaacaatgagttccaccaaccctttagtgctcattagaaacccgagtgttacagcttcacgaaaaggaactttgcagaaaagggacaccacaacagttccaactatcttcccaaaacaagctgtgaaggtgactagaccgaaaagaccccacgattggagcccccgaatggtggctatattggtcttcaaaccacttgaaacaaaatatagaggtagaaacagaccggacacaagatcctctactttctcaacgagagctcctgcgagtggactgtcattcgggacaagtattccaatgacaaaggcaccgaacatggcatgaattcctatagtatcggttataaatccagcagccaagacagcagctagtgttgcacatatgtacacctcatctactggctcgccttcatgacatctcaatgtcatccatttgaagattggaggggcaatgagaacacaacaaattacaaaaacgcatccagatagaaacacccataaggagataagaggcgattgaccagccccagatagagcaacagcaagagcaagtagaatccaagcagctacatcgttgactgctgcagctgacatagccatcctaccaatatcagtagttaagagtttcaactcagctagaatacgagctaagacagggaaggcggttattgaaagggctactcccatgaatactagaaatgcagcactgtttacatctttagatatggtttctttaagtacaaaagaggaaccgattcctaatccaaatgggaggctaattcctgccatggcaatcatcaaggcttttttcccagttcgacgaatggatttaggatctaattctaggcctgctaagaagagaaagaacaaaagaccaagatttgctagagtttctaacacagtaagactttttggtggaaaaatatagttaatatacttttcattccttcctagtgctgatggccccagtaaaattcctccctgaaatatgacaacatataaggtaaaacaactcaaaatacaatctttttactagaggtaagtgttcttagttttcataggcaataaaaacagctatattacattttaagcaagaacaagaacaagaacaagaacaagagcgcgaaacaacttacgatgatctcagcaatcacacgaggttgtcttaacggcttcataaggaatgctagaactcgagtgacaacaagtactaaacatatctgtaaaatagctagaggaagtgcaaaatgaagaggatcatctccttgaaatgcaccatttgatgtagctttcataggaccgggacaaaggtgtcctaccccattagtaatgttggtaaccattttaggaagatcaagttctttatgacaaaaccaacttcagttaagatcattcaacacaagggtggctatctgaaatagacttcagttctacaatatattcaacataacagaaaaatatatgattacttaacttatcaactgaaatcaaaggtttgaaagaaacacaatcaacaattccaataataaacaataaccaatggttgtaaaatcaggatccaaacaagtcattatacatgtttaatcttatccacacgagcaaaaaacatacaataatttgataggaacaaaatcaaaattcctcactcaaaacccaatttgaatctatctctttacacttaacacaaacactttccatacaagtttcattaagtggtacattttatactattacattagaatttacaacagtgaaagaatctttaactattcacaacaacaaagacgttaaagaaagaaaaatatgggaagtcaaccagagaagaaaagcaatagaacaaatccaacaaaaaccatagacaatggttgaaaaagcttacctttacaaatgggtctgtgttgttttgattgaaacaaacttaaatcgcttagaatcagagctatgaatataaaccgactgaaaaaacagagcaaaaataaataaaaatacaaacttgaagatgaagtgaatgacaggctttatgtaagtgtgagaaaaataaagattgtatttttaaccttaaaaagaaaaaaagattgaaactttggcaaattggctttactcctattccaaatgtagttagaaaattttggaaagaaaagtaaaaaagattgaaactttattcctaatgtagttagaaatttttgaaaagaataaaaataatacatttactatggatcactcttgattttatttactatttaatttaaatttaaaaataataaatataataataataatcttctacttctggtcaatgctgtcgacattaataataaatatactaacaaaagtcaaacaattccacttccaatttgtttgtatataattttggagacttttatttaaaattattttaggattttatttattgtttttgatttgtataaaagatatatttttaatttatattcgtattccctttattttttttttagtaatgatatatgtaatgacatatcattaatctttttcttacttagcgttcttaaaaaatacaaatttagaataaaaatattttaaatatcaaaataaatatctatatgtgcaattttattaatgtaaaaataaatacctatattattttaaacacaaaaagaaatatatatatatatatatgtataaaatatgaataaattataaaaatcaactaattttttttttttaatttttctaatattaggttgccaatataaatttttaaagtgtagtatattgactcatatatatttttagtaattaaataaatattatgtgtgtgattgaacacgacaagatttttatagaatagagtcaagaaaattaggtacgagtcaaaaattagttaacacgactaatgcaaaataaaaataggtcaaatatgacacgattcacttaatacggactttacacattttatacgtttttttttaataaaattaaaaaatattgatatgtaaataataataacaatatagctatgtaaaactacgacaagactcaaatacaaaataaaaataagtcaaatacgacacggttcacttaacacagatttaaaacattaatatttttttttaataaaacaaaaaatatatatattaatgataatatagctatattatataaaactatatatacagtgatataatgttaagttaaaaaaatttaaaactaaaaaaattaaaaatatattaaaaaatgtttttattatacatattaaaaaattatacatacatatgtataaattttttaatggactttaaattttttttttttttgtacaacttcaacttttataataatagtaaaaagggtgtgggtcaacacaaatatagtgtgtttttatatagggctatttacaaaaatatgggaaaataaatataagttttgannnnnatggcataaaaacttaattacactaaatatggca

SEQ ID NO: 112722 - DNA, 3096 bp, Cannabis sativa
  modified_base (76)..(80): a, c, t, g, unknown or other
  modified_base (278)..(281): a, c, t, g, unknown or other
cctatttgtactatttcagaaaattcagggtctattttgtcatttaacaaaatacagggtccaattggtaactttnnnnnaacagagggtccaaaatggtatttccttttgatagtattttataaaacacaagaaaataacaaaaaaattacatgaaagtaacatcaaaacaacataaaaagtaatatacaaataacaaaaattaacaacaaaataacaagattacaacataaaaatacataaaagaccatattttatgtaaataaaatcataaaaannnnaaaaatattaaaaattctgtacagactatatttatataattttttttgttgtttttatatattttgaaattatcacaaaaattaatttctattgggggctttttttttcttttcttctataagctttgataaaaagagacatttacacaacacacttaaaaatagttttattttaagattttttttctttatagctttttacttgtttatttatttatttttttttgaaagaaaaatgtttctttcatgatgctttcatgttgtagcaacgccaaaataatattgttctaaaataacaaaagaaaaaacaacatttcgtattaatcataataaaaaaacaacactgtaattttgtaaaaaataaatatctataaaaaaatgtaaaaaaaaaaaaaaaaaaaccaataaatctgtaaaaatgtaatttttttgtcatttttatatatttatcaaaaatccctaaattatgtattttagtgagacaaaaaaaaatgggccctagatctttatcaaacaaaaaagaaatgggctataggtgtgggccaatccgtcttagctcagcctcgattattcatggtaaaggaaaatgggggaaatcatgtatagctagggcctaggggtgttatgatttttttgtcaatttaaactgaaaaactaatattcagccaaaaaaaaattaataaaaaaataataaaaaaatgtaatcgaatcatttttctaatttgcctggttatatattaggctgattggaaatcaatactcatgctcattatttctattcccattcttatatattatttatttgctcccaactaatataaatcttatagttaaatataaaaaaaacaattgaggtcatacggggatatgatagtacatgagtgagtaccgaaaatttattgttgataatacataacatagcatttatttactactttggcagggatgataatatactatatgggatattttataaaataatgaacacgaatatttttttatattcatatatcggaatcaaatgctttccataaacagtcccttgtggtgactctgtccacttgcattagtaccagtaagaaaggttgcaaaccatgtggcagaaagttttgggatacgtttgagtgtggcgcgttccacataatatagcccaaatctaatgccgtaacccatattccactcaaagttatccatcaacgaccaaatgaaatatcccctcacattagcacccttcctaaattaaaaaaccataccacactattaataataaatgtacgtagtgtaataatgcaattatgcttgctaataaatgttattaaaagtacttgagtttcatttgatcgatgtataccttactgtgcgggctaaagcgttaagatggcctttgtgaaatttgatgcgattgagatcttggagcagcgcttgttcactctcctgtaccggcgaagcatatcctagagaaatttttaattttccacattatttattttttttatataaatataaaagaacaatccattacaactctttcttaattttccttaatttaaaaaaacgtagttgtgtggtgtgtaaattaagttgtatacggaccattctcagtaacgaacatcatcatgttataatatctgtgcttaatgtattcaacaatattctccatgcctcttggaactacaaagaagctttccattccggtctatagaagaaatgtaaataaataataataccatgaaaaaaaccaaattaaatttatacctgtaataaactatttatataatatatgtcacatacatatgataacttacaaatttggaataaattttgcattaccggttgaccaataggtataccatctcgtaatactgaggtttcgacaaagcctttaattgggtgttgagacttgggggagcaaggggtgtggatgcagtctttggcgtagaaagttgaatagtagtttaagccaatgaagtctatactgcctttcagaatctttttctcttcggttgaaatctttggcaatttcaacccaatgcactctcgcatttctacagggtaatctccatgtactaaaggatctaacgccctatatatcttatccaatcacaaatcacattcacaatatttctatatatatatggaaatatataaattaaatattggtataataattagagtataattggacaattattatattttaacttcgatcgtttcacttttaattttatgattcagataaaattaccaagcgatattgaaagccaatgctctactcgcagctagccgatcatcctcttcgtctctaagtggttcatacataaatgaagacacagaaattccaataaacccaccctgtttcctctgttgcatttgttaacataataattcccagttaatgtgcaactaccaactgaatatacaaacattaacaattaataataaaaaattctaataaatgaactgtttcaaatttcaaatcattaaagacttataaatgcacaataatggataaggtacatgatttgagtgtgtgagggcgatttgtgaaagtaatgtgattctgaaatccatccatttatatctcctactaaattcaaaatgatggtccacatgaaaatatatatatattttttggttgggaaaatggaattaaaatagctaaaattgagtgtcatattaggtactagggccacacagacggtgttcatctaatccaatctgcactattttgctcatagtacatccgattcgcactaagtgcggatttcattttttagatccaatccaatcatcacaatagctcaaatccaatcca

SEQ ID NO: 112723 - DNA, 4598 bp, Cannabis sativa
  modified_base (4021)..(4023): a, c, t, g, unknown or other
tggtaaaataattccaacacctttaacttcttctttacaacagatgaagaagaagatggagatgaagatgtgcctaaaattaattttctttttggggccaactcatttttctttgatcaacttggcttcgtaggtaatttaggaaacccagcagcaacactagtagcctttgacaaagatgaaccagacttagcctttaccctagccaccaccgaaaattcatttgaaaaagagccaacatttttaactcgagatggcaccaccactttagatggtggtgcatcgactccaagatcagaagtaatgtcatgaaacaccatcgaatgctcattggagatagagaaaaccttcttttgagccttggtcttggtggtgtgaccaacagtggccatcagagctgatgcaggtggcagtgatgtcgaaactgaagcaagaggagatgaagatggtcacacttgagatggggtaggggccttgaacgatgatcctcttccggtcttcaccatttttctctgaaactcaaaacacactcacacacgatttagtgagagaaacacaatgaagaagaagaaattgtgtggagtaggtgaaaaatatttataagacaagatatttccctttttgaaataaaattaccattaagcagttttctttttctatttgaaccaaaaaagaaaactaaaacacaacacctcatatgatcagcaaagaagttaccccctttttaaaaaatttatttgcaactaaaaagggaaacaagaaattttttttttttttttaaattcaaaaaagagaaataaatccacaaaaatagggtctattaaaccctacacgatcagctcaaagaaacttccccttttaaaaaaaatccaagatataaaagacaacgaagacaactaattgatgacaaatatcaaacatttcataaaagataagttaacaaaaataaataccttgatgacgaaaattttaaaataaataaataaaatgccaatttttatcaagtgctactattaatttagcctttcttgaaaattccttgaattttctttttttcttaaatgataaacgagaatgacataacccccccaaaaaatacctatgatcaatgtgcattaccctgtaaaagaaataagacaagcaaaatgaaaatagatgttagtctatgataaaaataagacacttgtaatatttgaaaaattagaaagaatattctagagaaataaagcacaatctaatcataaaaacatatattttttttttttaagaaaatcaaccaacatgtaagagtgtaacaaacaattttttttaataaattgtgtagtatttttcttacaagattttaagcatatgtatgtgatagtgtatgcaagggagcattgcccattttacaatctttttctaaatgtaaaaattatcacccatcaagatgtcgtcacattagcccttttcttaaaaaaagaatagagggagggagccatagcgctcccatgaggcacaatcacacacacctactctttcttgttaagaagactacctattttgtagttgaattgctcctaagtgactagctttggtataatggggatatattacaaggggaaaaggttgagaaatttggttctcaaagaggctatagaagcattattatactttctataaataatattttacataatttatagaatagtttaaatatatacatgtatatattaatattctttgaagttgtgaaaaaactctctcataataaatgtgggagtattacaaattatttatttattcacaaaatataattatttaagatacctaagtaaatatttatctcacaaataataattattttagataactaagatatttttattagctccctattccgttgatgatgtgaaaagggttgtgttttcaattccaggaataaagcgtcgaggccagatggttatggtagttttttctatcaagattgtcaagacactgtggggtcaagtttaagtgaatcagtgctaacttttctacattcgggtaacatcttaaaggaaattaactcaacactgataactctagtgtcaaagaacaaatatcctaaagtcgtcagtgattacatgcctattgcgtgttataacgtagtatataaagtgataaccaagttggtatgctctcggctcaaattgattcttcctcatctaatttctcaaaatcaggatgaatttgtacatggaagattcatagcatacaactttatgatttgtcaggacttggttaagcattatggaaggaaaattgtagaccaaattgtatgattaaactcgaccttaggaaagcttatgatacagtagaatgagatttcctggaacaaaatgcttaaggcactttccttttctgagtgctttactaagctcatcatgaattgtgttagaacacctcgattctctttaatgtctaatggagaaatgcatggttttttcaaagcacaaagaggattgagacagaaagatccaatttcaccgcttctttttgttctaggcatggaatatttatctcgtgttatgaagagggttgcgcaaatgaagaatttcaaatatcatgatagatgtgtggagatgagtctaaatcacttgggtttggtaaatgatatacttcttttttgtaatggtgatttcaagtctatctactacatgctgcaaggttttgagctcttctctcaatcgccggctctctttctaaatgaggagaaaactgcaatttactgtggaggtatgtggttgagcatgatgtgtagagggccttgatggtttccagatttcaatgaagtacactgccttttaggtaccttggagtaccgatttgctcatctagaatttaagctaaagagtgtgagattctaatagacaaaatggtggtaagaataagacagtggggtacaaggattctcttctttgcagggagaatcacattgatgaattcagtccttatcttgatacacacttattggagtcaaattttttttatttcgagaaaaattgtgaaggctataatttgttgatcttttctgtggcaaggacaagcatttagttcaaatgttggaagtatagcttgggaattggtttgcaaaacaaaaaggcgggtggtcttggtctgagaaatactgtagcttagaatacggctgccatgaaaaaatatgtttaggtcactgcctctaaaaaagatgatttatgggttaaatggatacataatgtgtacataaaaaatgaagattggtgggactactctgcacctatgcagagtagttggtactggaaaaaagtagtggttgtcaaggatgtttttcgatatttaatggagcaacatcatcgttagatagagcactacaacattcgagatggataccgtttgatacgcccaaaaaataaagatttaaatggattaatgtggtacggaatagatttaattgtccaaaatatgctgttatttcttggttgactgttcaaaattggctaaaaactttagatagactactcaaatttaatatagtgcatgactcgacttgtctgttatatggtttagaagctgaaaatataaaccacttattttttaattgtaatgtgattatgacatgtttaagggcatatatggaatgggtggaatggtacacttgttctagcactcttgttgcgatttatataactcggtccaaaatgagtaaatttagaatgacttgtttttcaacaattttgacttctttagtttaccatttgtggagaactcagaatgaagttttgtgatcttaaaaattaacaagattaagtattcttgtaaaaagaatcattgaaattgttaaaagtagaattctattaatttggcctaaatatgttagtaggagagatagaatttggtttgaaaatcttatgttaaagtaaggttttggtatagattttcagacttttttaaaggtgtcgctagtttgtaaattagtttggtttattgtaatacacttttaattgttgggattttatgcccnnnataaaactcatttcaatattatctgatttattatcaatagaagattaaaagtcatttatgtttacatgtagttttcatgtttatggtttaatgtatacaatttcttttaagtccagaacatatagttattcacaattacagttatgtcaacacagtggaaggtaattgtgattatatgcttcaaaagataatgtctcatgattcatcactgtactgggtttacactgatgtgatagtcagcaataaagcttacttacaccttaaatacgtgttatgttctttccaaaatattggcaaagtatgctattatcggatgtatggagtatacattggattgtgaccgatattgatcttagtaaagatattgtaatcttaccgttgtatctttctaaatcaatatcactggttgatcttaaatcaaaagatcttaatcctgacattaggggtgttcataggatcacatccaatggatttggatctatccgatccaatccaattatttattggatattggatttcgccatccgatctaatctaattgaattgagtcatccgatccgatccgatccaatgga

SEQ ID NO: 112724 - DNA, 1522 bp, Cannabis sativa
gaagtggttgcgtaaaataattatgtaataaaatatcaatttatcttcgctattgttaagatattgaactttcgttatcactagctagttttctgtttctctttcaattaagataaaattacataatttgttagccagtttaagggttacatcaagttaactaattgatagattaattggggatcatcaattatcgctttgagccttataagtacattacgcaatcttcttgtcccacataatgtacatttatgatttaagtgaagtctctatctactattcaataagcataaaggacatgccactatcctttgttttttctctgtgtaacgatccatattcctagtcattgtatatcatgaaatcatcaaatagtgacctcacaccaattacttcacaatttaggtaataaatgattgagaagaaacccagtagtgtccgtcttaatttatattatggtgacattaattaattgaagaatgacattaactaagacagctaacacataaattaataatgaaaaattaacatgaaagtttatttaatcccattgttctcacttcacatgtgcaatttaatttattattttgttttctcttcaattgacataaattacgaattgaagcttttattaattaattaaaattaaaattattacagtggcacactttggaacgaaccaaaggcaaagagctgtaaaggagagacactgccgttgaggggttcaacgtacccgggtggtctgccaccggctctgtttgtggtaaaggacgtgttgagcagaatgaggaagcctgtgacactgctcgacatcaccaacctgtcactcttacgtaaagatggacacccttctatctatggctttggagggcccactgccatggattgcagccattggtgtcttgctggagtccctgatacttggaacgagattctttacaatttgattctttgaagaaaaagaaaaatgcatacataaatttatcattgatcaataataataaataataatgatgatgtccttattggaatcgtattaaagcatatgatacatacaatatatataatgaaaaatctcaacatatttctcattttttaaatcatgaaaaataaggttatagtaatgaatgatgacatattttttcagcgaagtagcaatgtcgaattgagtactgatcattacagttatatgtgtatatatatttaaaaatctctttcaagtatcgaaatcattacgtgtgattttcttagtcatctagatgattgccgaaatttatggctaaaataaattagatggatgatggtcacctatatatatgctaagcaggtcgcgccactattttggactaaaattgtttttaatactcagtgaactgaatcatctacacatgtacttaaaattgtttcaagttttgcttctcttttttttttcgtcatatggaatcttcttattatttttattaacgacagctaaaattataaaggggtaagttgaaaaatgcctcttttattaatcaattaa

SEQ ID NO: 112725 - DNA, 2877 bp, Cannabis sativa
tctctatgttgatcaggcctcttgtcaaaagataacaactcaaataaacccaaaatgtatcaaattgggcaataaagaaaagcgcgcgcacaagcaaaaccgagcagggaaacaaatatcagaaacaccaaaggaacttttaatagctccttgtgatttttctagtcaaagtaagtgttctttgttaaatggtaaccaccacaccagattcatattaaaggactatataaaataaagggcaaaaacaaaaggcaatatcagctagatgaagcgaaatctaatcatacaaaaaataagtttaagactttatcccattgatgctgaacaccccagaggtttaggtattcattagaaaaagaactcgtatcattaatcaacacaatacatgaatccaggttaccccaaagtccaaatctggtttaccagtgtgaaacatctaataaaatgaatagaaggaacgatttggcagtccttctaaaagctgtatgatgttgtgtacagttccataataacacttgaaaattcattaactaacaaactactaataaaaattcacacttgcggcttgccccactacaaagttaattcaaattacaggaacaaacttatataattagattattagtaacaatttgttagaatcacatgtttcagaaacacgaggaacacctgatataatgcttactttgctgaaattttattaaaagaacaagaaaaaaacatcacgggtgtcatgaagaaaacctgtttaagaaactcatcatgccaattatcgagtgtatcgaatgacttcataacattaacatcatacaccaagacacaacaatcagctcctctataaaacgcaactccaagactctgaaatctctcttgaccagctgtatcccatatctatgaatacaaatcaaattccacatcatcaacaaaaattacccatcaaaatcaactcatcattatgaaatcaaacaaaattaaaaataccattgaattacacaaacaaaacccacttgcagagtgacgagtctgtcatcaatctggagttccttagtcacaaaatccgcacctatagtcgctttatactgttgactaaacttcttatgaacatatctaagaaatcaattcaagacccacaaaagaaaaaagaaagaaaaatcgaaaacacaaatcaaattgaatgaaattcaatccaaattcgaaatgtagaataaaaatcctaatggatccttccaatttgaaaacagttaaaataaaaaggatactgattcatcaacgacgtcttgccaaccctgacatcgaaaaacaaataaaacaattaacaaacattgcagcattttccaatcaaaccctaggagaagaagaagaagaagagattattattattacccactgtcgccgagaacgatgaccttgagcaaggttcgacgacgcgctgacatggtgaccaatgacgttgttgatggtgaaaatcacagagagaagaaaatgaaaaagttgtgaatataaatatgaaaaggcaaaattgattgattgattcgttacttttatttatttatttatttatttatttttctatctttttgtacttcttttacggttttttttaattaattaatttaatgaaaaataaaaggaaaagaaaaaaggggcgtcattttcgatcaagcttagtctcttttttagctgaaaaaatatgtctttttcaaatttaattttttttttttaaatttatgttttaagttgctttgagatttttatcccagttgttatatagattttattctattagttactataaaatttttatgtgaaattttataaaaataccaaaaaaaaaattattttaaattgtaaaaataaaaaaatcactttatttgttttattattattcatttgagaattatgttttttatttatttatttatatgggaattatttatttattgtttatcaaaaaaaaaaaagagaattctttatttatttattttgtatttttatttcctatcttaacattttttttcttaaaaaaaatcacagcctgttttaatacttaaatattatttttttttcccataaatactatgctaattaagattttttttactaagattttcccataaatattatttttttcactaatcatgatttgtctggctctgaagtatattaattgttttcctaaaaaaaaaaaagcatattgatttttagatttaagaattttgtctaattattatttatgtactaaattatgttcttatattttgatatttactaaattatgttactggaactttgaaatgtataaaatcatgctctgaatttttatctatcttagattttttttactaaaatttcacaaaatccttaaattcaacaatcttaatagttcgggtttttaatgaccttaaaaattcatgaacatgatttggtacatatcaaaattaaaagtaaaaatataaattagcttaaatactaaggtgtgtttggtattatttgttgttgtacggggaatacaattctcgtctccatctctgctatatatttatgcccccatcctcatcctcatcttatttctctctaataaccaacgaattcatgatagggaaatatctatcggttatggagaacccaacgggtattcattaaggtaaaatgaaaaaaaaaaaaaataaaaaatatataatatataatatataataatttaaaataattgaaaaaaaaaattaaatttaaattaaaagacaaatatttattatgccttcatgattcgtatatattaaaagacaaatttgccttatagtttaaaaaaaaaaaaaaaagcataacctgatagaagataaaaaatatatgtctcaaagtttgaaaaaaaaaaatccaaaa

SEQ ID NO: 112726 - DNA, 4347 bp, Cannabis sativa
taatgctaaaactactttcaatttcggtcgacattatatcgataacctatcgatatctcatcaataacattgttaaaacaaacagacaccactgatgaacatgccaaaaaaaaatccaaattcgcatacacaatctaatctgaagaacatacacaaatttgcatccaaatctatgaaaattctaattttttttataaaagaaaaaacttactcttttactggagttagtggtggcgacagtttgactccgagttctctcggtgattcgtggtcgtggtcgtggtggtcatgggtcgttgtcggtcaacgtggttctctgtgggtcgtcttcgtcgtcgtgggtcgcctgcgggaaatggagagagagagatagagagggagaaacagatgggtgattgagaacggatggggtgggtttaggcgtttggggtgggtcggttgggattcatggtatggtggagagagagaacgatgaagagagagaggaggaagagagagacatttagggagggaaaattaaataaaagggtattttgggtagtttaggaaaataatggtattattttgtacaaattagtgaagggtctaaaatttgatattaggggttttattaggggcaaaaagtaaaattttcctatgaataagagtattttgtgggtaaatcctcccaactattatttcacttatagttatgctctaagctcaaattttagtggtaaaaccatccgaactactgaaccgttaataaatttaaggtgttgtctatttaccaccgttaacagacagcatggacagttgacgtgtacaatcttatacacatggcacatttatattgatccacctaatataattatttcaaactataaaaaaattatttcaaaataaaaaaaatgcttggtgggttttaaaattattaaaaaattaaaaaaaattatttatttattttcatttttctttctttgttgaaccataatttgagttttttttttcttatgttctttctcttcttccacctaacaccaccaccatccctaccccacagtcaaaactatcaccaccacaaattaacaatagtgtgcagttaccgaggtcggtagatgaattttttgacaaaccacacgaagcttcacggggatctcaaaagcagcagatttgatcatcgagaactcccaaatctaggtgagatctctaagatctgggctagagaagaagaactcacgtagaacccaaagctcatctggcgtcctcctctgccatagttgtctttttttgtcgtactcgtacttcactatacacgaacttgaagtcgacatttgcaaaaggtaacacctagtttgtggctaacgaagaggatggagcttcaacagtttgttgctggcggggaggatggaggttcaacggtttatggctaacggtgaggatggagcttgaatttttaaaatttatatgtatatagactgtatatttaggtataaatttctagaaggtaggaagaagaagaacaaaggagttgtggtggtgagtgaagaaatttttatttttggtggatttgaatattaagttgtggtgaagaagatgaagaaggtgagcaaagaaaagtaggaacgagagagagagatagagaaagagttaggggaattattttttttttctaaaatttgtaattttttaattattttattaattttttgaacttttttatgttaagcaactagtttttattttattttttaataaatttttaaataattttttcaattttaaatgatttgttatatttttcataggtgaattaatataaatatgtcatgtgtataagattgtacacattaactgtccatgctggcagttaacggtggtaaatagacagcaccttaaatttgttaacggttcagtagttcggagggttttaccactaaaatttgagtttgaagggttaagtgcgagtaaaataatagttggagggtttagccgcaaaagactatatgaataaatacccagagaagttctatttgcccaaattagaattttaacccgaagtacatgtcaataaatgaaatgtgccaatcagttaaccttttcagttgtttactttttttttatatataagtcagctatttactctttgagattgttattggatatttgtagtgctcaatactttttataggtggtgctcaacaattggttagcgatattctctaaaagatattttcttaaattatatgggacccgatacttaattataccaataacgatatgtaccgagaaagatactaagcatgtatatttaatcaattttttttattattattatcattctctattagtatttgttttttatttttattttttagacctgtcatccatatatgtatatatcatatcaaaaatttctattagttttttgaaaaagaaaacaaggaagaatcttattgatattgaattatgagtgaactgagattacaattgcaatagtaaaggggtttatatacattgtagaggtggtcgtaccaaacaactaactaaatactaactttctataactaatataactaactgtccacttaagtttagtaggccccctcaagatggaatatatagattcttaacattcatcttggacacaatgttgtgaaagtgagttagagatagaggcttggtgaggatatcagctatgttggacttggaaggaacatggttcattttgatggtgccattattgactttctctcgtagaagtcacagtcgatttctacatattttgtgcgctcatggtagacagagttctttgaaatgtgtattgttgcattgttgtcgtagaaaaatgtggatggaagccttgtttggatgtcgaagtcatgaagtatggaatggagccaagttacttcacaagctgcattgatcattgttctgtattctacttcagcaaaagagcgagatactgtttgttattttttggactttcatgagatgagagactggccaaggaagacacaataacctaagatggattgcttagtgtccaagcatgattcccactctgcatctacaaaggcttgaaggtgtattggatcaggtgtgtggatgcatagaagaagagtccttgtccaggtgtgcctttttgatattacagtatgcaattgactgcttggaggtttgattctcttggagcttgaagatattgactcaatttgttcactaaaaaagtaatggcaggtatagttatggtgaagcatatgagtttgccagttagacttctatattgtgttgggttagctaggagttttcctatctcattgttaagcgtgttattcagctccatgggagttgatactggtttgatgcctaggcagccagtttcttgtaatagtggtaaagtgaatggcctttgtgtgacagatatgcctttgttacgtaaagctatttcaagacctgggaagaaatgtaaacttccaagatctttgagcttgaaatatgaatcaagtgtatatgtgaagtgttgcaattgttctagactgtaagttgtaactatatcatctacatagtttaatagcgcaatgaagatgcatgttttgtacctaatgaacagggagtgatcattttttgattgaatgaatttttgttgtagtaatgtggtgctgagcttggcataccaccgccttgagccctgtttcaggccataaaggctcttttgcagtttgcaaattgcattttttagaattggtcctttgggagtgtagccttgaggtaacttcatgtagacatcttcatgaagatcaccatggaggagggcattattaatgtccatatgatggagataccagtttttgattgcaacaagggcaaacaacaacttgagggtgttaaatttaactacaagggcataggttttaaaataatcaacacctttttgttgagtttagccttttgctactagccgagctttgaagcactcgacagagccatctagattgtatttgattctatagacccatttattattgatgacatgttgtcctggtggagggagacagcaatccagatttcattggcctctagtgcatctattttagtgtccattacctggttccatatatgttctttaaaagcttagtgtaacaccctaactagcataggcgtgttagcgtgatttttaacgtattgtgcagctcgttactaatcaacgaggttattggaaaacgtgaataagtaaaattttgcttctttaattaaaacataacattcacttttataaactttcgggatcccgtttacaaaatacagttacaaaagtttactacacatttacaaaatacttgtcgcctagcgacaaaacaacaaaag

SEQ ID NO: 112727 - DNA, 4568 bp, Cannabis sativa
tttttttttttataaaaaaaaggtctcgtttggtatataaatataaattaccatatttcaaacaattaaatacccaactaactggatcaaggtaaataattttgatatttacgttatgacacctaaatttcataacaagttgaatatcgtagttgagagatttgaataccaattatcacgtgctaagatttttcaaagcaaaagttaagtaaatccaaggaagtaaaaccaaacaacacaaacaaacatgtgcaatattagtagtgtagctatagtgtcacttatgggactctctctataaaatcaaaacagagattcaagtcattcttcaaaatagaaacacataataaactgatctcaaagctttgccaagagccatgcaagtactacaagtttcatggcaggccttaagtggcttccaaagcccaaaaaatctccaactgagaagcccatcaccaaagcccagattccgagtctccgccgtggccttaccaccaccaccgatgtcgccggatatagaagaagttttcaagtcactagagagctgggccacccaatcaattatcccactgctaaagccggtggaggaatcttggcagccccaagatttgttaccaagcccaacctataataatgtcgaggaggaattcttcgatcagatccgttcgattcaagatcgtgcggctgagattccagatgagtactttgttgtcttggttggagatatgatcacggaggaagcattgcctacataccagaccattatgaattctattgatgccattaaggataagactggagtttgctccagtccatgggctcggtggacccgcgcatggtccgccgaggagaatcgccatggtgacttgcttcgtacctatttatatttaacgggtcgggtcgatatgaccatggttgaacgtactatccaacacttgattggagctggcatggtaagtgtattgttatatatacgtaagattttgtttatattatagaattttaattatgtttacgtatattgctagttattttttcttttttaatgaacatattcgaaaaggttgatttaaaatgtgttagcaagtgtaaataagccacttttgtggactttcatattgagttcaaagcctactcttcctagcatttgaatagtcgaatgtggggtaaagtgttttattattatcagtaaaataactttatacaaaaaaataaatatatttatatatatatatatatatatatatcagatttcataaaatttaatttaataactaattacaccttctaagttggcaagttacatgcctttgacatttgatcagtataatcccatttttaagataatttttagtgagacaaggttagtttccaacagtaagtacgttgttaaaaaacagttgcaactatactttactgtgagaaaaaataattataattaaaatgtaagaaaaagctgccttaagtttttaataaattaaaaattttatattatgaattgttaagtaactaattataatagtaattatattatagtttaattcattataaatataaatatataccaaaaaaattatttatacagaatttttgttttttatgccaaaaaattatttatactaaaaattattatatataaaaaaactttaggttgatattacaaaatataaaactttaatttatgtggtttgcgccataaaatattttcttaaatatccaataaatataatttattattcatttaatataatataatttatttttaatattttttttaagtaatatttaataaataagtaaatatattttagtacaaataaatttattgtagagttctttaatcaaacttcataacagttttttttttttttttaaagttagattactaattttattttttagctacagttttttgataatttttcaataaactgatttttaactatttactaagtacctttaattatagtacagttaaaaaaactaaaaactgtgacaaacgaacccaaaataattaaatgctataaagaggaagaaattgttagaggaaagtactttgtagtcatattgtgttagattatgagttcattcttacttaagagaagttgtcataaatttttttgctataataaaattcttctacaaatatcatataattattttgaccggttaattaattttatttaaggctttcatttatattttgacttcggttgtaattgagttaattaagtgtccaagtacgtaccacaatcttccagacatactagaagtacatatttaattttattttaaatttaaattcgtggacacatcacagtacatttttttaataattctctactttatttacttaggccaataataacactatatatttacagaacgtaatgagatataactgatcagttgattagtttaataattattttctttgctacttttttcgatatctttaataatatttgtcttattaattccttgcttttgatcggagttggcatggtgagtacgtacgtacatatattaatttgtttgcttatattgttttacctcattaattagttagatatattgtctcgtgttattttcttatatattgttcattctatactactctttcaattcattcaatatatatttttttttttattataataattataactattttctcaagaagtgccaattaaaccatcttaaatattaaattatattcttcagtaggtttcactttcctctttttgttgtcgttaatttctagtgtttgaatgtcgtttccatagtttgaaattctttattactattttggatcaggatgcaagattcaacaacaatccatacttgttttatgtgtacacatcatttcaagaacgagccacgtttgtgtcccacggcaacacggcccgtttagcgaaaaacaacggaaacccactcttggcgcgcatttgtgggactattgcggccgatgagaagcgtcacgagattgcgtacgtaaaagtgaccgagaagctcttagaagttgacccaaataatgccatgctagcaattgaagaaatgatgaggagaaagatcacaatgccggccttccttatgtacgatggatgcgaccccatgctattccaccatttctcggctgtggctcagcgcctcggcgtctacacaactgatgactacgccaacatcttggagttcttaatcggacagtggaagttagagaagatggaagggttgaaacccgaagctcaacgagcgcaagactatgtttgtggcctggcaccgagaattaggaggctgcaagagcgagctgatgagcgcgcacggaagatggggcctcttagtgtcaagtttagttgggttttcaacaaggaggttcttctctagaaggaaaaatttattagggtttaaataaacatgaattattagtgtaataaaaaagagtgagcatttagaattgatcatgaccatgatcacgatcacgatatgatgattttacctttttttttttttttcttataattagtatgtttatctatgttgttgcttcgtatgttatattttgcttaggcaattagcgagagttcttttttctatcttttgatagtgcaataaatatggttgtaaggagttatttgaaattttttttgagtggaaacgacctaaaataaattacagcaaaaataggtaggggtcattgccattccaaatccgattgttatcttacccaatagccatttgagctaagttatgtgtttctgtattttcttgtcgtggaaagtgttgaagggaaacagtggggagtgaagataacacctgccataaagaattcacaattgctccatatgtagaaaaatgggatcgtctgtttggatgtttgagatgaggtttaagcagtatgattccacctgatgaatttcaatgtgctctctcggcaccagcataaagcttgtaataatacccatccttcagttgttttcggggtcagtccatgacggctcttagccatagcagccacgagtacttgtcctaaagagtttcaaatcaaggcgccaacatccgtttttccttccctggttgaaatagtgccatcaacattaagcttctgttttcccgtctttggaggtagccactccctacttcaatttagactatgaggggataatgaattcgttgatgttgttgagcttgctggtagaaggccaaaaaaatcctctgttttttgacaaatcctagaggattgttcctgctgattcctgaacacaaaaaaaatcatgttgttccaaatcttccaaataatacacagaaaaagtagtatatcaatgatgttttttcctctcaaatcactaagagagtgtttaaaaactgtacttgatcacaccttcttaacacccttacagtcaaataaagcatgttggccagactcacgatgcaagtcacaaagagggcaagtgtgggaagggtaactattttaaccgagtctgcaagcagtattatctcaactattgaggctaccatgggcctatataatcgagcttccaataaatatatctagaatttacaaagtaaat

SEQ ID NO: 112728 - DNA, 3597 bp, Cannabis sativa
  modified_base (1652)..(1652): a, c, t, g, unknown or other
ttttcaggttggaggttctgagattcctagtacttcctcaatcagcattggtgctgatgctgacaaggtatttttctttctttgtttactgttaattgaaagagaataaccacagaagttgatatgaaatatgttcctaacttgaaatgaattactaggagtcttctcaactcttgatttgttagctatgtcattattgattcatttgataagagttttctactatgtattatattatacacattcgatgtagtgtagctttcgaaccgggatacttaaaaaactgtgttagacttataggtttaagtattacaattgatttgtgtgtttgaatcaaacaagatgatggtagcttcgatatagttttgttgccaatgtggctacattagcatcaatgattttctatctaagaaaatttggaatggctgaacaagccaataaggaacaaaagcaaggtggttatttagaacattaaaacatcatgtatgcatgtttttgaaactaaaatatggattgtaagctaaagtgtctgtttcacaggttgcgccgaagcaaaaaatcaggattaaactgaggtcatattgggtgccattgatagaggactcttgtaagcagataatggatgctgcaagaaattcaaatgcgaaaactgttggaccagtgcccttaccaaccaaaaagcggatttactgtgttctaaaatcccctcacgttcacaaggatgcaagattccatttcgaaattcgtactcaccagcgcctcattgatattctttacccaactgcacaaacaatagattctttgatgcaacttgatctccctgccggggttgatgtggaggtcaagctatgataaagtggagctgacaccgcttaggtaaaatattatcgcaagtactgtttctcattttgttctaatttaggttacatgatgttcttgtcatatccatatatacttacagcaactttatgaattgatctttgaagtgttaggtgttggaagtcttctctttcgactgagaacggtttattttgttgaggggtgaccgtggctagaacaaaagtttgtacaaaccagttcccatcttctctttcagaaatctctctgctttttttgatgtcttgttaggcaacattttatgtgaacacaacactgcctgccaatatgaggaaatgtcttatagtgtgtccacagtagttttttacatatatgtatgctttgtattttctgttgattttcattttgatggatatgacaacatatcataaccagttctcttatattaaaatctagaccttattcagttcaattgatttttgtttttgtttcatattcattttctttggggccaagaaaactaataagcattatgattatagctctctctagcttcttaatcctcaaaaagcaaattagtacccttttcattttctaataacgagtaatttgcggctaatccttcttatgtgttcatttagcaaatttaaggcttctgtccaatttttgttgtgtcatgccaatcttttgataacaaataataggctcgtttagtaggtcgtataaggatcacattgtattaaataatacataacactatgtttagataaaataatgtattgtattaattattttttaatacaatgtaagttgtnttatttaatacataataaataattcgtattaatttgtattataatatttacaaaagatccgagatcaacctcaatcttcgatctagatctagggactcaggacccgaactcgagactcggcccgtagtcagtgttgggatcgagtttattgagaatatattataattttacacaaagttaataccaaacatagtattatattaaataatattaatacaatctaacacaatacaatacaacataccaaatgagcctaatatgttttatattacataccactttgatcccatattccttcttttctctacaacttaactggattcaatctttctaattgtacattaaataacttcttcattttcctttcaaactcttatctttgttcaaaacaattctggtagaggtgaaaaaaggaaggcaaaattaagagagaaaataggaaagaataggtgaaaattttgattgtttggtaaagtagagaaatagaaagagaggaaaatatgatggaaaacaaagagtgggacccatctaagtttcatgccttctaaataattaacatttttgttttctaaatttacaatgtacttttaaaaatataccatgttaaaagttttcataaaaagggaatataaaatggaatttaattgaagaggtgtgattatgtaattgttattatgtttttgagaaaaagataattaacatgttgcaagtgtgaagaaagaaaaaagggaatgctcctactcaactctctacggattaatcttaactaaaatacgattagaaaaaaattagttttttatttgaacattttaactattttaactataatttaacaaaaaaatattcttgatcaactgagaaaacgaattatctatttaagttcattaacaaataattaatattataacaagtactctttattaattgtgtagtcctatatctacacattctcagaaatatgtaagattgtacagcttatccaatatttctttttacgaattacgagactcttgactgttagattctccctctccttctctctcaagcttagaaactcccataactacctttgaccaaaccctattttggtcattgtagactgtttttcttcatttttttttccttcaaaacttggcccttacgctcccactttagctgcatgtgatgcatattaattggagtatgtactttcacaattatggtatttggtgaatggaaatcctcactcaataatagaggaaatataatatatatagatatatatcttgtaatcattctatggtacttgagagtggagatttttttgctactaccatggggagtgtaactaacctaatcactatcccaatttctattatttgagtttatatatattttaataaaaaagacataagatggagatatgaacaaatttggtatttgcttctagaaaaaattgatttatatataatatattaatatatataccttaatatattagaatatggggaatctagaaaagtactcctcatcctcttaatcaagttatcactttttgaaagtgtcttttattatatattttcaacatcaatataatacggaaaaattttacactgcactatttaaagttttatcatatattttttatttattttagtatttagaagaattttattaaagtatgtttatatatttttaatgaatacattataattatattatagttatttaaaatattaggctaaattttgaaaaatgaaaaaaaaaaatcaatacatcgaaaataaggtttaaacagtttattttaacgtgcaataaactatttgaaccctactttttccatgttaaattttttcaaatcttttaaaattttacagcgtaaataactataacgtgaaagattataaaaataaataaggggaattacctcatatactatttttttaactttttttttttcaaattt

SEQ ID NO: 112729 - DNA, 4668 bp, Cannabis sativa
aagttcatatttagggtgttaagcaacatacttgtgagtagatctaagatcctgataaaataattccaacagatttaatagtttcaaaagcttgtttgagagcaaaaatgatcaaaactatttggcctaaatagatgttatgttgtaattgtgagggcttggttccaattgtttagtgattaagtttagtttagattaatagggacataaagattcttcagttttattttttacttatcatatatgaattattattaatgaacagttagtccttgaaaatggactccacacatgaccttctattccatatattatgtcatcgatcatactttatagtagagtcattatagattttagttaaatatattatgcttattacttgctcttaaattgaaaaatttcttcgtagaagtatcatatgtacaaacaccattccatagttcaattaattcatctattaatggctccaaataaacatctatatcatttcaagattgttttggtctaggaatcacaatcgatagaaaggtaaactcatcctgcatgcataatgaaggtgataaattgtatacaacaagcattactagccaacaactatatgaagaactcatacttttgtaagggttaatgctatcagtagcaagtcctaatcaaaggttgttagattcgagtgaaaaatctagccatctctcattgattgcatcccaagcctctgaatcaactgggtggcacatttttccattcgtgcttattagtaaaatgccactatagatctaaggatgtctccttggatctaaacatcctttgaagccttgggataattggaaaatatctcaataattttgcaggttgacccggtaaaatatcatgtgtgctcattttgtttccatcttggagaattacacttgccacattcttgggcatcaacattttctttgataaacaaacaacaatcattaacacaagcatggacatgcttatagttaagattgaacctctttaaaagcttattaactgcatactcagatgtcagaagttgattatcttctggcaacatatctttgaagatctccaacatctttatgaagccaacatctgagaattcgtgctttgttttcagattatacaggccaacaatcgaagagagtttagtgtattttgagtaactttcatacaatggtgattctacatctgccaattgcctaatgaaatcttcatctaaatcatcggcattagatgaatatacttcgtcaacattagctgaatatacttcgtcaatttgaaatgcgtcatatgaagtcccaacattgatcgtgctattttgatgtagatcttctccatgatggaaccatattctgtaagttttgtccatgccatacaatactaagtgtccaacaacttaatttgaaacttgatgtcttagattttggcatttgttgcatggacaaaggatcttttttggaaaactagcatttattattgcagtcttcacaaaatttatagttccttcctcatactcctttgtagttttacaattgttagaacatattacagtaattaagtcttgagacttgaagtcaaactcaaatcctaaattgtatatttctacttgctaacatgttgtgatggatccaagttttatccatctgcactatacaacaaacttttgatttggacaagagccaaactctattcataagcaaaatcataagcttaagaatatatttgggtaagagccaaactctcacatttataagatttgttttaagcgaaagaatacatgtatagaatccaaaaaagagaatggattcaaggcatacataaaaactataaaattcctctattcaatttttcatgttacttagaatttttttcctttatttcctccactcattgtttgaattctatacatgtattctcctgtattgattttattttatgaatctagtattctaaatttttcgctgtctttatgggcactcaaaaagtatattttgagcatttttttgcgttcattttaatttgcactaccagaagaatatttgtaaagtcttataatcgtgaacatatttttcttccaagatctaacaaagctcaaaaagctcagatgatactacaaaactcaaagcgcctgttgtaatctcaataaaatagatttaataataaatatcaataaaatagatttaatttgatcgtcttcatatgcataaaattttcttaacctttatttgaatataattaataacaatgtgacaaagatcaaggccaggtaatgagcagaattgttcgaagagttgtttaagaatgttatgagctagcttagaaaggataatgagcagaagaaccagcaacgccaagtagcctaagggcaaaaatatttaaggatttttttttttacaaagtcaagataaaaatttatttacaaagttgagattaattttaaaagtactaataatttctatttgaagagtaaggacttaaagttcaaatttttttataagatttgtttgtgacaaaaatgtgcatgataagttcttaaagaacaggatgtcaaaatgtgaagtttaaggtcaacaagtttggcacagcaaatacaagattaaaacagtggtcatcaaggataaaagctcttcaatagatgatgaagacatattatcattcaaaaaagacaaaaaaaattgtacgaggggcaatatccagagcttaatttagagtaacatcaagaaacgacagcaagaacagagttggataacaggacttaattaataattgttcaaaagattatccaaaattaatttgcatgccaagaaattagtgttgaactgtcagaaaaattaaatataaaaaaaaactacatggatgaagttatgatctcttgaattttaaaaaaataatgtcttacaggaaattgcatctaaaaggacttattttgtgaaaggcatgtccaagtctcaaatctgaacatcgaagtccatcaatctttgaatagttgtgttgaacgaatttctagatacagcatatgcatacaaaaaactattcttattctttgaattttcaaaaatagctcgaagatgaaaaccatcatgccaagagtctaaacgaattcaagctgctaaaagaatgaagaaaatacgggttagagcagattaagaaatagctaaggttatcaaattgaaatcaagaggaagaacagtaaggaaaatacctgcataatgttcccaccatctataagtggaggaggaatagtgaaacagacaaaatagtgagcgatttatagtaggaaaaaaagcagagcctaatccataaaaagaaaagggtcattcaaataaccttcaaaataaagaacaacatatttcaaataaagacaattattagtttgacagagcaagaacatggtacagagaataggcaagagtggtagaacttacaagaacacataaaatgaaaccaaattacaggtaaatacccatgatagtttgaaactcgtcagtgggtggaaattggtggagcttaagctcaggtttgtatgtgttatactcggtttaaaaatagtgttcgaaatctattgagatattaattgtataaaaaaatcatcatatttatttttatggatagtgagtataatttttagagtttagtaactatgtctcctaagataagtaaggttgtaatttgaaagaaccttttgcagtcttgaatcggtgagaagtgttttggaggcagagatcacaacaattatggctccatattagggataaaaatagtaagttcttccattctaaagcatcagcggtaatagtcaaatcttgagtttgaaggattccatgggaaatttgaagaactaggataacaggttaggagttgttatgcttgattacttcaacaatattttttgagctgaatcaacagattgttcagtagttctggattgtatatctcaatatggtctgtgaagaacacaatgaggagctgcttagaccaattactgatcaagaagttaaagatgcaatgttttagatgcaccccgacaaatcgccagactctgatggtatgaactaaaatttttccaaaaatattagtctattttttggagctgatgtgatacatactgtcaagaatttttttatataagtgaggagattcttgttgatttaaattcaacaaatttagtgttgatccataaaaagacgaaacttaatcaaatgagtgagttgagacctatctccctttgtaatgttattgctaaaattattactaaatttcttgctattaggatgaaagggctatcattgaaaattatttcagttaatcaaagtgcgttcattcaaggacatttaattactgataatgttatagtttctttcgagattttacactatctttaaaggaagaaagttggcaaggatgggtacatggctttgaaattggacttaagcaaagcttacaataggctcgattggcattttttgtgtgctatgttaactcggatggggttttatgacaaatggattcggctcatttttggttgtttatccacggtacagcaccatattgtgagtagtggtcatgccataggcccgattatgcccagtagagggggttaatgttgggttatgtgccctaaataaaacccatttcaatataatcatatttacttattaataaaga

SEQ ID NO: 112730 - DNA, 1980 bp, Cannabis sativa
tttgaacatataccacttaggcttcagcttgaggtctcgtacttagttcttctagttgtaaaaaaataattaaatattatttaaaaataattaattatttaaaaaattattatacaaagaagagaattctaatctatataaaaagaagtctaatttttgtaagaaaataaaattttattataaatattatctttaaatgacttaactgttaaaataattatagtaagaatttatataaataaataaattatttataaatattaattgttaaagagacattgttaaatatttaataattattttaagaaaataattaattataattaaataattctaaaaaatcatcaattgataacttattattataagtaaaaaaatataactataattgttataataaaaatgtaacgagtagtgtaaaatatattaaattattaatataatttaaacatatgacaatgattactctttaattattttaataacgcaataacccatattacattgtatcatttgtacgttcctcactttatccctatagtatgtatttataaatttatttgcttcaaattcaatattaatataattttattatacactcatttgcaattatatcatatggaagatttattatgtatgaattttgagaattaaatgagggaataacccatagcaatgatcacttttggtctattgttggattgtcggtggaagacaggctgtacatatattttctttttacatgaattatttgaaaagaagaaaaaaacacttcttcctcactttttttttcctttgttttcgtaattaattataaactcataaatgcatataaaagtccatgtctatgtatattttttaggaataaatgattactttcgtaaataaaatattggggcaacttactatttttttacatgtcaaatttgctacgaattaacttgtgatttgctgaaataattatgctacaagagaataccctaatgaatggaaattaaaaaaagaaaaagagtaatttgtagcataaatacttaagttttatgccgagtagcagataaatattttagtcgtatttttggcggcaaaaataccttttgtcactagtgtgaaacttccgtaggtacctaatcgttaagtgttaggttaagatccacgtgtcactcgttaattggttcatgttattaatttttttatttattatttaaatgtttaataattataaaaaattaataaaaaattaaatataattaatttttatttttttttaacatttatttctttttatttgaattaaaaaataaactcaaattgagaaattgaaacgcaaaaaagaacaaaacccagaaccagatatccaacttcaaacgcagaaaagaaaaaaaaaaacaatccaaaaatatataccctatctctgtcaactcactatttgccttccctattcatcatcgattttaaaaaatttaggaaacaaatttatataaacaaaccaaatctcaaatccaaacaaatccataaatatctaaaatccagaaattacaaacaagccaataaattttaaattcaaacttgttgcattcaaaccaattctttacaactgcacagtctatactcagatttatacacaaataaatagtaacatttcatcatatgttcatcattattcaatattctatttatagaagaaaaaatggccaaaaaaatcaagcaaatttacctctataatcttctcttctatttagccaaactcatatccagatctggcctcttctgtgatagatctcgtcttctcgcaagaggagcttggggatggagattccaccattgaatccggcaaggagacaagaaagggagaagttgagcagagggaactcgagttgcggggtgaggatttttgaaccatccaaacggccttcatggtgacggtggatcaaggaataactttgtggtccaccattgaaaccgacgagagagagagagaga

SEQ ID NO: 112731 - DNA, 2139 bp, Cannabis sativa
  modified_base (2099)..(2107): a, c, t, g, unknown or other
attgtagattatcaacctcatcagcccaacttttccttgctgattgcaatgactcctctttttcccgaagcgtgttctggtctggaagcaagcgaaccatcagagggtcctggctatcgagagaaccaacgctctccctctccagatcccgacgctgctccggtgaacctgcttcaatcgccaccttcgttcccagccgacaacctggttttttcttcctcgccatggggaacgagagaacctaggtcagaggcgttcggtactatactcgaaccacatagaaatcctcgtcaaaatccttatatttaatctcttttctctagcttttataatatttaaatcagtttccaaaaatcttgatagacattttagtgctttcattgagagctgaagaaagatttgacaccaacgttcaaatctggaacaatggtgaccactagaaccactgtcgttaaacctaccgctcatgatggggaagctaccatggatgatgctaatctatctcccactttacgtacccaatcaggtactgttggggaaggagagacatcggaagtgggaagccaccttgccagaaaaaaccagcaaagtgagaagtacgttgatgagaatgcgttttattttcctttttgtgtacgtaagcctcacacacataggcagaagcaatcaaatgtaatttgcaatgtaaataaaggattttttaagaaaaatgtgaagtctttctaaatttttggtatgttgcaataagtgaccaagaaaaataatttttggtatttgtaaaggtgtgtggattttgtggaataatagtatttggttatgtatgaaaaaaaaattctagaatgaatgtttgtaagttgcaagtgtttcatatatgctaaaaataatgataataaaaaaaatatcaataaaaaataaatgatacttgcaacaatataagtgtgggggaattggtaagtttaagttgaaaagaaaaaaatgaaagattgaattatttaagggaataagtgaggaatacaaatgggaatacttggagaagaagatatatgcatattctatggtgtgatttgagcctaaaaataaccttcttacccaccttacaccctagccaagcattatgagcctataaagtcctattgatctttaaattaagtgtgatttcattagtggagaatgagtttgataactaagcctatggaatggaatttcgttgaaatacatatgtatttagagttgagtattgatggttgcatgcatgagttgatttggatattagtaatgagatgatttaattaagcacgcaaaaaagaaaagaattgaacttgaaagttgttatcctatgttgaaattttaaagaatgtggagttaaaaatctttatagtattatctatttgaccaattttttagactaaatttacagtcgacaaaaccattgtttgatgtttttttttttcttattgagtcatttacttgtatttagtttagttagtgtttgataagggactagcaaaatctaagtgtgggggaatttgataagagccttttaggctctaaaattgatcattccttcatagttagaagatgttgttacttaataatttgagtatttttcaccatttttgaaataactcgagttttagaagaaaattgattttcatgagtaaaaagtgatggacttgattttttatgctagggaatgtggcagatggattgacgcgccaaaataacatttttctagactttcggaagtccatgaagtgcaaaaaacccatgggttgtcgctgcagcgagggtggaagcgagctgaaaaaaaaataaaagatataggtcaggccctgtcgccgcggccacaagattgcagctttgaagtgttcttcattctagttattttcttctccttaaactcttactaaatattatgatgagtagtttccttctagttaagggttatttcaaaatccaaaacatgaatttttaatttcattattgaatgttaatttctagtttccattatatatcaaattgcttttattcttttatgttaatgttatgattattattttaatcttgtttagatggccactaaattaggttttactttnnnnnnnnntcattttaggattactattcacctaatagttt

SEQ ID NO: 112732 - DNA, 1051 bp, Cannabis sativa
  modified_base (997)..(1016): a, c, t, g, unknown or other
aaaaaaaaaaaaaaaacaaagctgctatagagtgttgttttattacttatattaaaagttaaaactaagaaatcgtacggtcaaaagaaaaacttagctatgtagctcttgctgcttattgaattttgtaataaaattttagaaaattcgaaatattttctaactctaaaaaattatattaataatttgttacacgtttaactgcattttttaagtttatattttgtagtgtttcgaaagctattatgtaattagaatttagtataatttagagtaattataaaatttgaaagctattatgtaattagaatttagtataatttagagtaattataaaatttgacgtgtttgttcagttaggtatttacatagtaattatgtaactggcggtaattgaagagtttcgattatattctttaattttggtcccttatgaaaattaggtataattacacaatattattatttttagattattattaaaatatgtaatactaacttattgcgaaatataaaaatatgtaattattacttgacattcaaacacacattgtgtttattttcaaaaaaaaaaataaaaaaaaaaaatacacacacattgtgttagtaattacactatatgatgtgtttggatatgagatagttattatttatgaaattttaatatttcatttaacaaaatagtttgtaattatataagaaaataataacttatagtacttaatatttaaaataatttttttttttatttatataatgtaattagactcaattctcataagaataccaaaattggagaatgtaattgaacattttcaattacctctaattacatacaagcacttaaaattatataattacttctaattaaactcaattttaattttctctaacttttgaaatgcgttcaatactttaaaataaaatataatttgtaatttgtaattacacagacaaacttgggtgccgtttggtaatacttttgttttttaatttnnnnnnnnnnnnnnnnnnnnaaaatttttgtttttaaaaaatttgtttttgaaaa

SEQ ID NO: 112733 - DNA, 6643 bp, Cannabis sativa
taggtgaaatgaaattgtgttgtgtttgtgttttgcatttattttaatattctaaatgtgaaatttttgtttaacagagagattgataatgaaaataatgaggtccatgttatcaaaaaaaaatatatatatcatgtccaacttgtaattatttacccattcagcaagacaatggccagaaccttcgtgaattttaataaaaccaaatgagcttggatttatttcatcaaaattactcaactcgtcatgccaccaaacttttcagcttgtgttgagaaaaaaaaaaagtatacccagaactaaagtttcccaattcatggtacccaacaaacacaacaccaaggttgcatcgtaagcaattagcatcatctcatttaaggcgaatgaataatcacatgaagcaacttttgaaatgaagggggcatgtagagcagcgaagacagagataagcatttcaatatcctttttcttaactagtgatatgaaattacagccagtttattacgattcaggaagcacatgaattcgccaacaatgtagattaaatgtgcccatctcgtgtttccactgatattccaatatttgaatctttaaacttatagataatgtgtcattaataattctccacaagatctataatggattgtttaccgggacacctaatcactacaaagtctacaatgcatccaaaaggcaatctgtaagaatcaacttcacatccttccccatcaccaaactgcccaaaactatctactcacttacattacctgccaaattaaaggatagcatgtaaatgaagttcaagatacttctcatctttgaggcagaaacaaataacatgccagagagaaaccgagcagtctacttgctacacgaaaagaaactgaagcagaaaaaactaacatgaaattatgaactttctaacagattccattatggcataaagcctttgaactttagtggagtgctaacagattcaagttgtgcatacctgcaagtttttgtctgccaagcgcaaaagctatgagcagaacagccattcttcataaatgaccaccagtaagatagtactttacaaccatacctaggagtgtacaaaatttgccacatgaaactctgagttcaatcatgtcgagattagtcagaaaagaaacttgtcaatttacatgacaattcaattataatcatatgccgcaaagcattcagtctaggatccatgcagcttgctttgtgttttaacaagcaaaatgtcttgaagcataattagttaataagaaccaggctctatcttcacatgcagaatggatccaaaactaaggccagcggccaaataaaatcaaaatcttttccttttaactcgtgacatctcatcaaattcattattgtgccacatctgaccaccctgcctgtaatttgcttcttgctcctcaatatttctcattcgtctaggtgcattaccaggtctattcttaatcctaatgtggaaatctctatcaatcacatcgtccacattaaacggagtcctatatggacggacaggtccacgtctctcaccaaaccttctttcttcaccattaacatcgctaccaagttcatgcaaacgaccaccaaagaaatcatcactttcaggcctttcttgaggatctaaaccaccaaatcttctttctctgattgcaatgcgatcggacgggcttctgttaggcataacagaccctgggtgcccatgaccgcgacctgaatccatccctctcatgtcatgccttctaaccaccacttctccagcaaaacagcggcgatcaggggatctcatcctgtctattctgtaaaatggagtcctttgtgccaaatctggatgtccagaaaacccatatggagatcttctcctgggagatgaccatggcccaggtgaacggtttctaccacttacaggagattttgaacgaactgaacggtgcataacttttctctgtaccgaggggaagttcctgtttccttgggagaactgaccatctactccctcaaatggaggttggggtcgcgagaactcaggaggatctatatcatcatattggaaactccttgcaaacttgtcatttcgcctatgcctgaccatctcggaatcatcctcaccaacacatctaggactaatatttcttggcattcttcttaccatatgcctaccacgacctgcaggccctgcaccaggagactgattccttgagggaatccgacgaccgaatggtccttcatcatttaaatgcttcctacctccacgaccagaaccaacaaagcctccatcttgagtgacattgtaagtactatattcatgatcaacatcagacgattcatatttatgtctaggaactcgatactcttgttgactgttgggaaattctgaagcaaagttacgatcagaatctcgatcacctcgaaaggtgtttattcgattattaatcctacctctgccacgaacataattgaatctagagttcctagttgtctgatcatggtgcctctccctaaaaaacttgtgggtgtcatcaccgtaattttcctctctgaaaagggaaaaaaaaagcaattaacacaaatcgggaaaagagtggaaaaaaaaaagccagcgaaaactgaataacatgtaaatgtaatcaaagaatgaaaaaagaaagcaaaataaaacattcacctccctcgaaaatatactatgtcccgttcatttgtcacatcagaaaatctctctcttcctgctctaaaaggcattcccctcccagaaaagtttctgttcctaccaggggaagatgaaccagacgatcggggcaaattaatcatgcggctacgatgggttccactatcaacatccttccctgcattatcaaagtacaaagaggatttggccaaagctgtgtcactctgttgtactagttcatcactatcaagtctcagatcagttccttgtgcaatagttggttgagttacttcacctccacatgcagcttgttcaagatttgtgtcttgacactcctgcacatctctcttcactgattcgctagggggtatactaattgcagcattgttagtctcatctaaaaaagctccgctagctgagctttcaacagtcaatgattcttgaaaagaagcatctttatcaaatccactctcacacttaatgctatgaggtacaccagaagcttcttcaacacccttcttatctatttcagtactatcacattttgactcttttccctcaaaagcatggtctgcattattgataaatcccattgtacccaccacttctctgttaagaaaactattatcaacatgatccaattgtcctttcttgccctcagttacctcaactgctatatgctcaattggttctctgatctcaccatcttcataatcactatccaattccatatcaatactcatatctatagcgtgattaccatctgactcataatcagaactataagagtctcctgtttcagctgaaatattaatcttttcatcatcactcgcagaaccctcaccatctccacgcaaaggtagatcattagcgacttttgatccacacttcttggaatcatcaacattactacgttcaggatttgtagtgtctacattaacatcaatactcactgacgtagcagccttatctagtgtaaacttcccactactttcacaagcttcgagatgcattgcactagtagaactaaatctttctgattgatttatatgttcaccgcccatgcccaacgcagtatgaaaggaagaattcataacagagcaaatactctctgcagttttacttgtttcaccagaaggtttatactctgcagatgaagaaggattcctgacagggctagctacctctgtgtttttacacataactgctgcagttgaatttttattctcagtcagaaaagaagaattctctatggggcacgggatatctgcagttttacatctaactgcacatgaaaagtgtttatctgtgccttctaccatttgttcatttaattttaatggcaacccgtttacagaagatgccactgaactgtctaatgaggccaaactaaaggattcagcaccatgtgtctccaccttaactctctcctcaactggctctgattttacaggtctaataatacccttcccaatgttgatacttggcaaaacaactctaggcatgcttgtcatagaaataactttgtttgtatctaacttaggggatgcagttgaaggttcttgaatggggaagttaagacaagacggactaagttgtaaatgaagagagtcaccaggtttgtctttatggctagacagccgggagaaatcagttacattcctactctctatacttgatagcttttcagaagtgatagcaagtcctatcaatggctgttcatcttctcttcgaccagctgggaccattccaccagcagatgtttgactaataactgcatcattcaaagaactctcccatgtatccattggggtattcaaatcccagttagcccgattggcacaaagatgagccccatggacatttacttcaccagcatcgcctttgcaatagctgctgcttctttctttactcgaagacaaattctgtggaacaggttccaaagtctcctgatgctggcttccactacttgggcttgacaaagctagaacaaactgttctttcaaattcagtaatgacttgctgttttcttgtaaagcatcaacttctggttcaaccttcacttcagttctatccttaataggcacatcaaacccaacattaagggcaagagatccagctggtttcaacacatttttaactgaaatagtctgatctatagggtctttagctttcactagtttctcttccccattcatgttagcagcagatcctggctgtgtcgtcaggctagtttcttcaactttgatatttgtcaaactgatattcctcacatgatcattcacaacactagagcttctttcttcaggttcaggatgcatgatatttgtcaaattgatattccccacatgatcactcacaacactagagcttctttcttcagattcaggatgcttgaccacatccgataaacctgaagatgttgttgcaacactcgaatatgaaagtcttgatccttgggataggctagattggtccttttgcagtgaactagtttctgtcggacacaaacatggctcttcagctggaggcggtgagtttggcctgaataaaggaaaccttctttttttaataggaatacctgcaagatagtcaacagactgccgaataacgggtttaaccccactctgcaatgcaagattaattcatcaatatcccggagctaaaataacaataatacttcacactaatttttagtagtaactttgaatctaagactaaataaacacctcttcatttgctgaaaccggcatgattccaaacataaaccaagcttattatccccgtcaaatcttttgaagactaaatagtaaaaatacaaattagtaagtccttgtgcgcattctgatacttctgctttcaaattctgcactacactaaattagcatcaagcccttttcttcttttccgtaacaaatgacgtctgctatgaatttttttaatgaaatgaattcctccaatctcctagatacgaaattaaaccagtgatcgacacctgctgacaaaacaaattgatgatcctgaaccgaaaccatccaatcacaacccataattattcttttaccctcaccctcctaaggaaaagaaaaaaccagaagattctgaaaagattcctgactctagcaaaaccacccatgaaagaacacaaaagaatacatgtatcatcaaacaacgcaacaaaatttaaatacatatatagcaatccagagaaaaaacaacatgagtgttctgtcacccattctttttttttttttttaagaaaaaaaacatacacacacaacgatcgagattaaaggacttcagatccagaaatttaaagcttagaaaatacgaataacaaataaaatcggatgaatttttccaggaatttgtatgaaataccttatataaacagaagaccgccgacgtttcaaaaatgaaatatgaaatctagcaataaaaataaaaaaaaaaagaagaattaggttaggtttttggtaaatgccaagctctgcaacttcaaggaaaacgatgaagaaaaagcagcttggggcaatggcggtagggttttgtttcttttctgcgaaatggtttctatcaccatggcgcactacatatatttatatatttatggtaattaattaagtatttaaatcaaagtcgacatttcctttgacgataattgcggaggaatgcgatgccacgtcaaagataagtgccacgtggcattatcagtgaattgttttcccaaaattgtccctattctaactaatctcatcttcgggaatctcgacgtgacgtgtttgaaacttcgaaccaatttccttctgccgacaaacgtggtgggacccaattaggttttccacaaagaaaagctaacaaagatagaaaagaaaaaattgagggtaggtaatagtattaaaaataaaataatttattattaaaaataaaataatttatgagaaattcatgggtcac

SEQ ID NO: 112734 - DNA, 5037 bp, Cannabis sativa
  modified_base (4365)..(4365): a, c, t, g, unknown or other
ttaatccaattccttgtggttcgacctcacttgcgtgagtatactacttgattgcgtgcacttgcgcagtaattaataattttcgcaacactcaccgccctagaactcgaccaagcacaaggttcaccattcactgcttgtataaatgcactccatttgtcccccaagttaaaaatgacaacacagaaagtatatacgggtaaagaggatcctttatcccacatcaagtactttgaaatgcagatggacttacaggcaatgcacgaagatgtatgttgtagagtttttctagctacattggcaaaagccacccattagtggtatttcaagctaacactgggaaagttttgattcatggacactttcatatcagaattccatgcacaattctcatcttccaggcaactccctattcacttggaggacttgtttagagttaaacaactgcctgatgaatctctcggatattatatcagtaggtttatgaccgaggctacaagggcttgaccacagaagaaagactagcagccatactcggaggaattttaccatttagggatttatggaaagatatcaagaggctaacagtagtatctgtgataaaatttttggacagggcaggtagatttataaagctagaagaggcagttcaaacaactgctcgaagagtagatgttgcaagccaaaaatagattagccaaattcctactactactggtacgtcaattcaacacactttaagccaagctggaaatagccagagcgaaaaaaggtcaaatggtggaaataatcacaggaatggtaagaagggaaagtttaacaatagtcctgaacatcaacatcctcgtaagaaggacctaaagtttactgcctttactatcttaatcgaggagataaagaccatccttacagcaatagagtccgtagtgtcgtacaaaagacctccaccaaggaagaagtatataagtaaaagggattagtccaagtattgcggctttcacagggactaagaccacgatattaatgagtgcaagaatctgaaagaagagattgaatttctcataaagaaaaaacaatacgcacacacaaaggtatgtaaagaccaatcaagatcaaagggtcgcttagacagaaaataacttaaactacttaatacctccacctgtggacatatgcttgcaagttatcgtagggggccctcatattgctggagattctagaaacgcaagggaaagacatgcttgaagtctttagtacgagcagaaagatgaagttttggatgtagaagagagaaagtccaagcagtcgcacaaggaggatccaatcataactttcagtgatgaagattccaatcatgtgatctatccgcacaatgatccccttgtagtggacatgcaaattgcaaataaaatagtgggatggaccatggttaacatggagcctcatctaatatcttgttcaagactacttatgagaatggatcttcagctcaaagacttggaacatgtcgcctaccactcacaataggaaaatctccagctacaacaacaatcatgttataattcctggtagtagacattccttctgcttttaatgttatgctatgctgtccaaccttatacggcttaaaagtagtaacttctgtttttcatttgcgtgtcaaattcccaacaagaatggagttatttgtctcagaggcaatcaaaaaactgcacgagagtgttacaaccttgctctaactaaggctaaaaaggaagaaaaatttagccagagtttagagaaaggaaaagccattccaaatagggattcacccaagacggggatggggacgtggatccctactttagggaaccaagtacaaaaattaggccagtggaagaattggaagaggtcggtcgaggtcaatccaaacattccgtccaagaaaattaaaattggtaaaggtttgctgctcaaagtaaaattagcattgataaaatttctaagagagaacctagatgtgtttgcctagtcgcatgaagatatagtaggaattgatccctcaataactacacatgtcctcaacgtagatcttaatgttagactcgtacagtaaaaaagaaggttacttgacaaagaatgagcgcatgcactaaaggaggaagtggaaaagctttgtataaatagatttatcattgaagccttttatctatcctgggtagcgaactcaatcctagtaccaaaaccaaacatgaaatggcatgtgtgcattgacttcatcgatctcattaaggcatgtccgaaagattgttttccactcccaagaattgatcagctcggagatgctacaataggtcatgaaattctgagttttgagggcacctattcggggtacaaccagataagaatacatccacctgatcaagaatgcacaagcttccctaaagatgggtgcatttactattacaaagttatgttgttcggtttaaagaatgcaggggctgcctaccaaaaattattcaataagatatttaaagatcagatcggccagcatatggaagtttatgtggatgatatgctcatcaaattcagaaaggcttggggcacataggtgacttggatgaatgcttcaaaatcctcgaaaaatacaacatgaaacttaatcccttagaatgttccttcgggtcagctcgggtaagtttcttagttttattgtcaatgcttagggaatagaagtcaattcagagaaaattcaagtccttttggatatgaaatcttcaacaaaagtaaaataaatacaaagcctcactggtcgaatggccgcactaagtaggttcgtgtcaaaatctatcgataagtgcatccctttcttcaatatcctctaaggaagcaagaagtttgagtagacagaggagtgcgagaaagcctttcaggaactgaaaaaaaaaaaaaagcaactcacacaacctcctatcttatcaaaacctctagacaaagaagagttgggaatttaccatgaattgatagaatttgtagtaagtatcgtactaatcagaaaggaaaacaactcacaacacgcgatctactatgtcaattaaaggatgattgatgtagaaagttgataccctctgattaaaaacttaactgcttgctcctagcatcaaaaaagctaaaaccttacattcgaggatataatatagaagttttgacaaagttatgagccaccatattaactaattgtttaacaaaacaacataatcacatctcaaacaataagcaaattcttacaatcaataataacttgaccaaataaaatcattgtgacataactttttaatgcttgcacaacaaccaagcaatctgtttccaagaccacatgttgccagtactgatgatctttaatccaactaagggtgtcacaaaccccattccttttgcaggctcaggcaaaaccaaaccaaaatatgaactagtgccaccttctatcagaaaaccacatgccacatatccgaacccatacttgtatctctccttaaataatgcagcatcaaccaattttatataattttagtgtcatctaattttatttttagagagagttccattaatttttcattttctagcttatggcatatgtaatgtatgctttatcttaaatttatatgttggtgagtaaaaatctctcaacgacaaatttgtttgcaagttacaattactattgctagaatcagccttgtcggtagaactccatccatagattatgatgagttggacaacattggaatgttgtagatgaagatgaagttcatgcactcctagatctaatgatgaattttcaattctacagagtttcggtagttagaaagcttagaagaagtcccctattcaaaagtccttatctattaaagttggaccaaagccgagataattagacttcacgatgatttgtccacataatttctttcttactgattccactcaaatgtctttcttctcgagttttttctttcttccgacaagagacgagtcgagcttggattgtgataggtcttttctttttcctttttcacttctaatttcttctgcttcacagcttatttaggtgatacaatgcattttttgccctagactcttatcctagcccaaaccacgaccctagacttggactccagtttggaccccaaacctcaaacctgaccctagtttcagacttcggtctcgacctcgaaccctggccccaacctcagaatatttctaaatattatagtacaagctaatacaaattatttcttatgtattaaataatacgattctaaaggaactctataaaaccagagttcttaagctaaagaattgtgagatggaacgagagagagagagagaganagagagagagaaagagagagatatatggaatcaatactgtgaagctcagtcaattgattggcttgtttgatctcttatttatgtaggtgatctttacaagaatggttagttacaaactcagctaaaacaagttgcacaaaatagaaaaataactaacttaataacaacatgttagttaggtataaaccgtattaactaacaactaattacctaactagctactaaccaccaatatctacaatatcccccctcaaattacattagtcaatacaaagtgttaatttgtctcgaaagaacaaaaaaggagttgcagccaaaggctttgtaaagagatcttccagttggttttgggaatctacgtatcgcacatcaagttcttaagccaaaactttgtctcaaacgaaatgaatgtcgatctcgatatgtttattacgatcatgaaacacaggattggaagcaggagaccctgctcctaagttatcacaccatagaactggataggttgggactgtgagttgtaattcagagagcagggattgaatccaaattatttcataaatggccagtgtaagagcattatgggtgttcgcggtgcgggtggtgcggtttttaaccattttttcaaaccaacccgcacatgcggttttttcaattttccaaaccgcacccgca

SEQ ID NO: 112735 - DNA, 1993 bp, Cannabis sativa
catgccctcaaatggcaatttgttgtgtaacagttcccacaaaacgattgcaaagctataggcatccactttgtgattgtaatgcttcttctctccctgccttaatgtaacagtactatacaactgttcaacaagcaaacaacaaatttaagtatttacagtgaataaagtcctcatagtcatagcataggcagaatgtagattatagagaaatttactacctcaggtgccatccagcgatatgtccccgtttcagcggtcatcatctcggttaatgtctcttctctagctaaaccaaaatctgccaatttgactgttttgtgatcggcagtcatgagtaagttctctgcaaccaaaacaaaaatttagcatatcaagattgagataatttgaacatgattaagggatattttgctgccttccaatacataagtacctactcaacattatcagaccatgtccatactaagcacaaggtccaaaatcttaaccatgtcaaagatagaacttttgtctttgcagaaaatgagtttgtatgaaaaatacaggtatttgaagctgaaaaggagagattaccgggcttcaaatcacggtgtatgattccatgagagtgaaggcactccattgcacgagcaatatcaagtgcaaagccaacagcaacacgagtttccaagcaccttggccgcatgtttaacaagtatttacgtaatgtgccacccaataaaagctcagtaactatcaccatgactggctccttacaagcaccaatgaactgttgacacacaaggtttttgtattaaatatttgacattgacaaacaccaataccccattaattgcactaataagtgagaatcctcttttcctcttttctgtttagattttagattttttttgtttgaaaaaaaaataataaataaataaacaataaaaataaatgagtaatttgttctggtttacaatactaaatcccaccttcactaaatttttatgttgaactctagacaacattgcaacctctcttgcaaaccgaccttctctcttgatgatttcttctggagcttcacctttatgaacaatctttatggcaacagtctggtttttgtacctgattgttaatcaaaaatcagaacaactcaatgagtgagattatcaggtttaaaacacacccagaaaccaaattgaaattatagtgaagctcaaagaaaacctcaataacccactaatcccattgaaaagaaaaaaaaaatggattccaatcatggaaactgataaaaaaaaacagaaaaaatctttggatatgaaatctgtataattaaagaaaaatacttcaaaacattaagtatcagagaaaagcaaaggaaggacttgtaaatccaagaaaatgcaaatggaaagaaatggcattgccactttcaaatctgcaaagaaatgaagagaagaagaaaaaggatcaaaatctgaaaacctttgttacttactttccctcatacactttagcatgagctccctctccaatccttggcccaacaaagagatgtttagggtcaatatgccattttgaatccaatctgaactcatcagctgagctaaacctactcccagattccattttcttttcttttcttcttcttcttcactctttttgttttcttttttcactgaattctaatacccatttccactttaaagaaaaatcacatgtcaaaaaaaccaaagtagaagtagaggaagaagagcggtaagaagcattgaaacgctcattaacagaggaaatggataagctgacacgaaaagggaactactacacaagacatactctgtagtcaagtcttggtgtgctgtgctctcataaccacatctcaagaataataaagcccagagatcaaaatctcataggtggatgccttacatgtcgtttgaggaggcaaaagcatgaaaacccacatgtttaacccagagagagagagagaagagaaaggtagagagagaga

SEQ ID NO: 112736 - DNA, 3757 bp, Cannabis sativa
  modified_base (3637)..(3643): a, c, t, g, unknown or other
ggctggccaaccaccagcaggagtccccatggctagccaaactcttctagaagcccccatggccagccagactcctccaagagtccctatggccagctagagaagagcactccctccctaaggggagcatgtcactcaaaggtcaattttcaaccaacgagaatcgagactaggagttggtggaagtgaaattaatcactttagacagtcggatccaccaaactccagcaactggtgtgatctaccctatgtcaatgcacaagctccactagcctggcagagaagtgtgggcggccaggccttgcccagcttagggctagctgaccatgtacaagcaccagactcagagctacccagacttgagtataccctctcccaaggtatgatcgactaggctctggccaatctaaggctatagcttaatcaaagaaggccaatcaaccaagcccctgcagcaacatatccttctgtgtaagcataaattgatcaaatacgagacatgatcaagggcctagctggtccaaaaccttcagaactcaagctagacagagcgaagggatcaccattctcgacatgcatcaatgcctttcccttgttcaatttcaaggtgtaggcttggaagatgtacactagaaaagaagaccctctagtacacctgaagtactttgagatctagaaagttctcctacaagtatctaggtatgtgcgacgctgaatgtttttggtaactctagctaaaatagcccaacaatggtattttgacccacaagaagatttaattcttgggaagagctctcccgagacttttatttttagttctctgctttaagacaaatacctggagaatcttctcaaaataaagcaaagacaagatgaacccttgatgaactacattcaacagttcatggcagaggccaccaaggtcacaggcctactagaagcaagccaatatacgcccatactcagaggcatccgacatgccgaacaacatacacgatctttatcaattctcaaacaacgagaataatggaggcaagtgcaacaacgatggcactgaccaacataatggcaaaagagggaaattcaacgatttctttatgctatgaagtccaaggaaaaaggacgagaagtgtgtacgcttcactcttctatcaaagctcccaaaggacagcatgtccagacatattagcatggcaagtcaagaacaggcagtccgaaggctagtctccatctctgaaggctggcctctacctctgaaggttggcctccaactctgagggctggcctccatctgcgaagtccgacctctacctctgaaggctggcctccaactctgagggctggcctccatctgcgaagtccagcctctacctctgaaggatggcctccatctgcgaagtctggcccctgcctctgaaggctggcctccatctccgagggttggcctccatctttggctagtgtacaggcaggtaccaccaactatgcctaaacctccgatggcaggacacgttggggtcgttgttcacggaatccatattgtaggcgagaccaagaaaaccatagagcgctatgctcgaacactccgtcacgagcccaaaagcgaatccctcgcatgcaaagatgaggctctaagcaaccaaagctttaagagcccatgatctctttcttaaaaagtagatcttgtctaagaaagtttcccgcacaatgacccccttgtcgttattgcacaagtcgagaatataattgcagcaagataatggtagacaatggagcattcctcaacattcttttcaaaataaacacatgaaaatatgaggctccaactcactaactcggtgtcctacaattaagtgatgtatggcctctttggccgaagcatcacaatcaagccatgaatcgatccaggggtggggagccttttccactagtttttaactgactttgttagcgtcagcaagaacagaggcatttggcgtagtcactagttgtggccacttgcatgagcttcttgtatttgaataaatgagttttgggattcgtcctcaagtattggagccttaatgatttgcctaacacaaggttctggatccacatcttctgaattcaagatggttctacgttgtttttgcacaagctttgtctggccatctatattctcttccaagcatttagtatcactttctagaagcatgcacccataaaacttgtgatttatatggtgtcaaagatcatttccatgaggctttgccttttcacctttgtattttccgcttggcatcaaggcacttacaaaggtcaatagtggaccagctatcttcaggagaaattatctctactccatcgtcctagttaatggaatcactacggtggtttttccatacattaacggtaggcctttgtacctgagcaccgggcctatcattttgtgtaactctaccttacgaattagaagggtgtcctagccttgaggcattggttgccttctttctttgtagaggttggttagtcatgttcacattgtttgtaggagaagtaggagcagtttttctttggtgttcacccaactttcctttccccttatccttttcttaagcggagggtcctacatcagtaagattttcctttttcatgaggttattgtccttgtggacaagctcttctagagtattctttttggagatctcttctatgacgtcaaacctatactttagccgcattaatattttttgcatttggcaggagaactcttcttgcgttgccaacttttggtgggttttagcaagttgattaaccactcggagtactttgggttcttgctcataataatacccatctttaatctcagagttttctccaccatcatcctcatcatgtttttgcccttagggtcttcttctaggttgtcttcgttgattgtgttttcaccaataaatttctcttgatgatgcgctttactggttggacgaatgcaagctttagatgttttcctaactttcacaatgctcgattgggcgtgcacagtgggaggtgggttaacgccatggatgacgacgtcttgatcttgggaagtgggttgtacaaggacagttttttttggtagccaccattattaacataatgtaccttcaaatctttcttaaattctcaatgaaataaccaaaatatttattgagattttcagaaattcattataataagagttgaaaggttaaatacaataatataaaattgagagggcgatttttatgtggtttgtgtattaacgaaccctagtgcatcagtcaatcgtacttaactaggtagcattgatgtattacaatggagttctttacaagcataagaatcctagcttcgtgctatagtgtttacacaatgactttcaaatcctttccatgaagtcaaaatgtagtacatataggctaggatctgggttcgagtatatcagagtcccgctagggtgtgcatgtaaacatgaccatctaatgggattgttgaggctaaataatggtcaaatctctatcgtctgataagcgaaagcaaaaaatataaaaataataaaaaataaagagaacaccacaatttataatagttcactcatcatatcgtctgatatttgttgggctttgtgccctannnnnnnctctatttcaatgtaatctttttaattcaattatcaataaagaaacagatttaattttattacttgtttaatgtgttatttggttcacgtgatcatttatttatttatttgatt

SEQ ID NO: 112737 - DNA, 2336 bp, Cannabis sativa
tttcaaaggttcctagccacacgcgcgagccgcggcgattggggtcacgaatctcggcggcatacttcccccacggcctcttccttacaccccggtagtgtctgctgtcaggagcgttgtcagaagccgacgatgacatggccggaaccttcgccggcaccggagaagttgccggtggtatggctacattaatagaggggcggcgctggcttaaactggagggtttggagtagtggccgccggtattaactgatgtgtttggtttggtttgaaactcaaaactgtgatttgcctcctcacaatagtcatcgttattagttgtttctttctttggaactttgaatgattggttattttgcgatgagaaagaataatcatgatcaatatgatgagtttggttttgggtattaatattggccgtacagttgttaaggctgttgataaagctgtccattgaactaaaatcattgagaagatgttgccttatgagctccaaagtggtaatttctccttccaaagccattaagttgtaataatatataagagtattttgaaaattgagtagagagagattgattttgaaaattgaggtggaagagagaaaattgagtagggaaagggtgagtgaagatggtatttaaaaggctagaaatttatcaaagttagtagatgatgggtttcaccacagcttcctatagcttggttacgatagagttaggaaccaacactttagtgcccacttgatgaactgggggggactactataatttttattaataactacatatatatccattaacgaaaaccacttttgtttttatttacgtttatttattgtttataataaatgatatataatatgatgatcaattaaaatttcaattattattagtgtggagggtccaacttccaagcctccaattgcacgtttcctgactataccttctggtttatttatttaagctatcttaaatctgtcatgtaaaaagtaaacccacttgtaatatatataatattaatatattataattgtagctgaattcccacatgcttatttgatttatcaaatatgtatattcttgttgaaaatttggacactatacggtattaaaataatgtgataagacttaaactgttttatatgaataaattcatcaaacaataattaattattttaattaaaataagaattcagtgacacttaacttcaaattaataacatatattagttattatttcaaaatgactttttcatttggccgctgtacgcaaaagttgagcaggagcctcacttaacaaatcccactgtcattcgcatgcattactcatgttgttgatatattttgtagctaatcaattatttatttatttttttgttctttttaagcaaagcaaagtgaataatacagtaaccaaacatctcaaaaattatttaacaatataatttgggaaatttgataaattattttaaaatgtaacacatagaacaaaataaacccacaataacataaagaaaatttgatttattatgcatatattgggccaaaatttaaaccctaaatttaagtgtaacaaagtttgtagaataggttaatttttcattaaactcaaaactacccctctcatttgtcaacccctgcctctctctctctgggattgtcagttgatttgattgaactgaatttagaggattttgatgctatactgggaatggattggcttacaaagtatactgcaaccattaattgtaaaagaaagatggtaacttttgaatcggagggagaggacccattcgtgtttgtgggcaaggtttaaggatctcgaattccatgaatcttggtgcttaaggaaagagattagttatgagatggatgtatctgtttcctagtcagtgtggtggatactgcaaagaaaatgccaatggtaccaaaacatgttccaatggttcgagaatttctgtatgtctttccagaggagttactagggttactaccgaagcaggagttacaaggactgttggatttaaaattcactagaccgagtacctcaccttcgagtgcactagtttttttttttttgtgaaaaataaggatggaaccttacggatgtgtattgattatcgagaattgaataaattaatagtaaagaacaagtatcctctgccaaggatagatgatctgtttgatcaactacagggaaagattgtcttttccaagatcgatcttcgatcgggttatcactagctgagaattcgggatgaggatattcccaagacagcttttcatactgtaacgccccgatattttgccttattttacaaaaatactattttcatg

SEQ ID NO: 112738 - DNA, 2639 bp, Cannabis sativa
tcttttttgctattttcagaggttcttgatcgattcagtagatgtaactctacacgtgagtacagtcgccggaaaattgagtgggctggtgtgaaggagaagaccagtcgccggagaaagacttcggagagctgtgacgtgttttcaggtaaatgggtatacgataacagttcttatccgctctatcaggagtcggagtgtccgtacatgtctgaccagttggcttgtcacaaacatgggaggaatgatttggactatcagtactggagatggcaaccccatggatgcaatttgaagaggttcttttactttctttttttagctatttatttatttatagatagagacttttcatctcatctgagaacaaaaaatggaattttgaatgaatcttcttgattggatttacttgttgtagggattagattaattaatgtgacaatatagctttcctaatcttggtcttaatttaattgatgattgtgtttttttgaacctttttaggctaaatgcaactgaaatatgggagaagttaagagggaaaaggcttatgtttgtaggggactcattaaacagagggcaatggatatcaatggtgtgtttattacagtcagtaatacctgaagataaaaaatcaatgtcaccaaatgcccctcttaccattttcagagcagaggtaacttgagagagagagctttaatgttattacccttgttattcattttctgagttttgtgtcattatattgtagaattataatgcaactatagagtttctttgggcaccgctgcttgcggaatcaaactctgatgatccggtgaatcacagactcgatgaaaggataattcgtccggatacagttcttaagcattcatcacagtgggagcatgctgatattttgatttttaacacatacttgtggtggagacaaggtccagttaagctgttgtaagtgaattgaatcataataacattttgagttaagtttcagaatatgatgtgttgagcactttgtacttactatgcaaccaatttattatgcagatggagttctgatgaaagtggaatttgtgaagagttagatggtgttggtgccatggagttggctatggaagcttgggcagattgggttgctactaaagttgatcctcgcaagaagcgcctctttttcgttacaatgtctcctacacatctatggtaaagttctttacttcttaactcttcaatcttgaacaaaaattcaatgctgtgattgaaattacatggcatcatttaggcatctgtgtcctacattcgtttttgtaattgttaaagaatgctatgtatggccaccatcatcaatcttattcctatcatcacttttgtgtcatattagagcttcttttacaatttcaggaatagagaatggagcttagaggataaaggtaactgctacaatgagaaaactcctatcgaaatggagagttactggggaagtggttccgatattcctactatgcgaatggtagacagaatccttgacaagctaagctcaaaggtctcagttctcaacataactcaactctcggattacagaaaagacgggcacccctcgatctttcgaaagttttgggagcctctgaaacctgagcaattggctaaccctccaagttactctgattgtatacattggtgcttgcctggtgtacctgatgtgtggaatgagttgctcttccattctttgtaaaaaaaatgtcacaaaacaaaactaaaactgtacattttgtaaaacattctttgaaggctaaaattcaatgggaaaaatgattcaactctctacttaacagtgtttattttattatatagtaaaagaaagtgtttatttgtttgtttgttaagtatggaattgaataagtgattttaaaaatcagttattcattttgtaatcatcttgattatcatccatgtgggcataaatcttgtcagaccaactaatattattattgtattgtatgtatgagcatggttaagtttaaggatataatcatttgtattatataaatattattacacaatacacatcataatatattttttaaccaaacgtgtgtttctggcttccagtcataataataattttaaatattacttagtgtttgttgcaaataataataataataataataataatttaataaaaagtttaatcttgaccaaaccacatgtaactatatattaactaatgataagtgatttgttagaatttaaaagggtctttagttttttttgcgatactataaattaactaatgtctatgtactaattttgtattataaatttgttggtcgttgattgtatatttatatttaattacattagacttggggtgaaattttgaacatgtatatatataaaggcagcacaggagtgtcacttttgtatgagacatctatatttttggtatttaaaaaaataataactcaatttcttttatatgatggtttagggtttgcataaattaatccaatcaaatgataattgattaatttaattacaattgactgtcaaatattagatgtgcaattgtgattggatcgaattagatgttattttctaacaggatcggatattggatgaggtgtccaaaaatccaatacatc

SEQ ID NO: 112739 - DNA, 5395 bp, Cannabis sativa
cctacctttgatgtacttgacttctgcgttcaagacgaatctcttgtgacatgaggagagcttgcacttcttcaagagacgggaaatcactccgagacgttataccagacaccacaggatcgaactcagggccaagaccatcaagaagatgaagaatgagatcaagatcagatatagcatggccagcaacagctaaagaatcactcaaagatttgaccttatcaacatagtcagagatactgagagtactttttcaaagagtcgaaagttgtcctttgagctgtaataaccaagcctttgattggctcaaaaacttctgctccagatctttctagacagagtaagagctggaatagcttgcaacggtaccaagaacaccttccatcatcgatgaacgaagccaggagagaagaagctgatttttgcgccgccactgaagaaacatagggttaggatcgccattgatgagattcgaaggaggcgtgatatcactgaacaagatttcatctaaatcatgtccaatgacggtagggacgacctgagacttccacgccaagaagttcgatcggtcaagctttgttgtgagagtcgaagacagagagttggagaacggattccgagtgtgaactagagcagcagactctgattgaggatcggagactctgactggggacgagttgtcgccggaggaagccatggaagctagtcaatggctctaataccatgaaacaaaacaaacacagagagaaatagagagaaactcagttaaccacacttgaaatcatggtgtgattaaggagcaagaattttatttatacacatttttattcagcacaaatagaggaattctgttataacagaattcattacagttggcctaagataacaacgacactaacaacctaaactaacttcctaaccagaatcaagttgttggttatcattcttcttcttcaatgagaaaatgaactttctaataaaaaaaatattttgattactttccagcttcacattgctataaatgcatttcaatccatgccctctgtgatatttctttgatattaagtgttttatgatgatgttgtagcaattatcactcaaaaatcctgatgtacttgtaaagttgggtttatcagacaagattacttctagctcagctgcacactctggcattagtattcctcctataacaaccttaagtgaatctaaaagactgcaaaatgtatttttggaagacctctcccctacaccctcaagaaaacctggaaaacatatggaagtatctttggaagacctataccctaaggaacttcttaacgtaagtgaccttaatttttttatcttgaaaactacgttaaacatcagatgttaataaaagtttatcctaaatttcgtcactggaattgttggcagctttccgtccaactattatcacaacaacatattgaaagagcaattcctataatgcagtaatttctgatcttctcttagaaatttagactttcaacttttctgcaaagcttcataacaactttgtctttagctgcaacatcaagctcattctcttttactgcagactggcactttccaaggatcctgattacacacaatgtttggttctcatgggtcagattctaatgcagaaaggaatgcttacagaggcgattgagtatctggaacgtgctatttctaaggtctgggactctaaattcattttctaattgtcaagattgccgtatgtggtacatgaatgaattaatcttgtgagataattactttgcctgcaatatgtgactgagagtttatctctgtagctgcctcaaaaaaaagttatacatgtattacttgcttttgaacaattatttggaacaggactttggctctaatatttcttattttgaatttggctaataccgattctttcaaactctgcaccccattgatctattattattctcaccagctcttgcttgctgaagagctaacagaagtggaggaaatcgattatttaatctttgcattgcaaatggcggggtctctctatatttgtcaggtgcactaacttactggaaaaataaattttgagattcaacatgatcataacagctcaatatacatgtttatataaaattataaatgtggtaaacattgaaagctatgtactttgtatttgtgtatgggacaggggaaacttaaggaagggctggtacacttggaaaggatcggaaggttgaaagaaccagaggacccaattagcaaaactcactattttgatggaatattaaagctttcaaggtatatatatgcagtggagtactatttgattatatgacaataggctccatcgccatgattgttgttcatcttgaagttgatgatgagtttgatttttcagcgctttatacaatgtggggcgcagagatgaagctgcatattatcttcgattagctgctgcatataatcctgctttcaatatatatttggagcaatgtgaaaatgacgatgactctttgatcagtgatcttgccaaaagtagacggcaagattattgacttttacgtactcttttttcttttattgcttgctttttctcattgaatagtcaatactataacttactagatttttttttctgatttagtttctcaagtaaatatatgcgtgtcagtgtgtgctcgtgggaatttcacaatttagattttctattaataatgaaaattgcgtatctatattaataattttctcaatgtaaatttcacaattatacatttctattttaatcacagtcggcatgttcagttaaatcagtgatcactgttttattgttttaatgaactgctgtgctctgctcatatattcttttaaaatctaaaaatttctgtcacataattatatattcgaagattatcgattatgagattgcaaaacaaacctctttgcagcaaaaagagattgcaaaacctctaaagcacaagcgaattaaatccatctatttttattaaataaaaaaagtggtgttttgttaaatttggaaagaaaagtcttatatttatatcaggtgtgatagattttaattatttagtactttaaaaatatcataaattattaacacgtgcttgttgacttgtgataatatagtagcaaaacaagtcttacttttcttcttcttcaacctgtgtttccttctcattactctcctcatattctaatgctctgtttcgttagtaactaaaaaccctctccacttagcaaatctcttgccccttcgattgtttaacttactttcttgtttggttgaagaagaagaaaatttctgcagcttctacaagtaaggtaaggatgaacctggttttcactttttattgtttcatttttctgcctttgaaaattttttttagtccttttaaatctcttgatacaccttaagctcttgaaaatttcaatgtttagtattagctatcaaagcatataaaatgatgacttttatgttcttttctggttacagtccaatccactttgggttgtcttccaacttatggcaagaaaaagagctaaaacggcaatatcaatggctgaggaagatgatggattttcgaaactacctgatgcaatcatccaacacatcttgtcatttctacccactgtggatgtcgttcgtacatgcctcctaacaaagcgttggaagctcatgtggtattcagtccccacactcactttctctgatgctacaactgattttcaatcgtcacaggccgtagaaaatttctacaagtatgttgataattgtttgatatgccgcaagagaggtatgaattttatggtggatacagccatagctagtttcaagcttcagatgaagaattcctatcatacaagcaaagccacttacctagataaatggttagaatttttagttaaaaacaaagtcaaggaaataaatcttcaattgggttttgcctttgatcgtgctttgagttgttacagcttacctatatcagcactcaacactagagatttgactgttttagagttggataggttagatttgaacactgcttattcaattagacttcctgcattgaaaactttgtcattgaaaaatgtttactttgaagataatttgaaggatgatgcaatatttaagttattgctgggttgcccttcccttgagacattgttgttaagtttgtgtgataacttagttcctcttggttatccgctctgcttgcaaagttttagcctgaagtggctgaaaattaaatatcttgcctttgtaccacctcttcaagtcgaagccataaatcttgaatctttggtagtaaatggattcatctttaaagatacaaatctctttgcatgcaagagaattagaaatctctcactaacttttgatcattgtagtgaagaagacccatctaaatcattagagtgtctcatttcaacccttccactccttgagaatttgactttgaaggactgttacaaagtgaagttagaacacattaaaatttcgaatcagcagttgaaaagtttcaatttgaagaataggtgtactaaatatgattatgggatgaacattataattgaatttgctccaaaattagaatccttcagttatgaaggccataccaactttggcatatcaatggagtcttctaatttgttgaatggaaaatttgtgattcataatctgcatgagaactatgacgcaaatggatttatcagtatgatgaatttccttttgaatctcaattgctcttggaatattgtgactttgcatgttccttcatttaaggtttgttcattattgtttttattttattatttttaaaaaaattatttcattatttctcttgtttgattttgttgtggctttatttcaagttcatattacaaatgtatatttcaaatattgatatgttcatttgttttcttaggttctcataatgcctgaatatttgaagaggatatgtcactcttctttacttaattggaagcatctcaaaattaactctgattgtaagttggtcagagaatcagacttaaaagataacttgttgcgaatatcatcatctttagaaacattatatattaatgaaaaagacatattttagttgtaactgctgattatgagtaatgattatttatatttttcattactaattgtgtctttagaccttttgagtacctatttagcagcataaaatataataaattcaaatgcttttcttgtattaatgtagaattatattattatataatttaatatgtgaaattatactgataaattgtattttaaggccccattggtgtatcaaggatatttttataattttgacccgagatggaaaaaatcgtaattttatgatatattgtgcttatggactatattatt

SEQ ID NO: 112740 - DNA, 3922 bp, Cannabis sativa
tgtatctgttcgtgttaaaaaataaaattattgaaaattgagctgagggtcctatttttaccattttggaaatataaggttcattttgtcatttaacaaaacagaaaatccagttagtaacttttgcagaacacaggtccaaaatggtatttatcgaatttttttaatttgacaagattttgacttttgttatatttgcctattgaatgattgtaacaaaattcgatatataattgtgcaccactggtaaatgtactcttatcgcattgcccttattgagttgaaaattgatattgaaactatacaattacgtatttttctattccaatgagaccaagcctttatgtttccatatgttgatcttcttggtttttctactttctttgcaggaacattttgtagagaatgccaaattatcatataattattttattgctgattgtgaagatatgatggtatgaatatgattattctccaattgctcctctttttccaatcaattgagtcatgcctaagtattgtttttgctgtcagaaatttgaaaaaagaatctgaaattgttctgcactttcatatttgcaatcaaactttgcccctttttctacttgaccagaaagttgctgctatcatcgatgagttacctcttggcttacatgataagtaccttttctgtatcaggtacaggagaactatcattctatagaactgtttactcaacttatttgttatttgttagaaagaaaaataagaaattataggcgataacctacctacttgggttgagacttgttaatattctttaacttgcagcccagttgacgtggatgatgaaatttcatctcaaggtcttacacaggtaaagatcaatcagtagttttcttaaataatatctactttaaaacagaagcttatataaccaaatctattgtggttagtttgctgaaaactatgcgaaaaagggcattgttcgacttcgagaaatattcacaccagggacacttcaggtgccaaaatcacaagccggacttaaggaaatcgaatccattcacaaggtatttatttccctttttctgttttgttatcagaaagccatcattagcttctacaactcactctcttgatcaaattaatattatttagtcatcttaatgtttttaatactagcatctaaaatgatacttctatccaatttgaataatttgcattgtatgaatttcaaagtaatctggttgttgattcttcattgcttaaatgctctcttgaaggtcttggatctttatgtatggttgagttatcgattggaggattctttcccagatcgtgaactagcagcatcacagaaagccatctgcagcttgtgagtcaaaagttctcattatacattttgtggtgtccttttaacagtatttaacacagttctatataatttgcaggcttattgaggagttcttggacaggtttgggtggcacaagccaagggctagcctagcaaatttgaagtctggttcaacttccttgttatcccaaaggattaggaaatatttatgacaccatttttttcccttttaacttcaatagtttcttttacagatttattttgtaactcgcaaaagtatatttacatgaaatacacgaagagttatttagtggctcctaagtgggtactctacttgctcttgtattctcaatctcaatgtccagctgatcaatgttctcttcataatctcctgttttaacaataaagtatacatgttttccaatgtgaacatgtaattaaaatttctttttattgatcccaactcgttacatttactttttcatgctctaaattcgttgtaagtgacttgtggcagatgttagcaactcaaagcgaaccacttttcattacaaaatggtgaaatgaaccataaacataaaaatgcaaacacaagatatattaaaactaagcaataaaactcttaacagatagttgtgccagttgccaaattgttcacaaacttacactgttttgatcaactaagcaattgtcttacttatcctcaaaaacaacttctcaatatcttctttttcctttaccatattcttggcctcaagttccttcttcaacctattataaacactgtcctgaggaatcatatcctttgaaatcatttccttaaagaaagaataagcatattcaactctcccactcttgcaaagcccactaatcagaatacaatatgtcgaaaattcaatagatatatcattgtcaaacatatgattgagcagaaagtgaagcaccttcatcctcctcttcttgcaacacatctttaacaaggcagcataagttttgaggtctggtttgcaagattcatcttccattttcttaagcaatttcagagctttctcttcttgtgaatggtcacaatagcaagaaatcaatgtattgtaggttaccacatctggggtagctccttgctttgacatatcatcaaacacatcctcagcatctttcaaccttcccgctttcccaagaacgaaaatcaaagagttgaaaaaagaagaatcaggaatacagccatcttttttcattttcccatatatctccacagcttcatttatctgttttgccttccctaaagcatgcattataatagtgtatgttacaacagttggagcacaatctttggccttcatttcatcaagaatggcatccacatttcgaaaatccttttcacgacagtatgattcgatgaaacaagtataagtaaatgcattgggttgatacccatttttctccatatcctccataaccgtcctagcagtatcaaacttcctaaccttgcaccacccatgtactaaaatgttgaaacttgaagtattcacaagtattacatccctaaactcaagaaaaacttcctgggcatgctcaacactattctccttaaccagtgtgtctagaagtatgttcaaacctaaaacgtccttgcttataccaagtctttccattcccttaaaagcagctatggcttcctcatacaaatgagctcttgcaagtctcctaatgacttttgccattgtaaccaacgaaatgtaaccatccaaagagctcattacctcaatcaattcccacatatgcttgaactcatcggcttttcccaagatatcaaccattagattatatgattctggggaatgcctataacctgtttgtattcctgcccaagtgaaaaaaccaaaagccgaaacccaacagttgctaaatcgctttaaaacctgttccactaaactatctgataaatttaaatcacacccatcaagagcttgagctacttctttaggagaagcgtacctttgcttaagaatattgctcaacttatcgatatctgactcggtagtctcgttgagaagttgtttacgggcttcaagttcaacaagccttcgacttggtgattcgacccattgagcgagggaaggaataacaaaatcatcgtcttcggcgttgtcatcttcaccagtggcagttttagagggaacggctttgacccaactcggaagctcaggtgattcagtgagttgggttgagtcagtgttggtgcatagggagttaaggaagaggtaccgacgcaaggcattggtattggtattgggtttaggagtggaaaggagcgttgtagctctctgcaatttcgagagcatcttctctgcactataactctattgagcacttagctctaaagcatatatacagctttatacattttgaaccgggcaattgtcatgagttctactctaaaaatgttaattattcttgaatttgtttaaaagtgttcaattttgcattggtcaaaatttggggcaaaatgctaatttataatgaaaattcaacatttatataaccgaatactaatttgaaataattacataaggcaccattttttgt

SEQ ID NO: 112741 - DNA, 1905 bp, Cannabis sativa
ttattattattattatttcatattctcctttccgcaattttatgcaaatgcaatattattagtcaaaatgattggaggcaatatcctatacttgtaggccattgttaatttatatattacaaagcaccaacccacttctatatttttttctctaaaaaaaatggaaaaaaaaataaattgcacagttttttttttttttaatatgaaatagcaacttcattgagtattagcattcagaatacaagagaaaaattaactcatcccaagcattatactcaaaaatgctacgaccagaaagaaaacgagagtgccttacaacaacatgggcaactcagtttgttgatcgtctgataaaacaaatcttaacattatttagagaagagaataaatcttgacagtcatgaataatcaaacaaaaaatagagctcaaagattgattactacgaatgccttgcacagtgagcatgctatcagtctcaatctccacatcaagccagtttttacttttaatccaactaagagcttctttgacccccattgcttcaacaacttccgcatcataggcaccaccataataacacgatttggcctcaatgagcttatcagagctgtctcgagcaacgatcccgagcccataagagttatcctgtggaaagtacagcatcaacatttatcttgattttattcatatcaggtttaattcaacgttcagctccatctcctctattatcaaagaataaagaagataaggaagtgttatcttgagcgttacgccaatgatcaagagtaaataaattgcactgtttgttgaattactatgtgtataaaagattaatgaagctgtctacttcgagtttttattttttatgagatggtattataggaaaagagtaagtgtcagaagctctaatttagtaatttctagagagagaagctttgaccttatgggtagttttctataagaaaaaatgagtttaaagagatctccttttttaggtgaaggaggcccacaaaaatagtgaaaaatacaaattaaatatttctgaccataaatgatgatagaacggtaaaaattagctcttagtagtaatggctattttttagagccatcgagacccgctatgaaatcctagagctccaacaaatttgtcttatgaagagcaaccaatgcagatttttaataggaaggataaagttcttcgaaacaagaccatagctttagttaaagtactctggaaaaacagtaaggtggagaaagtcacctggaaattagagtacgctatgagggctcagtatccatagttgttcaggttagatttcgaggacgaaattcttttataatgaagaaataattgtaatgaccccttaactttatttcaaaaattagtatataattagggcttattgtcaaaaataggctttaaattattatttttgtaattatagatatatctttgaattctaagtttattaattatgttatatgagatttcatgtttttcatagtttatgctcaataacagaggaatgcgacgatttggccaatttgagccacatagatacggatgagtatcttagatttaacgaggaaaaattattgagcatttagaatgccaggtttgtgtggggtaacgatttttggtcattttacccctagatatttatgttaattaaggaagaaaaattctatttgggtctttttccctaagttaaatactgagtttggatagtagaatttttagtgttttcattagtcttttatgagctgaaatttaagatagataaaacgcaaaaaaatactcaagttccaaaaaaaaaaaaatcgcctcaaacggacaaccggatcaaaagttattaatgtttaaagttttcaaaaaattttatgcaaagtttagccctttctct

SEQ ID NO: 112742 - DNA, 3058 bp, Cannabis sativa
cttattaagtattaatgaaaacaaatgtttcaattaattttctcatatattttgaatatacaatgttcaaaaattgaaagtaataaaaatcaaattctctaattaaaacagactcttgtcttgacatggccattacatattgtgatcataatatacctgagcttgtacaaaaccttttaaggtagaactaatatattgaggaaacttcatatacttggccacacatgcattttaaaaaaaacaagtatctacaaatacgagtccaaaaaaaaaatccaaatcttatcttcatgattcaaagttcaaactttgtcaatgggccaccattttgattaggtccaatcactttaatgtgaacccatatttgtttcttcttctttatataatattatttcattattttattttattgatttaatttctttatattaatgttttccaatcaattttcctctttcttttctgtcactctcaggtatatgatttttgcctcttaagtgtccgtccatgtctttatttcgagctataatatctgtagggtctaattagccaagcctttgtcaaatctgcatcagaggttaatggaaacaaccctcacaatactgtgtatgcctcagcctcacccttgattttttttttcttttctttttttaatggactgataataatggcccacaaacatatggatttggatcactctaatagacccaatcagagatatttcattacttatttattgattttttaaacaaatttaatttaagtggtcttagttttggattatgggcactaattatattttgttactaagagcccaaatgggtccaaatttttcccctacccaaaactgcccacctagctggttggaaaaaaagcagactaaaatgagcttgcaacttggattgtatgtcagatggtggtgctctttaaggaccccatgaggaactttgaaatgaaattattcgttttgaaagacatgacatgaacttcagtaattaaaaaaaaaaaaaaacccagctatttcaataatttcacttctcaaactctgacaaagatattataaagttagctgtaaaagtgagtaatcatcttaaacagctaatcttgttatccctacttaacgagtcctacaacaaacaatgtggcttctgccagatggccactatcttttttacgccctaagttcacgactacccaatagaggcttgccacctgtaatatatcacagaggaaactgtgtacatcaagaaatagtgttgactcaattcaacggtatgaattattctgtgacatctgcttagtacttgttcgttagtatgtcattattttattttaaaacaagcaatgtattcataagaatttcactaccagatattgaatgcatcagattaagatataaacttgactaagttatatggttcatacgaagaatcttggcagggggatatattagctcagagagctatagctagctagtacaaagaatcttgcctttactatttaaataggttgttagaataatcatcaaaaaaaaaaaatatataggttgttagaatgacatgacataaaagatttacaatggttaagaataatcttttgattacatagacaacattctgtcaaactcttttggttgtagaagggtagagaaaggtttaaaatatatttatatttagagtatttccaaattccaatccaatataaaaacaattaattatgagtttttaatttaatttaattattttattaaatatgtttagtcaattataaaaatttatcgatcaagtgtaactttaggataccaaaatggttacaatttcaaaatactagttttgtactcaaacctgttttttaaagcagatttgatttttgtttcaaatttcaataatgctcgtttagtatattgtattttaaaattatacatatgtagtatctaaatttacacttgatcattaaaatttaatcaaacactttattaatcaaattttagttcaaaatactatatataattttaaaatatgagtaacaagataagcattttataaaataaataatatctaacttgtattaatataaaactcaaggtaccaaataagaggtgataaaattattcgtgtggcttacaaatggagtcctgaactaattgttacttgtaaaatttggaagaaaataatatttgaatattaagcaatgaatactttgtaatttagtaattactttatgttctttgttcctaagttaattttatttttaagataagactagtgagactatacgtgctctcacgtgaatttgctagtatttgtacgagataattttccaaaactttcaagttatttacaagtctctacaaaacattaaaatttctaaaatttattcataagttcaatatttaaaagttgtcattgttacaagataagttttaacatttatccattccatctttagtggtgatagaatttttaaaagcataagcatatttacaagttgaactttcaaaagttagatcttcttaaatttatttcttatatgtagactaagagaatattagttatattactattgactgaaaactttctactccatatgatctttaatagctttttgtgtatccttttaacaaaatttagatgtggagttggattgggaggagaacttgaagcattcgagatggattattcaatctaatttctattctggtttgaatttgtataaaaaaaaatgaagtcatgttaaatactcatccttcacatgaatcttgctttaatgtcttgtgttatcccaatttttgcactctgacgtgtcatcacatgctagtgacacatggcaatgattccccatatcttcccgaaggagatagtccgagccgagcaccgtgtatacctgtacggacgatgtcctcccaaccgagcagtggataatccgaacaacatatcaacacttagcaatttaagcattttgcattgtgaagcacaagagcaatccctataaatctggtatcgtatcacagagatatggcaagttgtccaaatctctcaatctgtgtactctatatatg

SEQ ID NO: 112743 - DNA, 3139 bp, Cannabis sativa
gagtaaaaaagttgatataaccgtatagtggtattggtgtaataaatattgcattttgtatttttgatgtaaaaatttctttgcttaatattagtaaaaaagtttttggattttttttattaatagttttgatacaaagtataataaataagcttgataaaaactttgaaaattaattgccttcttcacttggtgcatttaagtaatcaattttaattaaaattcttaacaaaaagacttataacagagtttgataagaaatgacttgctaattgtgtcataaactgtatcttattgaaaattttcattatttatgtcaataatttacaattttgaaatatagcaactatgattgaatatgatatgaagttcaaaaaagtccaaatatatgatccaacagctatattacaatattgtcatttcagattaagctaatcaatattatattcattccatatatctaagtgtaaagtatatcctatttatttatacattttttattctgaaaaaagaataatatatatataaaaaaacaatggtaaacttgataaaaaaaatttcaaattttgacttatccaccaaagtcgttgaactgctcaaggaaggagagtgactgagaaggcccactttcagtcatttaattcaaaatattgcacatctaatttatataatgaaaaaataattatggtaaaatatttatatttttatgtttaatttttaagttattctataaaaatataaaaaaaaattatataaaagtaagaagaaaacattataaaaataatatacaaataataaaaagttaacaacaaaataataaaagttaaacataaaaatatatcaaaagatcgtattttatgtaaataaaattttaaaaaccataaaaatatttaaaatttcatatttttataatttattttgttattattattttttttaaaattatcccattatataatttagcaaatattaactattttgtttctacaactacaagactagaatattaaatttaagaaagataaataaattatatatttttggctttctatgtaaaaaacaaatattggctttgactatttgtttcaaacagttacaaatatgatcctttatttgtaaattcctaagaaaaaatggtaccattagttcaaatttagttagaaataaattaaaatagtatgcagagttggtggaagaaaataaaaataagaaaatggattcaaatagttgagttaataatactatttggtaataataaagaaaaactaattaggatttttcattctaaattttgacatgtactaaattgtattgtttaaattttttaattgttaatatttttttcgaaactattatagatttaaagtcttttgttcaattttactaatgagggtaacgtgaacgaaagttaatattagatatacttaagattagtcaggattctattatcaggtaatttggttcctctataattttgttttgcttagttgtctttgtaacaacattaggagtttgattcttgttgagccaaagttagttgagctcgttcctttgtaatctcatttataacagaaagactcaaccagtttcagtgttgagtcattcatttattcattctctcttttcaccttctccatttttctctaaagagttcattaaacattgttatggtatcagagctatggctgataatagcataaataatgcgcctgaaactctacgcaaccctaccaacaatggcatttctcaagaacgagaattagtcaacaatcactctcaagaaaatgctcagattgacttacctaacatcaatcttcttccactcaacctttagttagattgatccaactactctctggagattgttggttcttgctgcaacaaaagcctataatctcgatggactcatccttggaaaaaatccatctcctccgatcaatcttgtaggtaacattccaaattcaatgtatcttcaatggcttcaattcaagcagtttctaatgcattggcttataaataccatgactgagcaaatgcagggatatgtcatcaattgcaacacctctactgaaatttggaatgtttttgcctaactctttgccactcaatctcgagctcgccttctccagattcgtggccttctgcgatcaaccaagaaaggatcaacatcgattgatgaatacaacttgaagatgatgcattatgttgatgccttagcttctgctggccaacctctcactaatgatgatctggtgttatatattcttggaggcttgggtcttgaatatgatgttgcgataaatctcacaaccagatatgattccttgactcttcaagaggttcagctcatgttacacagataagaaatgtaaatcaatcagcaagctagtgctactctaaaaaatgttcatgctaatttttatggtttgtctgtacaaggaggaaatcgtggaaatcagtccttctttgatcgtggatctcgtggaaacttttgaggtagtcgcaaaaattactcaggcagaggcagtggtcgtggaaacaatctagtatgtcatttgtgtaatcgtgttggtcatacagattagaaatgctatcaataatttgttaggctatttttagcctaagctccgggtcaatttcataagcgttttctcagttaatgttgccttttagaatggttttacgattggttttccttgttttaggttcctgatgcattatagttcaaattctatcgattggtgaaaagacaagacaatttggtgaaaaatttgctgaagttgccaattttgctctagtagtcgcgaccaggacacaccatagtcgcaaccattttcttaggtcgcgactatggtcgggactagggtatttggcagaacgggtgttttttcccatttgcctatggtcgcaactagccctttatgtagtcgcgaccaagtacgaaacacgggattttcgactagttttgaatattttccattcagaggcaacaaccctaattcctttataagggactcgactcaaatggcaaaaatcatcaaaaatcagccccgaaaagtgtgaaggaggagaggaggctattgtgacgatccggagcgaaatcaccactagttttctttcttaactcttgaatttcttt

SEQ ID NO: 112744 - DNA, 4096 bp, Cannabis sativa
aaaataatttccaacactaagatcctggtaaaataaattctaacaggttcagcttttacccatttagtgaagtagtcaagaactacgatggtgaatttgactcctccttttctagttggaagtgatcccactaagtctattcccaaaacagcaaagggccaaggattatttatgagggttatctctgttggtggagctcttggaactttggaataacgctggcatagttcacatttgtggacatatttagtgcaatccttcttcatggtcggccaaaaataacattggcggatgattttcttagaaagactgggtctggatgtaagatctccgcaaaattcttcatgtatttcatgcacaacaatgcttatctcagttccagctaagcaccttaagtatgacattgataatcctcttatgtacagcttttcatccataatcacatatctgggcgctaggtattggatcttctacgaagcggatctgtcttctgggagtgtgcttaattctagatacttgagtattggggccatccaaaaagttgagtgatcaatggctgacacccccagcatctttgtgcttggagtatgtagatgtgcgatggggactagtctgtatttctccacttttggatttgttatcaatttagctagcatgtctgcgaatgcatttttatccctgaggaattgcttcacgggatagtgcttaaaatgttgtaatagctccctagtttttgctacgtaactagccatcttttctcctttcatctagtgctctccagacacttggttgaaaaccagctgcaaatcactatactactcgatattcttggtgccaacctctttagcaattgcaagccaacaatcataacctcatgttcatcttcattgttggaggcttcaaattcaaatcgaagtgcactttgtagttgaagttgttgaggagaaattagaatgattccgtgacttccaaaaaggccttggacttcgtaataaagaacaccatgtgtagatatggacttccacataaaatagtgtccgataatggaaagtagtttgacagtgatcaattcactaacttttgtgttaagcacgaaatcaccaaaaaaatttagttgtggctagactttaagcaaatggacaagtggaagttgtaaacaagattttgaagacaaccttaaaaaagaggcttcaagcttgccaagcaaactagtcgaaagaacttccaagggttctttgggcctacaaaataactaaaagaactttaacaggccatactccgtactctatgacatatggatgcgaagtagtaatcctagttgaatccatagtgccttcacactagagagaaacttacgagcctactcgaaaccatgctttacttcaagagtctttggacctaactgaagaacttcaagagcagtcacaagttcaactccaaatgtaccaaaacaagatcgcaagaaacttcaattccaaagtcaaaagtaggagatttggaattggtgatctagttttgagaagggtatttccagcctctcaggagccaggagtgggggccttaggaccaaactcggaaggtccatatgaagttcaagataaaatatgtgatggcacctatcacttgggaaggcatactaggagacatgaaatgtacatcggtatatagcaaaaggaagaaaacgagaggtgaaatccaagaaaataagaaaccctgacttgttgtattaaagtccaagttgagtgtgggaactctcttcagtgggaagccataagtgtagaaccagtagtctcgtaagtcatgtgtatacttcgtggaactaatggggcaggctacactcttggaatggcgcttcggcctatagaaacccaccttttccgtatgacccctcatgggcagggatttaatcttgtagaagtacaagatctcctctggcgttggtacaaatttattgtgctaagaacaaaggacacaccatcctgacaaagaccgtatacctgagggatgaattagaatggtgccactttggctgtggcacagaaattggtaaagtaacacctcaatggaaggtgtgcgcccatctccacatggccctagctctggaagtcgaagcccccatccgcgcacttacttagcctctccccgtgaatggagagtctattctagtacactcctggaacacttttgagccctcgtttggtctcatacttccttaagttattataaattttaaacttattgatgtgttggtccatctctcatggactatcattaagaaccaattttggagcatcctcttgctctagaacatcctcttctatttcaacctcatcttgttggatcctcttagacatagtctctataaaaaggagaaaaaaccaagcattcagctacccaaactacctaatatagaaaaggagcaaggaagtcctcccccataaactgcttagagaggtcccaattaaacttaccatccagactaaaaaaccttcatgggtcattcattccagatggaaagtcaggaacaatgaaaagagggaatggaataaaaatcaataaaatgcccaaaaccagaaggattttgggcatgggaaagttttaccaaaacttctgctacaaaatggataataccataaattcctaacaaggaaacctaaaagcaaacatacaatgcctaaatctaccaatgatatcaaatcacacaatcagaaaatcctaatttcattcagagcagaacatgcgaatacaatgtataacagtaaacccagttaaaaaacaagaaaatgaatcgatacataccttatagtggaagcgaaggcgccaagatgatcgtcgttgagtttggttaagggagttgagcacacctttagcgaagacaacgggcaagggtgatcaacgaatcaatctctgtgttgaaatctcgaattgtaactttttcttgcgtgatattttccttcactgggggttcaaaatctagaaattattgagccctaatccttaacagatgttagatgcaaaagttgacatcacggtccagatcaatttaatttgttgggctcttggttcagttttaactcccaaaggatgtagagtaaactcaaagttttaaaagtttaaagatttgaaattggggaaaaagtggtaactgaagtttgtaaagggtatttatacccaatatggcaatccatgtgaggaggagggaatgatccatgatcctatctccaaaagcacaactatatccaacagttggggacttcaacagtcaaagcatatcaccacagttaatgctctctggaatcaaggtgcagatcaatgatgaagatgttattctttaatttttgcaccaaaaagtgaatagtcatcaaaataaaagctttcctagaaagtaactattcgataaacgtgcttctaccactagacgactgccacatagacatatcacgtccaaagatagaagtcaccttccatgatcgaccaacaccttgagagttatatacaatattacttcttaccctccacatgtccacactaatagaatgaaacaagcttccaccatacacaacattttggaagcttagaggtaaatgttattagtgattctagcaagggacatgtggaacctaggtcagcatcaaagtcccaccagtggatcccaaggaagacaatttgggccaaccccaagttatatacaaaggaccttccaggaacgtacattatttctgtgatcagatgatcttccgctagtgacaatctgtatatggaaaaatctatagtagcatgatgtcgaaagagagacagtgggttcttgaaagactaatctattattcctttttatacatgtgcatatataaggaaataaaagcttcccagatctcaataaaagatcgtatcaagctaaaaggagacacctcctaaacaagatcaagcaattaattcacgattaattgcccataattataagacacaactttatctatttcaactatatctaattttcctagttagcagatcatctccttcgtgggctggatttcacaagacaacctaagttatgtaattcaatgtaaactccccaatagaaaaaaaaaaaaaaaaa

SEQ ID NO: 112745 - DNA, 4242 bp, Cannabis sativa
  modified_base (4195)..(4203): a, c, t, g, unknown or other
ataactaatcagattgtaaagggttttatttaggacacaaaatccaacaaggtattgctcctgtttcaatgtaaattgtaattagagaaatccatgaaagattggtgtctaccatgttgaccttttcaggataagtgatgctcgactcttcaagttgttgaatgggcaaaaggtttgttttgtccacgactgtgctgctagctagttaggccaaggcatctattgttgtattttcttctcttgagatctaccttatagtataccctctgtattggtctagtaagcctttgatcctgctaaggtaggctaccatttttttttacctcttgtcatgtattctcctagcacgtgatttactactagttgtgagtcactacatatatcaaggtgttcggcatgtacctccttagctagattgagtccaccaattaatgcactatacttggcttcattatttgaagtagtgaatccaaatttaacggccccatgaagtctttttcctttgtaggttattagtgcaattcctacactagaaagttgtttagtagaagattcatctatatgtagtttccaaatcggcccttgctcttgtttcttatctagatttttttcttctcttgctctcacttcttctctggatctttggaatctttgatctcacggtcttgattgttcatgcattcaaccataaaatctactacaactttccttttcattgctactcttggttgataagtaacctcatattgtcctagttcaatcacccatttcagtagtcggccaaatccattagatttatgcaaaacttgtcaaagtggttggttggtgtataccttgacgggatgtgcctagaaatatgatcgtaatttcctttatgagagcagaaagcagtaggttggtctttcgactggaggttaccaaatttttacatcggttaaccttttttcaacataataaatgggatgttgggtgccttcttcttctttgatcaggatggcagttactgctaaatatattcacaatacttccctgtctagatgttttgataggataggaggttgcatgagttatttccttacttcttgaaagcttgctcgcagtcctcggtccattcaagcttcttattttctcaaaggatatttaaaaagggaacacatttgtcggtagactttgacacaaacctactaagagtagctatccgaccagttaagctctgaccataagggcttgtattttttgaggagtagctattccttgagcattcatgataaaaccaaagaactttcccaaaactaccccaaatcaacatttgaggggattcggcttcatattatatattttttaagattttgaagcattcttctagatccttcaaatgcccccaacccttttggaatttatgagcatatcatctaaatgcacttccatgttttgacttatttgatccttgaatattttgttgaccagatgttggtaggtggctcctatattttttaatcaaaacgacattactttgtagcaatataagccaacatctatgcggaagcttgtatgctcttggttggatgggtgcatcttaatctggttgtagcctgagtaagcatccatgaagcttaggatttcatgtctgacaattgcagctaccaactagtcaatcctgggaagtgggaagaaattatttgggcatgccttgttcaaatcattgaagtctatgcactctctccactttttgttaggctttcgaactaccattggatttgatattcaaatgggataaaatgcctctttgatgatttttttggttaagagctttttcactggttctttaagagctcaggctctttctttgtcaagcaatctccttttttgtcgaacaggccaaaaattatgagtgtcgatgtttagggcatgacagattatagatggacagattccaaccatgtcatcagggaaccaggcaaatacatcaaggttttcccttagaaatttgatcaaagaggattttgttttgctgggtaaactttgacctattttaattatcctggtcaatatgtgggtctatctctacatcttctaactcttctaccagccctatgcttatatcagagtccccaaagaaaggatccgtctcatccttcccaccttggaagacttcttgctttatttttagtttgtttggcctttgaactttaatggaattattcttccttctttgccttttcgagctcgatgttgtaacattcgcaagctagacaatagtatccttttatacacccaactccattcttagtggggaattttatacagaggtgataaatggaagttattgcctttaagtcatagagagttggttgatcaatcatgatgttgaattttgtgggcacgtcaatcacaagaaattatgccatgaaagtgctactagttagcactttttaacagtgagggataagcgaactactcctagaggtgttatgctaccctaaaaaaccatagatgagttgtgcacaaggaactaggtccttgagctagaggcccactttttcgtatgttgtcttgaaaataatgttagatgaagccccatcatctgtcatggaccaagctacggtcatgtttgcaatttgcacctttacaactagtgaatcgttatagggatagtggacatgtgtagtgtccgcatcactaaaagatacaatttgttgtcaaggtgaggttgcttaggatttcgttcctcgacagtcaatgcttcttctttctgctcgtgctagagtgttcaagcatatatttctcgttctttaccaatgttcccagctataaggggccctcttacaatcacgttcatgtgcctgtcaactggtaggggcattaaacaatttcattatccccttgcttgagggcctctattgttttggtcttaatgcatcaatttaggtgggaattatttctccgaatgagaaattcaatcatctacttcaggtttttacattcattggtgtcatggccaaagtcttggtggaaatgacagaattttgtggtgtccctcttgtttatatcttccttaataggagggggtcttttgtatggtacctacaactgggtagccatggagatgttttcttaagtatcagtgaggatggtgaaggcagtaaaccgaggagctctttcatgaggattgggcttgtagttgtggacattggtgaattttccctactttttattttcaccattattgatgttgccatttctatttttagaattctttcccccactgctatttcacttattataattgttccattgcactagggaatttttcttattttgggcgagcactataaaggctttgctcgcctttggtttagagttgtgtacactgtcaaccctttgtgatggctccttgagttttatgaacttctctgcccagtttaagaattccccgacggatccaacaataactcgcttgatgtccgaccaaagtctcttttttggctctatgcctaccagcactgtagccaggtgcccttcgttggtaagagatttgactttggtggtctctatcatgaaaaactggaaatagtcttttagtggtttccctggttctttctttactttgaccaagtctttgaggttagcaggtatctggcgggagaggagaattgactataatcaaatacaaaggcattcctctaatcaaatttccccagtggtagtttgaagtaccattgttagtttgactctatcaatgttgctagaaaaatcctacaactggcatctccctttactccttctaggtcggttagaattttgaaatatttaatgtgtgactggggctcttccttccgaatgtacatcttccaggtcggcatattaaatttggtcgggatttccaaagcgttaatattgggggagaatggggaatctctactctgatcaagttcgaggtcagtgagttttgggtcggtcaggctttgtattagctatgtaagtaaatctagttggggttgcatccctgaatttacataggcggcttgttgatcatcctacgccattggtttccccatggagttttctttggtacgaagcttccttaattggttttcccaaggaaggatgtagtttgaatatcgattctcctctgcaatttagatcatctttgagttcaccagcagaccttggatgtaacaccctaactagcatnnnnnnnnnacgtgatttttaaacatactatgcagctcgttgctaatc

SEQ ID NO: 112746 - DNA, 3986 bp, Cannabis sativa
atatatatatatatgatggtgtgaagagagctatacataacccggaaactttaatgatgagactattcaaaattaattgtgatcatagagatcgagattacatgtgtgtgtgtgtgagcgcttattgattattacaacgttaatctcttcgaaaactaatgaaaatcagtgtttcgatggttaagatatagcctataattggaactatatatatatatatatatacacacacatactcgcggtaatctgtaacttactaataggttttcgtaattatgacacaactgtaaccagattgataaaaccatttttattattaattagtatatagttaattaatgagcattcttattaggtaccggtggtgtctaatactttcaagacacgtttcattgtgattggttagcgatacttcgaaatcattacattaataattcggccagttgatatttaacggtaatattcagcgacctccaatttacaaagaaaagtaaacataaaaggataattttaccaaaaaaaaaaagaaaattaagtgtaaaaatcaaaccataaaaaaatttcaccaaaaataacccttaaatgcgtatatattttgtatatttatatagaactaaagttcaattaataaactaattaagcttgattaactctaacaataattagcttcagtactatatatatatacctaataaaacagtactacttatatgacatatatatgaatgaaagacaagaccaggcaaggcaactatgcctcagcgtatcgaagtacctaatccatccgattatccaaacgagttaatcacagccattcattatccactacccaaaaacaaaaagtaaacatataatacgtacgtacatacattaatacattaatatagttacgactcatatacatatataaaatacagctcacaaaaaagaataattatatatattacattcttggttagactacaacccaactttctaactcccatttctctatatagaaacccttttggtttaaaaccattataatcttcttcatcttgaaaccctagatctatctatctctatctatctgtaaccatgatgagtggttataaatctgagccaaacaacaatattgatcaagacactcatcatcaatatcattatcatcatcatcataatcataatcatcatgatcatcatgaggaagaagaagaagaagatgatcatcatgatgaaaacagcagcaataagcaacaaaaaataggaaggggaaagactcagataaagttcatagagaaccaaacaaacagacaagtaaccttttcaaaacgaagaaatgggattttcaaaaaggctggtgaactctctgttctttgtgatgctaaggtctctcttattattgtccctaacaataataaactccatgaattcattactcctggagccaagtaagaatatttatatatatatatatatattattagaaaagtttagatctttatcaattaatttctgatatatgtgttatcttttcatggaatcagtactaaggaaatgattgatctgtatcaaagaaccaaaggtgttgatctgtggaagtcacagtacgaggttattaattattttttttttattaaaaaaaatctgaaagttgtttttttttcttgattattttttatttattttattttttggttgtaggcaatgcaacaaaccttgcgccaactcaaagctaaaaactttgaactgaggacacagatcaggtattttttgaaaatattgtttttcctatatatataaaaaaggaaataagagagagaaaaaaaaaaagtgacacataaatgattttttattttattttttgtagtttgatgaaattaatatgttgttttttttttcttgaaacagacagagattgggttatgatttgaatgatctgagttttcatgagctaagtgatcttgagaatagtatgctttcttctgtggaagccatacgccacagaaaggtataatttataaatcattatattttcacaattttttttttaaattatttattttcatgtatatgtttgaatcattaatatacagtaatttgtggcataaatacttaaatttcactccagttacaaataaataactaagtttaattttttggctgtaataatagctaagttataaggtgtcaaaatttaataacttttggactttttatattaataaaaagtcagtaaaagtattcaaaaaaaattgtgattttagatattttgtgtaaattttccaataaatatatatactgttatctcatttgatcgagtatagtactagatttcattattatggatcatatataagctaaaacttatagtacatgagcacttactatttgacacttaaagtgttcaaaatcatactaatataattttttataattaattagcgattctttatattatttattatatatctgaaactcaatattaaaatagagtaatagtatatcaactttgacacctttcatcaaaaaaaactttgacacctaaggtgcagctctcttagcatttcttatataataaatcatttgataattaattgaaattaaattagaacgtgcatcgtactaattctcttgttcattatgtttttcagaatcacaagatcaaaactcaggctgaaaccaccaagaaaagggttagaacacacacactgcatattaatatcaacctgaatatagtcttttcatttctatttctaattaattttaattagtatttatatatattatatatatatgcaccctttaaattgtatatatcaccatacatgtttttttttcctaacagaacaagagctgggaggaaagaaactcagtcctcatgcatgaaattgtaagctaaaattaaccttataattaattaggtacatcttattaattataactatacaatattagatatagactgttatattatcctaaatatctatataaacattatgtacacagttattttaattaacatatcatatgatttgttataatgaaataaaatggaaatataataaatcaatatttattttattaatctgttggttgcgtgttttaaagtattagaataatgactattccatatttacatcccaataattatgcaagataatatatatttcatttccacttctatttttaattaatctaactaatgaaagtgtacgtaattaattgtattattgttattattagcatgcaaggtgtgaagatccaccatatggtttagtggaggataatgtagaaggaggaggaggaggagtgtatgaatcatcagcagttgcattagctaatggagcttccaatctctatgccttccgccaccaccacaacggcggaggaagcttaatcaccaccagtcactccgctcttcacagtggcaccggcggtggtggtagtggcggtgcctatgaatcctttgatctccgcgaccttcgcctggcttgatgaattaatctgcaccctaatcatatattagtactactaattatatatataattaatatgtgatcagagcttggagtgcatgcatttataactctatcataagaatattatgtttagtatgtactacttttggttttaatttgcttgagtttggtaatatataccttaagcttctgatgatgatgatgatgatgatttatatattaattatatgttatgatatacttaattaaatgtctctggtttgaatttacctaattatgtatattcctagtttgtctaattttgttttgatatgttccattgatgggaatggagacttaattatttatgactatttattattgatttgaatttaacaagtgtagtgcatattgcataaatacatggatacacaaactacttgaggctttggtcaagtagccatagaaggtatttgtgttagaattattataatggactaatacaattataggtttaattctataatactcaatcattaactatgt

SEQ ID NO: 112747 - DNA, 4092 bp, Cannabis sativa
  modified_base (3989)..(4012): a, c, t, g, unknown or other
  modified_base (4060)..(4063): a, c, t, g, unknown or other
aatgcttaatacgaacagatacaaaaaatacaaacagttttgtcatagtacgtttagatcgaattataattaaacttattttgacaaaaaatcaattcagggtcctgtttgtactattttaaaaaatacagggtctattttgtcatttaataatataagtccaattagtaacttttgtaaaacagagggttcaaaataatatttacccaaaattttattatcttcttcctcttcttcttcttatcattagggcaaaaaagtgagacaaaatcatcatcaaaaaaacaaacccagatcacaattcaccttctctcaaattgggattctctcaatttcgaatctttccaccatgactcgccggattctcgatgcagctctaacagttccgtcgccggctacggcaatcacccgtggctgtttaggggtctgggatggagattcggagcactgaatgtccgatctgtttgggggtttttgaagatgaagcaaacgacgtcgttgagtgttcacacttacataaccgaggaggcttaggggttgatcacattcgaaatggacaaatcgtgtgctccctttgcttcgaaaacttctccttgaacgtattctggtcgtgacatgtaatgtaagcactgttcaacattattatttaatgaattatgagatataagttaattagtttgcattggtttccaattccatgcatgaattcccacttcataaatgagtgtcaagatgaaagaaacttactaagttccaactactctgtttgtttgtgttgtcctctgaagtcagatattttgggattcatatcacaatctagaaggatattactggtcttcaaatctctgtgaatgatccttagtctaaagtcttgatgagagaacaaaaccacattcctattctgtaggaatgtcaagcagggtggggcaggtcagacccaacctgacattgacccggtctagcctgataacattttggctcgatttggtttgacccgatagctcttttcaatctggccaattagactcgacccgagttaaacgattataaatgatatatgaaagtgggtggcagatcaatccatattttttcacattttttcatatattctataagtggctcatcacattatttattgatattctctaaaaaaaaaaatattatcttaagatatatgaaacttaatacttaattacacccgctcgtggtagacacatttaaggtaacaaagtcaatagtgaataagaatgaaattaaggattttgatttttttttttaaaatatttgaaaccgagtcgagcagggcccgatctgaaataaaatgtgtccggcaggggcaaaagctcgacaacaacccagatcatgcaagtcgggagtcaaccgcgaagataaaccaaattgccattccgcaacataataggcagccatcaagaaagccttaccctccccaatagcagagttggtagttcttcaaatatgatttatatgtgtatttgacagtccttacttaggttagactcatctaatcacactcatacaaactgatttaagtacttgttttggtatagcaactttcttttttcttcaagatagtatcttttggcatttgctacttcttattaagtaagcctttatttacagttcttcttttaataactttattccaaggaaaacattctaataacaagccattactttagtaaataataacactgagtagtattttgtgcagtaaaataatgaaagaacaaaaaattgggatgaagagaagaaataggacagaaattctcattaggatataacattaagaagactacaatatctcacaaaccaaactcaaagtaccattacataacaatgttaaagtatcctaatgcaaccattagcaaagaaaactaatagaagacagtcatcactacacataagttataaccattgtttaaaatgttgaagaggaactagtataagccctttccattatagatagactctttaaagaaggagaaatccaatgcagagcatctctcaattctgattcccattccagtttcgatctagtaaaaactctaagatgctcccaattaactaaaggagtacgacatatcttctttattttttctgggaatatgagagccttcatgtatagaattaagaaaatgtattaagattgcagcatagacaaatgatataaatttgaaataataacacaaaatgaattaatagtaagaaacacaccttttctgagtcgatatcaagcctcactgtctttggagagcaattaagattcacaaaaaaattcatcatatcgacaaaccaaattgcatcatatttcttataatgatcaagaaaaatgaatattccattcaacaaattggatgactctattgatatattatgattgatatatccttcataacaaaatgatactaattttggagcttcaattataacttccttttcatctatagatgaacaagtacaattcaacttcaaagttttcaagtgatgattcgagattttaacatgcttcaaccgcaacaacaccaaatcacacaaggtcaaattctcaagttgatgaaggtttgaaataagatattctaacgatgatgaatcttccgtaccgtaaacacaaattaacacgagatttttaattgccttgcatacagagagagtgatttttcctaaggaaacaccaaataggtccaaagattcaagatttaccgcttcaattagcactggcacataagtattacatttaatttgcaagaatttgaggcttgaactgtgtatacagagctgatcctcctgataagaactttgaaaacgacatagctgaaaattctcaagaaaaggggaacccaacaacagcttatcaaccacatcaatatcaacaaaccgaacataatgcaatgacaacgatttcaagcatggaaaatcaaatgagaggctagaatccaactccacatcactcaacaccaaattaatcaaatattttgcattgattactagtgttttaggtaatctgtagtagtaaatttggtgattctcctcagatctatctggggccaaacaaaggtttatttcctgcaccttattgtcaactacaaaagctaaccatttatctaagcaaccaactaaacttctatcatagaatttcatttgaagctcaaaattagtaaccattgattcagggacaaagttcctacttatcttacggtgttccaaacacttgtccacaaaatgaaagaactcttcttgggaatgagattcagtattggagaaagagagtttaggaacaaaataccagatgagtttccaacgttttgaaaggaggcaagtccgaaccacatccttagtgggaagaaacgacagtatgtgtacgatcaatgcattaggtagttttgaaattctgtctttgtcttcctcaaccatcatcattattgattttattctcttagccataaatgaaatgtgaaaactgctaataaagaatccatgaataaaaaatagaacaagctaagtcataaatcaaataaaaaagatagaatggtttataattacctgtagctaggtcgggtgcatcagagaaaatttgagtaggatttgggttagggtttaggttgaagatgaaagaacaacaacatttgactcaattattattaatatgtgtttgaatttttgtctttaaaaaaagaattgatgacacgtgacttccacgagtgcttacatgtcttaatttgagattttttttttttatcaataatgaataattttattgaaaagaaaaatataatgtcatacaagtaatcttatctaactatataagtttttttatttataaatttagggtaatttaagaaaattagacatggaatttgttaatcctctaacaaaaaattaagtttattaaggaaaaatgaacgtttagaaaaacattaataagggctaaataatcctactcaataaattaagggttaatttcacaaatnnnnnnnnnnnnnnnnnnnnnnnnttcacggaattttaaacattttaatgatttttttgattttatttacannnnatacggtctttttatgttgaaattttgtt

SEQ ID NO: 112748 - DNA, 5198 bp, Cannabis sativa
  modified_base (2617)..(2629): a, c, t, g, unknown or other
agcggcataaacctaatgtttatttttagcggcataaatactcaatgtttgtaaaattgtaattttctttcaatttcgtcagtacagactccgtgtcgaatttattaaaagaatatttagaagtaactgatactacatgtttctatctaaacccaattatatgtgccctgtttaagacaagtctgtactgacaaaattagagaaaaattaaagttttacatacattaggtacatatgccgctaaaaataaacattagttttatgccacttacaaacttaaaactttaaatacttataccgctatttagcctttatataatacatatacatcatattaacagcaggatgctctctattataaatgaataataaccaagtgagaaccaacatattttaattacaactgcagatatatataaatatatatcatacacataaacaacagaaattgacatcaaaacaaagctgaacttgaaactagaatttggaatctttggcattctgtcaaaaatgaaaaacaattttcctatcctttgttgttcatgtcacaagacagtagaatgtagatgatgcaacaacggcattgactttggactaaaaagtttttgtattgtactcattaaggaaagagatttatttgattattaaaaaataagtttttctttctcttttcaattttttttggaaagaaaaactattagtgaagggaaggtcagtttcaaataaaatcttcgagttaagttgccttattgagtttactccctgtgtaatctgaaccgagttgactaactcaaacttatcaaggccttaagagatacaatctacaaaatcaacaggcttattattcgttgctgaacttatttcacttccgtcatgagtaaatagcatccggaaagctagaaggctatgatgcaagagtagttttaatgaaagctaagatagaaaaataaataaataaataaataaatagaaaataaaactcacgttatgaggtaggtgaaatttctctggaccaattctccaagaggtatcccttcttctttggagtacctacaaaatacagtatcactcttgttacctgatacacaaagcttaaacgcgtcattgactgctgagcttgtactaaaatatgaagcaatttactagttctttcatcaaatttaataagttgcaatttatttggttgcagatttcggcagcgactttgggtgtttgacaatttaaatttgaaattattgttagaaaagtgaagtcatttctttatttagaaagttcttaatttagctttttactaaattaatgaatgatttatttttattttaattgttaattataggatagctaatattttgtggttaatacgcttagcagaaatctttaaattaaggcatttcagaaactatattttcctcttttatatgttttgttctcatttcttagagtgaattgtattttctttctgaactagtaaaatcttttcgtcattatttctattttagcaaaactaaattaaataattgtttgtactaattgttaattataggataactaaatatttagtggctaatatatttccgaaaaacctataaattatggcattgtattctctccaagattatctcatttcagaaaataacttctttactcttacatgtgttttctcctcaattttgggagaattgtgttttcttccgaatcagcgagatatttttgtcattatttccaatttaaatatctcaactctcttacaacgatatgaaatttggttgcgggttattgttcacggtgagtacagaagtcagttcaagttagaagcagatcatagtcaagaaattgaccgccaaatttgaaattgagaagtttaatagaaataatttcttggtatgaaaatgaagatgaaagcaatcatgatgaaagataattgaagatctcatgattgccttcatcttcttttttcataccgagaaattattcctattgaacttctcaatttcaaactctgctgtcgatttgttgactataatttgcttccaacttgaactgacttctgtattcaccatgaacaatgactcacaaccaataactttcattctcccaacattctccccaaaattggaaataatgaagaaaaaaatttactagtttggaagaaaacaacatttctcctaaaaatcgaggagaaaacaaatgaaagagtaaagttattttttgaaatgtaataatgttggggacaatacaatgccttaatttatattagccacaatagtataaaccattctttaatttagttttactaaattagaaataatgaagaaaaaatttcactagtttagaagaaaatacgattctctccccaaactgagaacaaaacatataaaagagaaaaattaagctagtttctaaaatgagatgatcttagagagaatacaatgcctaatttataagtttcttctaagcgtattaaccaccaaatatctaactatcttgtaattaaaaattaatagaaaccattcattaatttagtaaatattaaagtggcgtttaattagaaggaatagaaacataaaaataagaatgggaatagaaatgaaaaagtcattctattggaatgacattnnnnnnnnnnnnnatgcaaccaaacaaaggaatgaaataaaaattgtttcctttccattccattctatttcattacctccaaccaaacataacctaaataaagaactttcttaataaagaattacctaaatatgacttcacttctgtaacagagttcagttctcatagtcactaaacagttctttgaaaatcagcaccacacattatcaaatcatacatacatggaaaaattgctaaatttattgaaagtcaatctttctaaaggaaaaaaaacttatcatctttaatgtttctaagtgcataaagcagaaaaagaataaaaaaatcagtatgctaaaaggaaagtatctgaacaaatttgattaagctattatgtaccccatccccataatcagcaatctcacaaaggataaatacttgtgtagatttgttgattttatttcactttttatattaaaaaaaagaaagatactttatatggttatatgctaaaactcatgcctgattaaacgtattctccaatttgaattcgaattgcaggcgattggaaaagaatttaatatttttaattaactaacatcattataaatattaaactatgccagaattgtatatacctccaaggaaagtcgttttcacaaaaacgagatattccattcattgctgaaaatgtatcaatatgcacccatttttcctttgtatggttagcaagatgacctgccacaagtcttattcagcaaaaggaagcacaattcaacgaagcaataaagagaatgaagaggccacagtttgagatcatagagaatgattgttggaaaccaaagatataaagacgtgagcaagaaaagaatataatacctattgtttagtattaaactacaagggcttgccataaaactacagttgaaacttagctagtattcaaataaaatcaattgatgaagatcatcaaaaatgtattctactctttcagtgagaatatcagaaatagcttattattttaagctttgtggaaactaattcaatcgagaaaaaggggaaaaaaaatgtattaaagtgcaccatgtagagaaaattatatgttaaaatcatgtgctcaaagtcttataaatcacaagggaatgaaaatttcagataacgaaaaaaagagggagggagagagagaagttgctaatggaaaaccgcaggctcaacatctctgaaaccctcaacaagaccatggcagtatcagtgagagaagaggcataccaatttgatgcaaatttctcaaagcatgaccgctggggtaattctcataggacgccatgaaggttatagcagtacatcctagactacaaaaatgagaaataagtacatgagaaggatgcaaaatattactccataaattgaacagaataacttcatacctgactaaaagtaacccgagcatcataaaatagagtaacttccagtaactttttcccctattgttataactgtaagaagtggagaaattcatccttttgttagctgtagtatgtgttaaataaattgaacaaatgttatttgcattcgtgaccaactactgaacccacccaataaccgaaaaagccatgagcaaaatgctttttacaggtcttgaaatttgttaacttttttcatcattattatacattctcatataaatcaaatgcacaaccatgtgaaagatcttttgcagaaaacagcagcaccctgctctcgtgacctacatatcagtacttatattatcttttctttttcttccccactgcccacttcccacagaaagccagataagtgcacatttagatccatggaagaaaaaaaaaagagatttataaaattattacattacaacaaaacacatcacaataaagcagcaactaattaggcaaaatgatcacatgtgcaaagaaatcaaaatatctcatatttatacatatatattgaatatcaatcaatttaaaacagattccacgtacattctattagcagcaattgcagcagataagttgaagattggaactgagctaataataaaacgaagctcctggattacaaaatttacattgttaaaaactctcaaacttaatcaaaataccaataacttcacaaattcataaactttataccttgtgagggagctttgagtaaactaaaacaaaagagaaaacaggaataatgaataacggaacccttctatcaaggaagaccccgagctgcaagagaatgcgtgtcaatttacagaagaaaaaaatggagtacggacaaagaaacaaaataactcaggttgcatacaaataagcataaattcccatattgacttgttttataatcgattcattttttggttcaactaagagacaggtggacatcatgaagtttaaggaaaccagtaaatttaacgtggaaagcattgtttagaaacaaagaacaatgtctctatcatgattcatgaaaacacttcttatagcataagatattttttttgaaaaagagaaaagatccttttgtcattgacaggatccttcccgataaatattaacagcctcccttgtggtggaagaaaaccatggttacaa

SEQ ID NO: 112749 - DNA, 4310 bp, Cannabis sativa
actgagcctgctccggccgccgtaaagcctttaccgccgactctgcttttagagaatggcctcgcgcacagtggtacaggtactggtaatggtactgatagggattgctctggtggtgaggaagaaacgacgagtaagcgaaaacgtcggagtagatgggacccgcagcctgagattgataaccagacggctgctgctgccggttccggtgccggtggtgattcaggtagcggaccgcgaaagaggaagtctcgttgggctgatgatgatccgaagccggtgattcagttgcctgattttatgggaggtattgaatttgatcctgaaattcaagctttgaatagtagacttcttgagattagtagaatgttgtcttctggtttgcctttagatgatcgtcctgaaggggctaggtctccttcacctgaacctatatatgataatatgggaattaggattaatactagagagtatcgtgctcgtgagagattgaataaggagagacaggaaattatagctcagattattaagcgaaacccggcttttaaaccaccggcagattataggccacccaagcttcagaagaagctttatattcccatgaaagaatacccaggttataattttattgggctcattattggccctaggggtaatacccagaagagaatggagaaagaaaccggtgcgaaaatagtaattcgcggtaaaggttcggtgaaagagggtaggttgcagcagaagagagatttaaaacctgatccgtctgagaatgaggatttgcatgttttggtggaggcagacacacaagatgcgcttgatgctgcggcggggatggttgagaagctcttgcagcctgtagatgaggttttgaatgagcataagaggcagcagcttagggaacttgcagccttgaatggaacaataagggatgaagagtattgtagattgtgtggtgagccaggtcatcgccaatatgcttgtccttcgcgcacttcaacttttaagagtgatgttctttgtaaaatttgtggtgatggtggtcatccgactattgattgtcctgtgaagggtacaaccgggaagaagatggatgatgagtaccagaacttcttggcagagttaggtgggacggttcccgagtctgccatcaagcaaactgctaccttagcaattggacctggtagtacaggaagtaatcctccgtgggctaacaataatagcagtgctgttagtggtgctattactgtttcttcgcatccaggtttggggtcatcacctgtgatgaagcctaaggaatatgatgatactaatttgtatattggatacttgccacctactcttgatgatgattctttaatccggttgttttcaccttttggtggtattgttatggcaaaggttataaaggaccgaattaccggattgagcaagggttatggctttgtgaaatactctgatgtacaaatggccaataccgcgattactagcatgaatggttatcgtctagagggccgaactattgctgttagagttgctggtaagcctccacagcctactgtgcctcctggaccaccggcatcagcaccatctgcatttcctgtttctagtcagcctatgggtgcttatccatcccagcaattcgcaccaggtggtcccctgggaaatgcaccacctcctagctattctggtactccagttccatggggaccccctgttccatctccatatgctggttacccgccacctcctcctggttcaaatatgtatcctcctatgcatggtcaacctatggccccttatggtgttcagtatcctccatcaatgcaggcaggcccccctggtgccccgccacagccgcctactacaagtgaagctcaacagagttaccctccaggtgtgcaatccgaaaatggtgcttctcaatctttaccaagcaatatgtatgggaactctgtagcaacaatgccacccaatggtcaacctgcatacccccctccagcttcttatggttattcatcttattacaccagcactcctccccctcctcccgcacccttacccggttctaatacagaccaatctcagagcattggaaatgttccttgggccacaaattcctctgttccacctcctcctcctccagcagagaagacagctttcggtgcagatgcggagtatgagaagtttatggcagagatgaaatgatgtggttccctttccggtttgtcttcaagtgtcaggtatgtgattgatcgcagttcattaattttaaagtacgttctgtcatttaaacatatttgaatttgaccagcatttaggaattctcgaacctatatagttagaattttgttccagctttcttttcttgagtcttgttttgataattagtttatcatataagaggattagaaagttgttggaaaatttcaggagacattgtttatagagttacaacttacagctgccagtcggtcacatcgttttatagttttatagagttacaacttacagacatttgtcagtttgaaaaatcaactagaattttgaaagacacgatgagattacatgattagatatataatcatggcattcttgacattttttataaatggatacgtacccgttgataccatgattttttttttataatcatatttgtgttacatgagctatttgattttatccttatcgttctacagttacttaaaaaaatataatatcatagttttttttcttcccctttttcattaatgcttcactttacatgatttcacttggttctttttcatagttcttttgtatacagaaaacaggtgataaattgatcaatgtaagtatgtcttctaaaggaagttttggtgatatttatttgactggtctaatctttttgttttctcacataattttcttaatgtttatcttttcaaaaatctttatatttaatcacgagacgatataccacagcaacgagaaaagaaagttttaacagtcttttattttttttgtactttgaataagttgaaagatggaaatgaaataagccattcacgcgttataaacacatcttcttgcttataccgtacttaacccctgtttgttgaattatgtataacttctacaggcctgatgtttcttggagctcttgccatgacttagttggaagtttgggattcacctctttaaccttcctgtactgttgtgaactttgcagaaactcggggtgaaaaagtgcaagttgagacaacatattatgttggagaagcaattttaaaccacatattattgattatatatttttgtttgatttctttgttggacttattaattttgtcatgttttagactcacagtttcttatgcttataccttatgatgtgtctgtctggtccctaatgttttcctgaactttctattgtctggtttactgacactctcttgttgtgacactaactttttgtgggttgctcaattgattttgtttgttccttctttaatcttaagtctctaaatatgatgttatcataatcccaatttttactgtttgagggttctaagatttcctagccgcatggtgctgaagctgtgtcgcggctgcggatgcttttcccatgctgcttggaaagaaaggcaaatttggtaggtaggttaagaagacacatttaacttgtacctttcttctaaagttgattatgttctctatttttctcataatacattttattttgatgtgtccttttgagctgttttggttggcaggtatagaactcgttcatttatttggtagtcaatgatctgaaggggtctatctctctctctttggttggccttcattataagtttaatctacattttaattggaaattcaagaactcatcatagtttttatatatcacctatatattgtcactgtaatgggagtttataaaacaaaaatctatcataactctactttttgtcttaattttccctttaacatctctaatggtttttccctatgcttttctcctccttaaggtagagggtagtactagatgatgatttgctattgttattattattattataataattattattattggattttgcagggaaggaaattaatgctaggacacttcaaattccacacaaattatctggtattgaattttgaccactcttttgataaaattcaaagtgggatcagaattttattactgaattttgagtgtcctagtattactaataaaatgaccaacatagacttggtccatgaactattagaaaagtcttcttttagttacctttttactaaatccttatttgaag

SEQ ID NO: 112750 - DNA, 2989 bp, Cannabis sativa
cgcaggggcagaccgagttaccttgattcctttgatccttccttctgtagtataatcctgtaacagccgagataacatgtctgaggctaagatgaataacgtaggagaaagtgggtctccttgcctgagaccactcgtggggtggatagtgccttgtttgaccccattgatcatcaaattcattttcttgatttgtatacagcttttaatccatcctagcagcgggtttttgaaaccatggaatctgagagcctccaatataaaatcccaatccattctgtcgtatgctttctccatatcgagctttatcatcataaacccttttgaaccttttttccgagccattgaatggataatctctttggcaattgctgtgttctcggttatacatcttcccttgataaatgccgtttgcgtcggagagatgatgcaaggaagaatatctctaaggcgggaggttatgattttagagatgcatttgtagatcacattacacaaggcgatgggccggaaatcgccaacctttgaagggccctcctttttgggaatcaaaacaatgttggtatcattgatgtaatgtggcaggtcagcagtatcaaaaaaatgtttgatgaaattgaggaaatcctctcagatcgtgttccaatgggatcgaaaaaagatcacaggaaaaccgtcggggcccggggccttgtccactcccatagaggttaaagcattcagaatttcctcttcagatggatgttccatgagatcctcttgaagcaaattttccgtttccaagtgattccaattttcagctaccaatttggtacgggaattgttttttgaaaacgtactggcaaacttcgcaataaaaagcttggctatttccttcatatcttctatcgattccccttgatcatttttcatacattggatgtagtttcggcgtcgccttgttactgtgcttgccatgaagaattttgtcgagcggtctccatccttgagccaagtcacacgcgatttttggcgccagaaaatttcttcccttcttaggctttcctcgagatcagttctagctttggagtgagccatttcatccaagtgagtagcctcttcgattgacttaagagttgatcgagcctcatttatctgaaccgataatttcctgaactgcttcttgttccacttggacagagagtccttagtgtgcttgatcttgcgatagagattcaccataggatgttgatgccccttctcattccaagctcttttaaccacccaaaacactctggggtctctttcccacatcatttcgtatttgaattgaggctttgtacaatactttccacccagggagtccagcagaatgggattgtgatcagaagtggtagccgtaaggtgggagacaatagcattcggccagtcgattctccactcagtagaagccatggctctatcgaggcgggctctcttcaaggaagaccccacggatggatccaagcttttcttaaaccaagtgaacttggtccctgtgtaccccaagtcaactaacccagtacggtgaaccattcttcttaaatcaaaggagtatctcgttgtatttgaggcattgacataattcaagttttcaccatcttttagagtaccgttcaggtcacccattaagagcaaaggcatgttgcatttctcaatatactcccctaccttcttccaaaattcctctttttccccataggaaggagggccatatatacccatgattatccatggtcgctccggggggtcagaagatataataccaataactttgttcttgtcggcatcctgaatgttacaatccactcccaatttccagcaaaaagctaggccgccccccgttccctgtggagggacatagcatattcctggaaagtgcagttttctcataagcccatataacttctcttctattaatcttacttctgaaatgatcaacacttcgggatttaacttccggataagctccttcagttgtcgaactgtcgtggcattcccgagcccacgacagttccaagcaagtagtttcatgatgcctttggagacatttgtgggcaagtctccacggccccaaagcaaaaaacctgtttcatatcttcagcagttgcatcacactctcccgttatctcctggatggtacatgctggtttttgtttaaagcatttgtccacaagcacgaagtggttgtccaggtccacggtaagatcaaacttctcattatcccagtgagcttttattatttgcttctgtttagatgctgttcttttttggtttctcttgaacacatttggtttgacacccacactctgaatggcttttgctggtcttcctcgtcgacgtggcgtcgatgtctgtgcctcctcatcatttggtttcgtatcatttctatgagctaccggacgacccctctttcttttgagttttccagtttccacataaccaggggagaagctaggttcaactgcgattacaggggagggaacattgtaatccgttgatatttgatttgcagtaacagggggttgggtcgacactccctcagtacagtcctgctcctttatcttcaatggactaggcccaatgagtatcccatccagatctttccgtttcttaggcccacaatcgaattccatggacctgatatcgttaatgtcgaagatgggattaaatattgtgggctccctcatatatttgtctatagttcccagaccagttaaagtgttaaagcccatctcccaaagttgctttgaaggccaagggaggatttgggcctggctgccaagcagacttgtgtatggattgaaattgcttgggcccgaagatgagaaaccccggcccaaagttgactgaatgttatttgactccatcgataaattaggggtgccgttagcctctgaatatttatctcaggttggtatttctatctcaatgaaaggtgtaacgccctaatgctaaggcacgctacagt

SEQ ID NO: 112751 - DNA, 1674 bp, Cannabis sativa
catactaccaaaatgataaaaaaaaagtcattgcattcaatacttaaatgtgcaattaaacaaaaaaaaaatgaaatgaaaattatttcatttctaccatttcattacaactaaatgccaccttaaaatgttcataatgaaatggactatttgaatctatggctagaacatattgaatgtacataaatttttatgtcattgtttgtaatgggattttgggaaaaaaatggtttaccaaattaaagaaaataaaaattttaaatatattaaatgtaacactcctaattaaaacgaatttagaacccaacaaggaaaatgcttatacataatcaaagttttatgaataactaagagaagaaaacaaagcaaacaaaatatacctgttcgatatccctctcggcgataccacttttctgaggatcagccattcaagttgtgatatcaagtgctgccttggagtagactacccaatacacatttaaacaatcacatccccagatatatccaataccacaaactagtttccaactttcccccattgaaacagaacagacaaaaagaagatagaagagaagaaaacttcgctactcaactaactagcgtgtgtcaattcgtggaaacaaagaaagcaagaaatgccttcatttcatccataccccataaacgcaaaactcctctcagaaagcccttaactcacaatgctgcaaaatcaaagcccctaaaggccacgaaccaggctctcgaccaaattaacattcagctccaaagccaaaaaggaaaccctagaacagaactgcaccatcaaaggctcaaattcctccaaaagtcctcgattccagtgcaacataccacgcggaaagcagcatggtgaaataaagaaaaaaatcaaaaagatcgaaatcaggggaacaacgatcaaatctacctacattgcaaagaaagctaacaaaatctccaaatgcaggttattctcgaagaacatggcgtggctcagctccgacagccaaaaagggaaaagatttcagaaaaagaaagaaaactaatcgtatccagtattccgatagctcggaggatttgcttaggttatcaatgggcttcccaatcttggaagagctttgtattgggattgttaacgtgcgcacctctcctctctctctctctctctctgtttcttttttctttctttctgagtcaagggagaaaaaaaaaagagttaactcgttggtaatctcgctggctggctggctcccctgccaacgccccaactcatcacccaagccaaggccatattttgcattttattagaaaactagagaactatgccgcgctttgtgcgggtatcctagttttataattttgttatatatctgtcattaaaaaaaaaaaaaaaaaactattagactatatatacatttgtcacaagtcaaaataatgaatttaaaaacattagtcatgctagattatttaacgctaaataaagctacaattgataacatgaaaaaaaaaataaaaaaaaaaaatgtagggaaagaaaaaaaaggttatacttaatagttattccattttccattacatataaaggcttcttacttattctatataaaattacctcaaaaccaattttaattatagatagatatttatctgtgtattcatgcataaataaattattca

SEQ ID NO: 112752 - DNA, 12176 bp, Cannabis sativa
ctagtttttctattcataaagatcgcagcattttgtgtgtacattgtgtcattccgacgagagagctccatgctaatctttatttcaattctttttatctatgtggcaggatttctttgggaaaccagcattcttgactgtgtctggtcagcttaatgctgaaacctatgctactgctctttcagatgtacatcttttagtcatgtcctaattattatcttagataaagcgttgtaccaaaacaagatgtaataaaacggtttctcacaggtgtacacatttggccccacattccgagctgaaaattcaaacacttctaggcacttggctgaattttgggtaagggtttgtttatgtagtttcttgtacatctcttcttcaaaatttcttaaacactttctattctgaatcatgtaccttaaaatttcatttgtttccctttggttaaagatgattgaacctgaacttgcatttgctgatctgaatgatgatatggcttgtgcaactgcctatctacagtatgtcgtatgttaccttccttaactttttacatttcatcttctagatttgggtgaacaaaattgtgcagaaggaatggcctacttaagagttcaattttatcattctgtatctattttgtgatatctgcttctttgtttaaaggtgaaatatgttctcgaaaattgcaaggaggacatggattttttcaatacttggattgagaagggcataattgatcgattgagtgtatgagctcgtgtaacttaaccttcttactcatttctctttgtatttgatcaaatgatcttgctttatgttttgttttgtttctcattttcccctctttttattatcttgttgtcaacaggatgttgctcagaaagaatttgtacaattgacgtatactaatgcaattgaacttcttctaaaatcaaagaagaaatttgaattcccggtactactaaatgctatttgaacttcttctttgcattgaaactatttttttatgtactcatctttgtagtttgatttgttatttttttccttgttaaattaggtgaagtgggggtgtgacttgcagagtgagcacgaacgctatataactgaagaggcattcaatggatgccctgtaataatcagggactatccaaaggtatgctgctctttctctttttcactttgaggtttaaaattgtattgctattggtattttttttccttatttggaaaatctactaagttatacattataactatttcaggagattaaagcattctatatgcggcaaaatgatgatgggaagactgtggcagctatggatgtattggttcctcgggtaacttcaagccttttaatatcaatttttatcatattcaattctgagtttagtgcagtgcacatgtttattcactagtgaaaagctattagagaagattagaatgctgtttctttcaaaacattgttcgtataggtcggtgaacttattggtggaagccagagagaagaacggcttgaatatctggaagatcggttggatcaattgaagttaaataaggacagctactggtggtatttagatttgcgccgatatggttcaggtgagaattctttttctcttgtaacatttttaaagataaagaattacattcgaaattcatattgaagatgttatatataactagtttctgatttcatagttaagcctttttgtgtacatgatgtatggttttgtattttgttttttcagttcctcatgctggttttggcttgggttttgaaaggcttgtacaatttgcaactggtgtagaaaatataagagatgctattccttttccccggacacctggttcggccgagttttaagtctcatcaagttttgttaaaagctcagctttagtttcagcctcaactacaacacattaatttattcagaagccgcacatagctataaagccatttaaggatggtccaagagaatttactattttttgtttgtaatatctttaaattcaaattcattggaatcaataagagaaatttgagtgcatgcagagtgcagactctttaaaattatattgcatgttttatctgtcttcataaaaatacaaaaattgaaaagcaaagtgaattggaaattctcattatcacaaaaatatattagtaacattttaaagcaaaaaaaatgggataaatagttttaacaattgattcaatttcataactgcatttgaaaaggattggaaaggcacaagcatagaattttattcgtttgtgtttttcattttttttttctttcctttgtctaaattcaatacactatcatctcatctccccttgagagatctatggagaatccctttggactacacctcaaaagggtctttccttttttttggtttcttcttccaacaaatgaataaatgaactatacagaggtgtgttgcccacatggaaccagctcctcaagcctcagatgatggtgattcccagggtagttaataataataataataataatagtacttagaattgcacccagcttcagaattcatggcagatttaaggaggcataaggcaaaggaaaacattccatttactttttgtataatctcaaattctaactcgtaccatataccgtaccgtaccatacccaccactttgattttctgagggatgcaatggcaggaacatgaaacacccatcccccaactatttttgtatttgatcacgaggaacaaaactcaatatgtacatctttgctttactacttggctctcaaagctccacttcctggagttcatcagcaaaattgccaccattcatctgtgcacgcatcatagatgatgggtcagtgggcgaaaacatagttggaggcatgcccgacgacactgctcctaaaggttttacttccgtctcttttggagagctgaatgaatcgttaaaacttccactccatgaagccgttcttcgcgagagtgaagaaagggagccattgctatttgtcataactcgctggcctggaatgttacccatgcttgggaacctttgcatggatgctgacggcgggggaacctggaatgctgcattcccggtagatgtggaagcttcttcatgtgtccccactgttggcacgtcttcctgcacactttctgctatagcctccattgactgttctcccgaggcaggggtaggaatgaaaaactttgcattggcagcaacagctggcttaacagatggtacagagggcgaatgaaataaatttgctggcctaccgccaccctggttaaaagtgtcaacgtacctgcaatcgtgaagaagatgaaaggcatttcgatagggagaggagtttcataaacatattttgcaatatgattttcatagacaggaaaagcttattacatatcttttgaaatggtcagttgtgacaacatgcaacccacattttataaggggaaaataattggtgtttaccttgaccgaacacccacccgcccacgtgctgagaattgatttgaagtgggtggaataggtgggatccctgaagaatattctggagttgaactttttggatcagggctacctccaagagaagatgcatcactcttcaacgtagattgcatactgtaatctgacattccattctggaaggtggacattgttggaggaggtggcagagcagcttcctcagcaggggcctcaacaccttcttcaacccatctcttcagcttttcatcatagtagaacttgttctgttcacctaatttagccttcagtagcaacacaaaacattttaaaatgtgcattaaggatatcaatactcataatcacaggaagcctaaaaccaataattatagactacctgacgaccagagcggggccttaaaactaggcccattgttttttgcagcaacactgacccaaaaccgaaacgtgacatgcgagatgtccccccggagactgatccttttcctcgagaatcagctgaggttccttcctttgatgagtcatcctgatcatataatgaatcagatccctttttatagaaaccacataaaaaatgttcacacacataaaatacaggttttattgaaacaaatagcattgaagaatgaaactgaagaataagtacacacttgtcttggagttctaccaaagtctggctctgaaacacttctattatgcattgacattttattgccatcagcagcccactcactgatgggctccattgaagcagaaggcattaaagatgacatagccattgttgattgactacccgatactctaggagccatctgctgctggtgcaaatgttcattactgtggatacttccatgtgatgtagacggtgcaggtggcggcaaacctccaacaacacgatgtgcagtactatcgaaaaagttcagcaactttccaactaattttgtaggagccaaatttgaagtaaatcctccctgaaaaaagaatttcataaagagcgttcaaactaataatcaatcaaataacgataaagataaaagttatcggaaccaaactatacctgttgatgggttctaatcctgtcttcaagtgataatactaattgtttccaagtttctacttcaggtgctctaccagttttcagagacttcaatattgcttgacagtatctgaaaacaatcatatcatgatatttatataagtgagagagagagagagagatgtacttacttcaaagaatctgaaacctttcccacttcagcaagcatgtgagcatagactaatttatatggttgaaatggtagcaaaataaactgagaattcccaagcacctttgagtattcgtataactcagtcctctgcccaaacatcaaatcagtaacaatcagcaaaaacacaacatgggcggagaaccaattacataaacatatcaaaaatgaaaagttaggcatatgagaacgagatagcatgtgattggcaacaacgacaatcgaagcccaggtaataaaaagagaaaaactaaatagagaaaacgagtgatgtaagatatcctgcataaagtacaaatgactgtgagagaaataatacttctaacctagcaaaaataggatattaagagggagtaacttcatgttcagcataactagtaaggtttggatgataagttgaaagcatgacatatagaagtttacaaaaatatctggaaaagaaaactaggtaataaagaacctgaatagcctctggactagcataggtcctaggaaatttccagtgatctgctccaatcagacagagtcttgcactgtctgagtatgactcaaaatttgcttccgcaactatatagcagatatgtgctccagtaatctgaaacatcccttgtgttagatcatgaaaagcacaatcttccacaaagctttaaagaagataaggtactcgatacatatcatacctcactcttttctttccacaggcagtctccaagatggatgattaccaactcatcatcttttgttctgtttgcagtaattactgctagattctcctcccagtcatcaagcataccactggtgccaaactgttggaaaaatcatactattgtcaaacccagaaaaatagtaaaagtttccaaatttgcattgacttccgtgaacgctattgatttcaaaaatcccaatccacattaaattcgcaaatcttggttattgttgtctcaccagctttagcaatctttaatccagacaattaattcattaactaattcaaaatcagctaagtacacgatgttttattattataattattagtagagcgaagaaaaaaaaacaagaggatcaaagaaaaactgtaggcaaaagtatctcacatgatgttttagcccaaaccagccaaaagagctctttctaaatcaaaatctcacctgtgcaggctgttgaaacattgtaacagaacccggaacactgccatcagcaacagcatttacagaaaacacttcagctggttgccctgcaataagcaggcatagagtccgcagaggagatcccgcagccaattgtcggaaagccatttgtttgatagtatcaacatagaactggagtggtcataacaaggtgttcccaccaaaattaattaaagtagtttaaaaaaaaataacagcataacacacagcacatgcaatcacctgaataatgtttgaaatggataaataaaaaggataacaaacctgatcaccgagttgtgaagcaagaacaagtgcaggaccccacaattgaccttcttgtgcatactgtaaagcctctctctttctaccagaaactagaagattttgcacttcagaagcagttgcctgaaacatggactcatcttagtgccggatataaaggggaaatgggaaaggagaaagcaaattttacctgtagttccgcttcagaaggcagtttctgcaaacagtagttaagagcgccatactcagtgaattgtgctccactcgcctttgctgaagcaaaaagtttagcaactgctgcttctggggtatcattatcctacggagaattcaaatttaaaggcttatcagatgtataattcataaacgtttctagaatgaagcagggagcacccttctacggttgataagatgactaaacttaaattcaaataagaagagttatgctgaagtttggatctaaccattaacgaagtgtttctatggcataatgatacattctaatcacactctaaagcaatagaccaagtactggtgatataaataaagtgcactatgagaatattccatcaaagaaaaaagttaatgatagctaactaaatgagcagcaagttcaggaagcaagtatgtgacttactttcaatgcaacttcagaaccaaagggagaacgaagttttccataatgttggcaagctatcttaagcaaggagagtagcaacttcaatatttgacctttcttgaaatctatgtcagatgactcacaattcgtgattctctcgtctatccatttattcaactccttgcttcctacattgccgccaaccaatggaccaggaaaggactgttgacacaacgcacgaaggtaattacagctactgccggttgaaacattggtgttctctgtcacaacttcttgcatatttagaacagaaactatgcctccaacaggacccttaacacatgtaacaaacagaaaacatgattgataagccccttgtgacataaatgtatgctatttaaggcttaagtccatcaaagtaacatcataagatccaaagaagaatatttcctgaatgaaaacctaatgcagtcaaatggataaataatacatttctctgaaatcccttatctgcaaaaaaaaactaattttccaagcacactgagcaaataaaattaaataagcaaggaaaaaagctacattgtcttacctggcttccataagatgagttcccaacgttactatgatccttcaatactatgagttttcctccaaacccaaaagttactagagcatgtggaggacgtccatccggtgaccttccaacactaggattataaggtaactgattgccaccaggaaatgattgttgagatacaggcttctgactgctatagtaatcatttgagatatgattttggtcgttgagatttacttgattaaacggctgggtaacagggttaaagccttggaatcccagagtcccgttggtctcattgtgcccttgattagctctattgtacgattgaactgctccaaaagaactcaaagatgcctgcggattttcatttgtataaaattgtgaaccatcatatttactatccagttgctgatttccaccaaatgctgttgaggctgcactcttaggtacttcagcttgccacaagttcagattgttttgattactattattataagatccaccccatccaccttcttgaccttggccaccaaggcctcttgacccatgattgtcatcctgcctgtactcttcaaaggaactacttttgttctgagaatatatattacttgaaacaaccccattttgatcctgaactgctggttgaacagtcgaagtgtaagaatccagagttcgccactcttgggcgattgtgtcgtaataccaaccaggatactggggatcaaaaatcatatgttcaggatacccattgcttgcttgggacggttgattccagtcggacacactgtgacttgtactggtttcagtagcaggtcccacaacagagttggatgtttgctgcacataagaattggtttcagcagcagttcccacagcagaattagatgtttgctgctgcatataggcatttgtttcagcagaaactcccataaaagaattagactgtagctgcatatgagtattggttttagcaacagttcccataggagagtgaggcgtttgctgcaaatatgaaatctcagttttaacttcagaaacagcagtccagtcactgacagcagaattcgttccaaagctaccttgagcttgagctgtaggatcaacaacatccacttggtaccattgcccagtatttgagtcgtacttccaccccggataaagattttcccagtattgactggtatttacatcctgcacatttgtattttgctgctctactggagcaacaaaattttgactttcctgatgttgtgtgtaattaaccatattgttcaagctttcatccctatgctcttcatgggaagggaacatatttgcttgagtggtcaaatcttcaccagcttttccaggaacttccccagaaacacctgcatccaattcactaaaaaagtcggagtaggatccaaacccatgaccaccattctgagcagaatcagcatggaacgaactccaccccacaaccttaaaccctccactgccggactcattgctcatggattctaacctcaattcagatcctgtcccatcatttttaggctcgggaaccgcatctaaagctgagttcgccgatacaccagaaatcccatctttcgcattaacttcaacaacactcttttcgcaaattatcccagacccatctgcagcatctacttgggcagcaccgtcttcagttttcagttcatccaccataccttcaccgctaaaatcctccaatgcaggagattcatccgcaatgctaagattagcaaacgccttagcatcgtcggaatcattaccctcggtgaattttggggcagatgattccgagggaccaaaatcatcgtccaccaatttatcgaagaaatcctcatccgtctgatcctccacctcgaatggaggaggattagaagccatcgacctaactaactaaaatcaccctacgatcccttttcccttttccgatctcacagaattcaaaaccccaaagcaaactacttccgacgcggcaaaaaacgaagcttggtgaagaaataaaaaaaatgtcaagatccaggtaaaaatccaccaaaatcggtacagcaacgcagcaaggcaaggtcctaaacctaaatcaaagagattaagcgcgacaatggtgaagatctagggctgttgaagcaaaaaaaaaaaaacaagtggaaattgttggggtcgattttgaaagcattatttgattaaaatcaaaattcagaaacaattgaagcaaaattaccttagagatcaaggatcggagatgcagaggtagagagagatgaagaaggaggagagagagtgtgtcgtagcccatgaaagaagacagccctcgatttcgcactacccacccaccaacacctccattgtgttctttttttttttttttttttttgaaattaagaaaaataaataaataaataaagagagcaaagaatcgatttataaatgttaaataaaataagatagtattgaaatactaacttaataaaagtctttattttgtttggtttctaataaatataattaaaaattaaataaataaatatacagtatatctatagagaagtagaagatgtaagaataggattgtactataataataataatgtgtatgtatttccaactataattaaatcataattctccatatagataaattcaaatttataaaatttattgttaattattattaggaagtgtttctatggccaacggtgttgtttgtcttgttaagggatggatctaaatctgaaataaatagtgttgagttggcaaataataaataaatacatacaattatttatttactcaaatttatatatattataatcccattcaataaaaaaaaaatatatgtactattgctatgattcggcctgattagtagtctaaatataggttaagttttttgataccacataaaattgacatgaactcgagaagcataagcatgaaatataaaaaaaaagtataacttaggcacgacaagtgaaaaaaaaatataaacttaaatacaatacaatacataatgaattagctcgaaagcataatatattaaaatgtccaattgtccaataatataatttaataataataataaatatttatttattaatcaaaatgataataatattcaaattataattatgtgtaattattgaaaaaatatgtaaaattaattaatgctataaaatacacatataaaatacacatatattagtagtatttaactcatcaatatataataaaaatgtaaaactatacattactaatttgagcacgtatagaaaaaaataagttggtctatttaagaaaaataagccgactcaaataaacaactatgcgaatttgagtatggtacgaaattactagatttgtgaatcatgtcgggtctatcctataaaattgttgcacgacttggcatgacttatttttttatggcatgatacaacagaattcatattttaaaaaacatgaaaaatatgagttagactaacatgttacacacctatttaaaattatgggcgagattacataatttattttttatttttattttttaattttcgggatatttgtaagggtttgatagtatattaatggtagtaggaatagaaatcatgaaagtcaaaaatgacaacacgtaataatttttattatttttttttagaattaaataaaatctattgatgaaaaaaaattggggctgaaatcttttgatgggcctgaatggggcttcctctttgaatattggaagatgtctgcatacatatgattgggcttccatcgtacataaatgggcctagtccatcggccagataaatgacaacccaaaaatgtgaaagaagaaaataagtagataaatcattcattatagttggtaatttccacttaaaggatttaattagttcaagtaatgaatctaataatataggggcattgagaaaaaaattgggtttaaacttcagaaatgttttttggtacaattttttgtgtagttgataaattttactatgagtaagtatgtgtagattaggggtgttaatctaacttaattcgtttgtgcatgcattcgcattaagtaaaaaatttatattttagatttaatccgtataataactcaaattcaattcaattgttactttttaatatttattaacaaaaatattgttttcacataagtaaaagcaaaataaaataaattataattgttttatttctttaacaacaaattaaacaagctttgcctgttgccaaagctcagtataaaaaaaaaaaaaagttattgatttaataacttgttcaagatgtaagagcacttgggaatcaattggggatgctttatttacatgtaagtttgctaaggctgtttggaagcgaacataatttaatattgattttaattgtgctcatgctatgttcaatggagattatctaatccacaaagcaacaactatggataaggttggttttgaagctttagtatgcgttatgtggagcatatgaaatgacataaataatgtacttcatggtcgaataagtcgtgttgcttctgctcttctaactcaagttataacctatatagataaatatcgttcagctaagcacataagcagagataaacaacaacctatactgcaacaaaccaaagcttcagatcctttggcactaaaccagcagcaacattcaagtccaaggccttcccaatagtgttacaatcagcgtgatctgcaaaaccagcaacattttccaccatatactgtaacgtccccgcttcaagcctcca

SEQ ID NO: 112753 - DNA, 10129 bp, Cannabis sativa
aaaaagtgtcatattttttatagtgtaaaatatattggtttaaaaaaaaaaaatttaaaacttttaagtataaaaaatcaaatttccttttgatattataatgcctaaaagatttaatttactaacaacaactaccggcttattggatagtaaagtaaaaccttaatataataatttagtttgttttaaaaaaaaactgtacttagaaaattttgaactaagagggatattcttattcttcttcttttctaatatataattagaaaattaattagcataaaataactcaggtaattatataatagccgttcaggtcttgacctaccaccaaaccaaaattcaatttaattttcaaaaagattcataatgacatgcatgttaattaagagctacttgtatttgaagtaattaacaatcgatcgttattttgggaggggaggaaaaaccaagattgttattattgctaatcttacaatacccactacctttggttaaagggaattttagtaagatggaaaggtacgtacgtagtatggaaaaagggttagtgcaaaataatttatatatagcaattttgtatttaaaatttaaattcatacttatatctcttttggacatcatataagatagaagagtgtatgttattgttattattattagaataatttgcagtataaatacttaaatttaatttctgttgcaatagtttgtaaaatatatttaacaagagtgtgtgttacatttatagttcccaacattaaaattattacaaaaagatttatatctctaataatcaaacccaaagatgaatatagaaactttggcaatcccactcgatatgaacgttattgtagccaagaaaacaacattgagctaaatcttgccaaatagcaagcttcggccaagaaagatccctccaatttctgagttgttgagcaagagcttccctcagagagtttatagaccaccatcccaaaaccacaaaaatgtgttgattggtcgatggcaacgtctttataactcttgaagcttcccataggcggtctgagccacttggacgcaaccttagacgaagaagaaggcctcatctcagatgcctgatgaaggagaactagaagaatacctagtaagccaacaagtaatcaccatgtttctttgaaaccaaatcctccacaaaatgactaggttttactcaatttttttttacttggtagaggtgagataaaattgttattgaactcataaaaatcactcactagagccctcggatcacccattgaaaatttacataactttcttcatgacacactttccgtcctttcaatcccataggcaccaaagatgggacatactactcctttggtcacactttccatcctttcaaccatattttgatttcttaccaaacatagccttaacaagagaaatataatgaaaaaagaatgaggggaggggttgagaagtctcaacatttgatcaaaagggttcacctaaccagaatttggaagtcgtcatgggaatgatttggtgtgattgtgatggactccttttgcatgatatttcccaaatcaaagaatatggtccagcaagccacatgccaatgttcaaaagccccatttggcttatccttttgtaaccttgaacatgggtttggttgataacagtttttaattttaaagtattgctattacgcactacaggtgcgacaccacctaaggtgacactttataaataattagcgatattttataataattattaaattaaaataacatttttcgttttggtacactaagttagccaatgaaggcataatactttttgaagttttgagaatttttttgcatttgttttgaccacatttaagaaataaacaaaggtagtaaagatgccaaaagttcatgtaatgtacacccaacaataacactaaatattccaaaaagcaaatcagaaaatataaacacattaacacattactaattttcgtgggtggcacatcaacatcaaatgaacaatagtcttctcttttaccatatctgtacgtttgctgatattctttgtttcgttaaaatgtgtcaaaacagacaaaaattgttttcctttcatgccaacaaaattctgaataattgtatgatagcacatttaagttcagtgcatcaaacaaaacccaccagctgagttgactagtacttcatctgtctttcccttcatttgaagaaaactctgttctttttcaaaaatttctcatttaaaaatcaatgacttcgttagaatggagccatcaaggatgtaaataaacgtgtggtcaaggatgtaaaccctaaataaaaaaaaatatcagtctatatgcccaagattaggggtaccaattcgtgtttatgagtcagtgtctgaagtttaagtattacaagcaaatattaaacctaaactcgacccatgtattaattgtttcaaacaccctaactcaaatccaacttatttataaacgggttgatttaatttaacctgtgtaacctatttataaaaaacatttttaggagtgtgagtaaaaacaaaaatcttttataatttttcaagattttttatttttttgtgaacttaagttcctagcttcttaatttttttttattattattttgaaaaagaaaaagttatatattataagcagataaataaaacttctaaaaaatagtgaaaataagccaatattattctatatctataaactaagaatttgttttggtatggatatttagagttgggaaaattttacaattttactgctacacggaatttttttacaaaaatactatatttttttttaaaacaactgcaaaataacaaaatagaataattaaaaacaaccgtggaacaacagtgaaaactatttttgaaaaaaattccatcccacgataaaaaagaaaaaaaaattaaaaatttcagtacgtagtataaaaactcctagttattttcttattgaatacttttgtatatcttaaagttttattggaaaatttctatcatactttccataaatttacaacaaccaccatgttaataaatagaaagaggtctctaggtgatagcaattgaatgacaattatttcgctacatgacttctaaaattagtttggtaagtgatataaagcttcagaatattaacaaaatcaaaaagaaaaaatcaaacaccaagaagctatattatatataagccaaaacttcaggagtggagcatttacagcttatcctaacttggtttagacacaagacaaccaatattaccacatacaaaatggaccccctcttacagcctcaacccctccctaaaccaggaagaagaagattggagtaaggttctataagaatatcaaagttgtgcttctgtcattctagtatatcagccattgtagggggaaaagggaacatagttttgaaatgcaccaacaattgaaagtccaacagtgtagacatccctgaaacatatagggcattgtggtgggtttcagagtcttttatcaactgaatataaaaaagaagatcaacaaaaacagcagacagagctccataaccaagtaagatcaaactatctactgagtaaataaatcaataagatccagtgtacttcatgaaagcatgacaaaaagaagtgaggtttttaactgactaaacaccattccatgatgttatatttaccatggagtgactgaggacaatgcaaagggaaaactgaagggaagaaaaaagaaaagaaaagtatggtttccaacatttttacaagccatgcctatcattcttgaatctgaaaccattcttgtagattaggattttagtgtgcatactaaaagaaattgatgaatggcgggcataaattaacgaagggtgctattagcaatagagatatatgtaagaggactcataacaaactattaaccgaaaagaataaaatatatcataactaagagattacctgatgtcactattgaaaaaaatctcacatatacacttaattagctacttctgcttcttctacaccagagttcaactcctgtgaagtatcttcagattctgcaccctctttggctggttgtttgacaaattgtttactgcgtgccactcgaattggtcttcccataaacaactaagggaagagagacagagagaaaaatcttatcagggaatctccattttaaaagactcttataaagctcctttataattggcttatgttcacaaatcataaatattaaacaacatgaacaaagccaaattacctttccttgaatagaagttagagctgcatcagcttctttcttggatttgaaggacacaaatccgtatcccaaggaccttcttggattttcatggaatataacttctgcagagactacactatgaccctcatagttaaagaactctttgagatctttagctcttgcttcaaatgacaaatttgcaacaaacaaattgaatgtcacttctggcttaggttgtgggggagtgacaactttcttctttcttggtctggcatagtcaagtgttataacacgaccatccacttcctacagcatttgtttagaagaaataaaacttcttttagtgtagaaaacacgacaccgaaaagagaaagcaaatgtcacaagttctctattaacttgtttgataaaatgaaggaaagggatacaaagatggcaaaatagaacagaaaattctgtcatgtcaccacaagggttttgtgaaagaatttggtagagtccttgactgaaattcgcgtattgaattgcagtacaaggagctatttttccagtacatctggtgagaaattgtacatcaatcaacacaggtcaaaatacaaacaaaaacggaaagggatgctatgcacgcattaagattgtagctacatggttatgtagataataagtacacttagtaaaaagaggtaactaaggttgcatttggtaggaagaataaaaacataggaataggaatgagaataagaatatgaataggaatggaataaaatttaaaatgtataacaaaattattaaatttttatcatattgcattggaatatcttaccaaaatagtggaaaaatcattccattgttaaaatacaatcaaataaaagaatggaatttccaaccaaacacaaaacatatgctgtctttctcaaaatgaccataaaagaattttgagttacaatttgtttaaaattagtggaagtgattttgataatttaactttctcaatattgtcatattagttgtttagattaaaccagaaaatgaaatatgcttacacacgattgaagattattgagagcagcaagagcctcctcaggtgaacccattgtaacaaatgccaaacccctgtttctggtcttgttatacatagaaagctaagccaaacacaacacaacacaaacccagatcagaaacacgcaaaaataacaaaaacccttcaaagaaaaaacattgaatttcataattataataataagaaaattgaaaagctcacctcaacgtctacaacagttccatacttgtcaaaaagagcacgaatatcttcgggggtataattccaaggaacgttctgggcatataatctgtctttataaacttcctcggtgtctgactcaagttcttcactttcactgctggtagtggcaccactcaccggagaagattgaagtgcttggtcttgggcagtggaagagcaatggagaacgaaattagtattgactcttttggtcgtaaatgaaagtttgagagagttggaagtggcagagatatgagactgtgaatataattgaaactgtcgttctatgggaaaacatgtcgtagctgggaagcaaagaaggcggagggaagccatagatggatgccaagctcagagcttcgagttttcgaactagaagaagaggagttcgatgagtcttcaaaggttttggataagggcaaaagtttggattttggggggacgcaatgcaacggcgtcgttttagagtgtggtcacattttgttgttttttgatttgtgaaccaaactaaactacgtagcaataaattgtttgatattagaacaacaataaagcttcttattaagattttgatctatattcaaccaatgaaccacatttaaaatttgttgcatcttatgtgctaattagggctcttacgacacaattcaaaaacgatacaaaataaatatgtttgtgttacacatttaactttcgcgttgaaatgtttaacatgcttattaaacgcgttaattttagctcaacacactaactcaaaataataccattataacaagcataaaaaaataatcataaaaataaaattaaaacaatgaatcttatgaataatttttgtatgtgtgtttaatctggtcaatttggtgctattatgtgataatatatttaattgtgtgttatgtgataatatgtctactcttgtgaaatatatcaattttatttttggtttatgtcacacagcacgtttattaaatgctatcgtgttaccttcatgttcactataaatatgtcgtgtcataacttgtcgaaaggaacaaacgataacacaaattacaagccctaaattgctaataaaaaaaaagcttatgattccattctctttgatatggtcaagttgcctcctttcatttctttgaaaacccaccccaactacaatacttgtcttgttctaaatccaaaaaagagtattatatgatgatctgtgaaaaaaaaaaaaaccatcttaagcattctttgaagatataccaactaccactataggggatattgatagtacaattaacataaaaagaagaaataactgaaaaatacggtatagttgcccgtacattttctcttaacgttttacaagacatgtttatgagcagattttcttgctagttctcttgtagattttttcaagtattataagactgcatacaagcattagcgacacataaatttaagaaaaatattggaaagtgaagtcttttttttattttattaacattgaaaagtgaagtcgagctatatttatattatagcctttttagattagaaccacttatgagtgagagtactcaattacaatcatgtacacttattaaatcagctatttctgcttcttctacactatatttaactctcgttaaatattttttagactacacttttttatggcaggtaattttgacaatgggtttgaggttcggggtcggggtctgagccagtgtttgggtcaggtccggctctgggctcgggggtgggatccaaggtcgagattggggccaggggttgggatcctggttctatgattggggtcgaggaatgacaccaagtttctaccagaagtgttgggaggtggtgaaggagatgtggttacacaagttcaaaatttcttctcgtcaagggttcttcaagagggtctcaatgctacaaatgtggttcttatccccaagaaaaggcagcctagttatatgagtgatttaagacatatttcgcttgtaatgtgctcctaaaaatcataacaaaagttcttgcgaataagttaaaggttgttctgcccactgttatatttgacaccgagagtgcttttctccaaggtcgtcttatctctgacaatattatagtttcttttgaaattatgcattatttaagaagaaagactcaagagagaaatgtcctgatggccttgaaactcaatatgagtaaagcttatgatagaatatagtggggatatcttagagcggtgttgctgagtatgggctttgatggaagatggatcaatttgattatacactgtgtggaatcgatatcctatacttttttccatgttggacaagaaatgggcccagttctcccatcctgttgcattcgtcaaagagatcctatatctcagtatctctttatactttgtgttaagggctactctgcacttttaaagaaatacgagattgatggcaagatccatgaatgcaaagtggctagaaaggctccggtgattttccatatgctatttgctaatggtggttatgttttctgtagagctactactcgggaagctgattatataatggagttgctgcatctttttgagcttacttcgtgccaaagagtgaatgttgagaaattgtctgttttcttcagttcaaatacaaaaactatgatgagggatttgatatgtgggcgaacagggatttatgaagttgatgataacacctcctatctgggtttgcctaatactatgggacgtaagaaaactgccattttgggttttctcaaggataaattgcagaagcgtattcaagggtggaaaggtcattttctttctcgaacaggtaaagaggttttactcaaaacagtcgcacaagctattcccaactatgcaatgagtgtttttttgcttcttgtggaaacttgcaaggaattggagggccttatggctaagttctagtggaaagcaggctcttcgtctacaaaaaatattagctagatgagttggggtcgaatgtgtaaacataaaaatgttgggggattgggattcaggagtctcccaggactttaatttaactttattggggaagcaagggtggcgactacttacaaataaatcgtcattgcttggaaaggtgtttaaggctcgttattacccaaatgatttgtttctagatgctagtttgggcaataacccgagctttgtttggtgtagtatacatgaggctcagtctattgttcgggctggtgctcgaaagactatgggtgatggctccacggtttcgattctacatgatcccttgttaccttgccatttggacttgtatgtccattcgaaccaccgaggattgaaagacaaaagtgttaatagtctcattcatttggatgttaatgattgggacacgaaaatcatcaatgatttgttctcagcccgtaactgtgaccttataacttctattcagctgagttcaaactaccatgtggattgctggtcttggaaactcgaaaggaatggtttatttattgttaaaagtgcgtaccaattgttggaaaatctcaaaggagattggattgaagatgatacttcaagtttttagagaaaattttagaatttaaaatcccaccaaaggtgagcaactttatttggagagtcgtttcgggtattcttccaacttgtgtgaaacttctcgagtgtcatgtggttattagttacacttgtccaatctgtcatcaggatgaggaaattactcttcatgctctaatgggttgttcttttgctagagcttgctggaatagatcaatggtcagcatttctaattggtcaaatgtgaatttcggctgctggttttagtctctctcggcaggtatcaatttccaagcattagaggaagcggtaatggtcgcatggggtatttggaaagcccgtaatgagattgtttagcaacgaaaattccctactgttgcatttgttgtgctgttagcaagatcactccttgatcagtttgtttttgcacaaacacggaggacggcttcgttgtctaacagttctgtgggactgcattctcgtgtgcactggactacaccagctactactcagatcaaggtcaatgttgatggagctctgtttaatgatgtcagccgttttgggatgggttgcttggctcgaaatcatgcaggtcaggttcttgaggcctacgctaaaagcagaatgggaattgttaaactagagattgtggaaatcattgggataaaagaagctcttagttggattcagcgacataattggcctaatattttattagaaacagatagtttggtctctgttcaagctctccatagtaacttgcatatgtcgtctgagtttggtttgttggtgaatgattgtcagattattttatctactttgagtcatgttgttattcattttgttgaacgatctgtgaacaaagccgtccattgtttggtgtgtagctcttatttttccctaagtcgtgtttttctgaattattagttaactcctgaattatgtagggcctgtttggcacagcttttggaaaagctaaaagctgctttttgaaaaagttgtgataaaatgtgtttggtaaacagtcaaaaaacaactttt

SEQ ID NO: 112754 - DNA, 4060 bp, Cannabis sativa
aaaccaaaatgaacttggctacctaagctaagctaagctagttgtcttcttatttttcttcttgcaatagtagagagagagagagttggttttggttaatgcaaattacaaagctaagaaaggaagaaaacatcctttcggagatcccaaagggcctaacaaacaccccttcgatgcaatccaagtctcttctcttcttcatttaaaccaacaaaaccccccctttctctctctcattctcattctcaatctcccatggctgccattgctgcttcaaacgccgtcgtttccaaatcaacacgactttcttccaactactcattccgaccttcctccgcccctcgaaacttccatccatggacttcgatttcccttgccaattccaagatttcatctggtaatcttctttactcattcatagagagtaatttattctaatgtagcgttggaatatagctgagattgtattgattcgggttcaggttgcgtaagagctcaggttactcctttggaacaaactagtgccgctgcacctgctcaaagtgtggaggctcctgcggtcaatgtgtttggaacctctagaggtattgcggagagttctatgcaaatttttgttgttcttatttcatttatttactattgtgaataaatctgcttatattatgtgtggattaggaaggaaatggaatttgaagttttgtggaaagagtattacaaattggattcgattttttgggtgtgtatgtaacatatagtgtaataaatttgcttatattatgtgtgtggggtaggcagaaaattaaatttgaattttggtggttagttgatttatgaagaagtaatacaaattggattcaattttttttttgttttgcttgttaattgtgaagttcaacttgtaacttgttcttttttttctgttttctttttggtgtgtgtgtgggggtaccatttagacattctctctattctgaagtcttattgggatagtatatgtatcttattgggtgtaggttcagtgtctacaacagtcagcccggttgagaataaaactccccttagcaaattgaaagaaacagctggatttgatggcagtggaaatgaatcaaccgttagcattacagttgttggagcctctggggatcttgccaagaagaaaatttttcctgcacttttcgcacttttctacgagggtttcctccccaaggtttatttcttattatttgtcatgtgaaaacttgtggctctagtgctatcttgtcaatgtcagtatataatttgcagttgtttactgttgtagcattttacagtgtatggttatgcacggagtaagatgaccgatgcagagcttagaattatggttagtaaaacacttacttgcagaattgatcaaaggtgaaagtcagctctttttctctgtattcttaatttgttttagttattatagcccaagttattgttgctcgtgtactatttaagttgattgggacatgacacgttggttcttggatatcagggaaaattgtggtgagaagatggaacaatttctcggaagatgtttttatcattctggtcagtatgattcagagaaaaactttgcagagctagacaagaaattaaaggaacatgaggtaattggtgaatgggcttgcataatgtacattttataattttctaacgattgtgaaactaatcatcaaattccattagtgacttgtttgatttcatatatttgtaggttggtagggtatccaatcgcctcttctatctatctattcctccgaacattttcatagatgctgtgaagtgtgcaagtttgtcagcttcctctggtaatggttggaccagggtcattgtcgagaaaccctttggccgagattcagaatcctctgctgctttgacgaaagccctaaagcagtacctagaagaggatcaaatattcaggatagaccattatctgggaaaggagctggtagaaaatctctccgttctcagattttctaaccttatttttgaacctctgtggtcaaggcagtatattaggaatgtccaattaatattctctgaagattttggcactgagggtcgtggagggtacttttcttttgccaattactggtaactttttgccctgatctttggcaagagtttatgtcttagattctttcttgtttttatgtagctacttcgacaattatgggataataagagacataatgcagaatcacttgcttcagatactagcgctctttgcaatggaaacaccagtcagtttggatgctgaagatatcagaaatgagaaggtttttttacttcattttatgtatatcttaaaagcaggctactgtaatttttttgacattttgattcacttgtaattgattttccttatattctatgcttctgaacaattaagctgcttggtgccaggtgaaagttttgcgttcaatgcggccggtgaaacttgacgatgttgttgtagggcaatataaaagccatacaagaggaggtatcaattacccatcttacacagatgacgaaactgtccctaagggcagcttaactccaacatttgcagcagctgccctcttcatagacaatgcaagatgggatggagtgccttttcttatgaaggctggaaaagcattacatactaaggggttggtgtttttttaaggaaaatactccattgtctttagtttttctagtttttgattgacaattcatatttccttctgatattcaattttctgttcatcttttccagggctgagataagggtacagtttaggcatgttcctggaaacttatataaccgaaattttggaacagatcttgatcgagctactaatgagcttgttattcgagtacaacctgatgaagcaatttatttgaagatcaataacaaggttcctggtcttggaatgaaacttgaccgtagtaatctgaaccttcactatgcagcccggtaactttattattaatattgtacagatagttatctattctattccagtggaatatattgtttatggttataaaaatttctctggcattttccttgtagatactcgaaagagattccagatgcttacgagaggttattgctggatgctatagaaggagaaaggcgtttgtttatccgaagtgatgaattggatgctgcttggtcattgtttacacctttcttgaaagagcttgaagagaaaaagataatcccagaatattatccctatggaagcaggggtcctgttggagcccattatcttgcagcaagatacaaggttcggtggggagacgtcggacacgagcaatgaagttgtagcaaccggattcaggttcaatgaacaatcattttgagtttgatagttcattagagttgtgtactgagtaatagtgtagttctttcttttggcttaggaagagtgaaagaattaagtgggataagtagcaacattggttctgtcactcttctttgtcataattgagtttgtactttgtataaataaattcaattctcaggcttttaagtcaaccagattgcctaaatacaaaattggactcttaagcaggctctctatgatgtttgttaaccaataaatttgctttagtttttgagttgaagagagtgacaggtgtacaaaagcatagagcttgtgattcatttaagcgtttatattcgcctataattattggaaatgaataaaacgaatgaactgctcataaggccatttctttttcttaataccaaataatgtggtttgtgaattatgctaaatcttaaaaatgtacttctcacgatgaattatagaaaaaaaaaaagaaaaaaaaaacaaaaaggaatactaagaattagggatgttcataaaatagttaatctaattcaatccgtacgattcaatctaatttaatctgtaaagtgcggatatttacacttgtgtggattggattggaaaatttaaaatccgcacttgtgcggattggatgtttattgatatgtaaaagtaaccgatccaatctaatctacacatatttataaaagggataattacggcaaaag

SEQ ID NO: 112755 - DNA, 6719 bp, Cannabis sativa
  modified_base (6343)..(6344): a, c, t, g, unknown or other
tttctaggttagagttaaggccttatataggaagcctaaaacttcaattgaccgttaaaagcctaggatatttgcatagttaattaattaattacaaaagaccacaatgcccttgagcatatatattattcaactattttattatgcttttaaggcccaattcgtagcccatatgatgtagtccacgtgtagaagtgcagagaaaatcgtacagcggttctcttggccggccagactcctgcagggagcaggatggtcgaccatgattcagtcctaaggctgaccgaccatagagctgacaaggggtggccgaccagcttctgtgtggaagctagtctatcgcttgatgcctgtttaagtgtcggggtctccgcgtgcttaggtgctcacgtggccttcttattggtaagctatactgccacgtgacacttgttttgtctatgtaagcactaccacgtcaggaggacgaaaattgagataacaattattatttttaatattgcgtgtttgtttaattttacattaattttcatcaaatttttaaaactttaaatattgtttttaaaaaaatttgtttaatttataaaattttaaaaatacagtgaacaaaaataaaaacataaaatataactaaataatgcgcgtaacaataatcttataaagttcaaaaataaaatttactctctatgtttttaatgatttggcaatatatatttatatatatttagaggccttttaaatgtagtgctatatttgtatatgagccagctctagctaggttatatttcaagaaaagagtgcgaatattcttggcctcgagcttagttagtaaatgcattccccatgaggattaataaagtggccacttgttcattaatgaagctaaaacagggcatcaagatcagaccccgagggagtagagtagtgccccccaaaaaaataaaagcaaaatgtgtaacttgtgtcacaaaatttccaattcttacatgcgcaatggccacaaaattttactggtgtggatcacagttgcgatagaaagtaattagaagacaaaattaaagtgaagtaaaatacaaagtttgaaagcgttctatgtaaacgggttaagagtcactcagtcacatgcatatgagacaaaagtttactatatcatgtttaaatggcagtactagctatagtactagtagtgtaactgtgtaaggtttagagtctatctataatgacttctaattcttagtagagggatatacaaattctaacgtgtactattattggttatgtatagttacggtactattgcttattactttttttttgttaaaaaaaaaagttcaaatataaaaataaaaaagaagaaaattaaacagaaaaagtgtggaagaaatatacgaagacagaaaggagagtatgttaagataaattttattttcttgaatgccaaaattggtgaagatatatagttgattcacaagtatagcattgaaactctaaggctctgtttggttggtgtgaaataatgtacaaaaaagtgatttgtctctctcttactcctctttctgtcactcatcacttttcttggctgccaatttggtatgtttcatcttgatagaacatgcctcaatccttgttaataaacaatgtttgggaagctattatatcttatgtttagggtggttgtacgcaatctcaaatgttaggtaacagaaatctacctgcaataatctaaatattaaagctgccttgttatgttatgtgtacatgctaacattattgtagttgaagtttagttaatatccaattaatgtgtatggtcttacatatacaaccacgtcgcaactagtggcttgttcggacttttttattctgaccattcatcaccaatactaaatctgcaagaaaaataaaatattcctattatatatcaactacacattttcaaccaaattcatttaggtaaacttgtttatcacttaataatgatgttcaaaaactggaatcatcatctgacatttttgctttttttaattaatataaactttggaaggtgaagccaaaacattgagctacaaaccaagtgagagatatgaatttaagtaattaatccattctaaaagttcacttttgcaatttctaaagggattcttatattatgtaagctataattgattaggactaatctcccagctagatagataggccgaataatagaacgttggggagccatgtatatgatataggcatgatattatacgaagtattaaaaaaaataggtcgtcattaaattaaacatcaactctaattgcgttcccaagagacttaatcaattacggtgacttttggatttagcaattaaatttagtctcatttatgtattacacaagaacatgatataatctttattactttggagtcctcagccatttaaagtttgatgtgaaagttcccaactacatttgcaacttcaaataccaaagatttctccctttccttccaactccccaagttaattgctctttgtgttaaaaataaataattaataaaaagaaataactttcgaagacttacacacaaagggagaaagaaaaataaggaagcaaaacaagtctcttgtcatgttttggaagctcaaaataatgggtactaattaatagaggcaagattcataaaaatcagatagttattctagttgtcagcaacaaatatggatgtgccatcaagtatatagatgaacacgaatccctttacagaagtcaatagaaacggaacttataagttagaaattttctcttttatttctacaatatatgattatgactatgttgtgttttgtgtttgttagaagtcttaaagtggaaaagaaattgaaaaggatctcattggttagtcattctttatggggacttttgaaagtcataagacgacccattagaggtggttttatatgtttggtttctttttctctttcaaagtagtaccatccccaccactcggagtcattttgtgtgtatctatctcaatataagaaagtggcactcactctcacaacccaatccattgaaaaaaagaagaaaattaataaagttaatattcatagcggtattcatttatttttatttctaactgaaaaatagagtacgattctcttctcagttgttacagccgacatatatccaataattttattattaccaacaatgaatcatttttggtggaaagtctaccataaacttttttaaggtgcaaatgtgtaattacaaaatagtgtaattattaattaaagtattaattagatattatatttgaaatataatgtgtatttagaagtgaaatagtaattggatatcaatttttatttatttttgacatatgagttcggtggcattaggtagtatttctagtttttaattttttaatgatggtaatgaaagtagaattttgttttgtaaagaatatgtttggtatacaaattttgttatttaatttttcaaataaaaatagtatattttgtaattattttgattttttgttttttaaaaatttatttttcgattttaaaataaaaaaattaaaataattttaaagaatatgtctttttgaaaataaaactacttttctaattaaaaaaaaaaacaaattacagaatgtactctaagtcataatttaaaaatattaataattttgttgttggtggttttttaacaacaccaaataaagatgaaaatataattatttaataaaatgcgcgagtactcaacctagaacagcgagtatataaaggaattacatagacaaattggaaaaactgaaaaacacaatgaacacaagagaagtatagtggttcagtcagatcagggtctgcttagtccactgttgcaaggatttctatcttatccttattcatattggatcactcctttatatacaaagcaagtgtccctttgattacacaaaacttaattattgaaccgttttacaatgaatatcaacattaagttaagaaaaaaagttaatgcaataaatgaagaacagtttcgatcagttttaataaatacgacaacaaacgcgacctctatggtgagttgtctgttcatattctcgcagaagctcgcgggcctagggtgcgtgtaggagtaatgagtctttatgttatgatatctgcgtcctattcgagtcgcgtatatggatacctcgttagcgttgataactcaagacgtgcgagtccttatcgggtcattgagcgtgttaggtaattcagaccagcttgctaagtaaagaatcgatctttactaatttgcacgagaagtctttatggtcatcgcatatatcttggtatatgtaagtcttgaacacggcctttttaggcctacatcatgcaacctataataatgtgccttggctctatcaaggtcacatcatctcgctgagtttggttcatgcaaggtttattcttgagtggtctcattttcatagctctgcaatcctcgagaagaatgagtccacttgtcatccttacgtgagcctgatctcgagtttctagaaaaattcacactataacatgtgcccctagtttcgcgattgacagttatgtcgtgagggaaactatgagcgagaagcaagcgagtggttgtcacgagatgatgagtttcggttgtcttgttgagggttttgaaaacacggttgtaattattattttattcctttgaggtgccgtgtcatctgaacccttcagggtatgtgcaggcgagattattggtgaccgttggattgagagaccttaggtattcctttgccatgtgtctctatcccaataaataagggatattagtattttaactccctaatacgaaacgatattttattaatttccctctcatttttgttttctcctcttcctcttctcaaacttttattacatttcctgagttttcttcatttgagaacgacttcgaaggttgcagtacttacataatcattcatggagaaactgcacttgaaggttagtaaattaccttttctgtaactcctttctttcctttgtgaatttgcatgcgttctatattttttaggggttgaaaatgaataaaataataaggtttgctacatgctctttgtagtataggcaagatactatatttttttggaaaatttatgcctaaaatttgaataatcgcgggttttacagagaacatttcgaatgctcgtgagttttttgatgagtatctcgaatactcgcgggctcttctttgaatgcacaaatgcacaaaaaaatatattggatcgataactaagcttttcgaaccctcatattagagtctttaacccttaggcctttttagcttttaggttatatgtattttttttatgaaaactacctatgttctcgaaatggtgggcgtgtcacattaacataatgttcatgcgatagtcgcatgccccttggcatactgtgaaacgcccagccattttttgagaggcgcggttagttttcattttgctcgcatatcgttcattattggaacaaactaggttctttgaaatgcttagtgtgtcccattaactctatgttcatgcaatcgtcgcatgtcccttgggatactgggatactgggatacacccagcaattcttggagacacacgattagttttaatctggctcgcaatttattcattgtctgaactgactatattcgcgaaatggtgcgtgtttcttcgtgacttaatattcatgtagcgacatgacccttatgtcactgagatatacctagaaatttcaagagatatttggccagttccttgaacttttttgcttttgaactttgcacgggtgagggcacttgttaaaattgaacttacaccacggtaaaaagatattctatctttcagatgagcgacctgtcagatagcaagagatatgattctggagaaggggccttcacggatgaatcgggaagaagtgacattttcatcctaagcacgatgtctgacgatgaagttcctacagctagagctcgtgagggttcgttatttatcgacaagataaataggatggttcaagaattagctaaaccagtgatggcagaagtacacgacagttagtctaccttctaagccaaaggataccttgtccactcgaggcatgccccagacaccgaggttgaagagatgggcgaggacttttaggtaccagatcacaatttcaaaagacgaggaggagggtgaaggaagcgagacagattttgttgataatacctgtagtggccaaaaattgcaccaggcccaaatgccttttacaacccaaattgaaattacaacccttcaaaccaagtcagtaaatataacccanncatccaaaatacattgggctttggctaagatacacggcccaaacgagcccagcagctactacacaaatttgatagaaaggataggaacgagtctataactgaagcagaagaattgatcatttctcctggaaaaagggaagaccacctcccacgttcgttcttcaaaataggagaattcaaccgtcagaggctctgtaaaaggagaaccgaggagtcctaaaggatcatctgattttcactcactgaacacttattcaagcatttacgaaatacattactattattattaccagtccttctccatcagtctacagaggaaatatttattttctatcttctttatttatattatattattctttattcgaattattt

SEQ ID NO: 112756 - DNA, 4437 bp, Cannabis sativa
  modified_base (4368)..(4401): a, c, t, g, unknown or other
attgttttccattgagataggaaaaccctgtacgttgctgtagcttgtagtactgtaccaaagaaaaataatatactgaagcttcttaaccattgtgctgtgattgttgtctactttatttctaacatttattactgtaggcaagtacttgtgctattttgaatcgatctcgctggcttcgcttttttttttttcaatcaacaactaaactttggtcacttttttcacactccgaactcatatctccaaatccatgtttggcttctcagaaaataactttcttaaattttcttttctgggttggggtcttttgagcttgttctcaaataaccattttctcttctcattttctttctacccaaacactattttttgaatttttcgttttgttagatctgggtaaacatgaaggaatcgacagtgggtactaagccgattgacaacatcagggctagagtggaggtggctagggctggggtcggttgtgaatgctgttactctagatgtggttggggtcgactgggtacacaggcaatcagaggaggtttagaagaagaagaatctaaaaagaaaaaagaaaataaaagaaaagaaaaaataaaataaatttatgtttttaaaatatattttttaattttttaattttatttttatttttttaattaaaattattatttggaccaataaaaaattgacacgtggcattttatttgagtttaacagatcagttaaaaaggggacctacggactaacaaaaaatgtcaccttgaggactattaccgccaatttttaaggttgggggattaatctgtatcaactctaagtttttggggacttttggcgcaattatccctaataataataataattaacaatcaaataacttattattacataatataattattgtcattttttttgaatgaatattattactgttattttttttgaaagaatattcttattgttttaaaataagagaatggataatttatttttagaaaaatttacatgaaaaatatataaaaaaagacttttattacctttttattttcacacggatgggataatatttttatctcttttattgttttatttaccaaaatatattttgcacacataatcaatgcattgctgatgttatttgttcacaatgacactcaacctattatttttcctttattttctataaatgtttcttcgttttatttcagtttcagttttatttttaattttttatttttcagtttcattttgaattttttttccacgatcaaaacgagatttctttcccgaaaaaattgcttccctacgatctataactgccgttgaagctccagcccatgaattttttttcttctaccaatatctgtataaatggtttgtgacctgcttctcctcttctccatctgtgaaaaaactcattgttaagaagcccatttccaaaagttctaaacttgcagcaatgggtgtgaaatcattttccaacaaagggaaaggaaaacaacctataatggaagatgatgactttgattaagattttattgaaccaataacaaaactcaatcatcgtcctatgacggagaaatcgaagaggaattaagctgagaagaattctataccaaaagttaaaagggggaagatgcatgatgttagagtgaattttgttagcttgagtttgttaagaatcagttaggagttagttaagaatcagttaggagtttgttaagaattttgttagtctgtctagctgtcattttctaactaatttcctaattgtttccgttttgccttgtctgattgtaatggtgtatataaaccatgttgtgtatcattttccattaatgaaatgcttccttctctttcagcttctttctccttctcttttctctctttgttttctctttcaatgttttctagtttccctgctcaatcatgtcaaggaaatccaatatggtatcagagcgttcttttccaccattgatggccaatgttgttactaactctggcaatggatttcaagctcaacaaggcaatggatctaacactcaagctcaacctacaggcaatacttcaaatctgaatccgtggaatgtaaaccagaggagccgtggtggtgaagatcaaagtcctgtgttctttaatcataccctgtccattaagctgaatgatcacaactatctactatggagacagcaagttcttgctgcaattcgagggaatcgaatgacgaactacattcaagagaactcagctccacctcaattcttgactgatgaagatcaagaagcctacaatgtcaatcctgattactccaccttggaggttcaagattaattacttgtttcttggctattatcctcgatgacagagagtcttttaacaagaatggttggttgcaacacctagagtcagatctagagcacgttgtagaggtatttcactctccaggtctctgctaaaattcttgagttttgaactaaacttcaaaacttgaagaaaggatctctcagcttgaacgattacttgcttcgagttaaatagactattgatttgcttgcttcaattggagaagttcttagtattcgtgaccatgttgcagccatctttaaaggcctccctagtgagtatgacacctttgtcatttcaactaatactcgaattgaaagttactctgttgctgagattgaagccttgcttcttgcatccgaatcaagaattgagaaaaatgacaaagaactagatctcaatgtcaacatggcctacactgaacttgagtttcctgaagctaattacaccaacaccaatcaaaatttaagagctgtctatcctaggttcaatggctctcaatttccctacaatggctacaacaattcaggctcatattttccccaatataactttggccaacctagatcaacacaagttcgattcaataattccagttctggaccttcaccaccacctagattcagtaaccaaagaggaggatttacaggcaatcgaggaggatgatttcccagtggtaataacaattgactttagtgtcaaatttgcttcaagactggccatgctactcttgactgtttttacatatttgacaaagcttacgctagcaacacacaacctactggcaacactagcaacaacaatacagctcaaatgcaggcacatgtagctagctcaaatattggatgggatacaaactgataccctgattctggtgccaccaaccattgtaaacccaatcctcaaaacaccatgacaccaataaaaaacattggttctgattagttgtttgttggagatggcacatgtctgtcgatttctcaaacttgtaattctttgttgttttctcacttcacttcccatcctctattacttaacaacctattacctgtgcctgcaataacaaaaaaaaactattaagtgtttcccagtttgccaaagacaatgatgtctatttctaatttcatggtgatgtgtgttttgtgaaggaggagaagactcatcttaccttcctgaagggacaccttgtgaatggcctgtattcttttgactcatcctagatttagctgcatccctccagttctagccaacatacacactccacagctaaagccagtgcctacatcacaactcgaactcactctgattcccccctgagcactcctattcagtgtctgtcatgtgtcaaatgtaatgcccctttattttctgaattcgatttgtggcataacagacttggacacccttcaatataggttgtcaagtctgttcttcactcctgtaataagcacattgactctaataaaaacatgtcttctttatgttctgcttgttttttagagaaaattcacaagcttccttttcccaagaagtctctcgctgaatatacagcaccactccagctggtggtgtctgatttatgggggccatcttatacaccatccacaaataaatgtaatgtgtattctaggtttacctagctttatctcttaaagaacaagtttgaagctctaaaaatgtttcaacttttcaaggctgaagctgagcttcagcttggcaccaagcttaaatccttgcaaatagactggggggagtatagatctttcacaccttttttgaaccaactaggagtgattcatagacacccttgcccaacaacacatgtgcaaaatggtctagctgaaagaaagcatagataaatagtggaaaatggcctaacacttcttgctcatgcatcgatgccactcaaattccgggatgaggcatttaggactgttgtctaccttcacaacaggttacctacacttgttcttaacaacaagtcccccattgaggtgctgggttttgtgccctaaatannnnnnnnnnnnnnnnnnnnnnnnnnnnnnnnnnataaagatcagaaattacattttatgttgcatggtt

SEQ ID NO: 112757 - DNA, 1729 bp, Cannabis sativa
acatataggattatagtatcccattgtagaagcctaaagaagaagaaaaagatatgcacacggaaccaaagggctctctggtgaagataatgcgaagatgggttttaagaagaagaaaaaggtgacgaagctctcatctttctgatcagaatggagaagcatagagccttagaaatcaagcttgttctacttcttcaccgaatttcttccatgaaagatgttgaacaggtgcaagctttcatcgccaaagcaggtctagtgaattaccctccattggttgccaagctcatctccctgacttccgtgtcgtcatggggctgtgtctctcatgctcaatcccttttcgaagaaacgactatggatgatacgttgctgtgtaatactatgattagagcttactccagaagtgttttcccaataagagctttatgcatttataatcgtatgcaagagttgaatcttgggtcggacaatttcaccttcaattttgctctcagggcttgcgcgagagcaatgaaacggtttcaagaagattgtaggtttgagttagctaagggagctgaaattcactgtcggattttgaaattggggtttgatcgctatttaaatattttgaattcgttggtttttgcttactcgcaatgtggtcgtgttggtgttgcacggcaggtgtttgatgaaatgtctgacagaagtgttgcttcttggaacatcatgatatcggcttatgatcaactcgatgatttcgaatcggcggatcacctgtttgctttaatgcctcaaaagaatgttgtttcttggaacactttgttatcaaggaatgttaggttggggaagattgaggctgcaaaggagttgtttcaagagatgcctgaaagggatgctgtttcttggaactccatcatagctgcttatgttcaggccaaaaactacgatggggcgttaaatctcttcggtgaaatgcaagattctaaagtggaagctacagaagtaacacttatatcaattttgggtgcttgtgccaaaacaggggcattggatatcggtacagaaatccatgtatcattggtaaaaaagtgctacaaggttgaaggataccttggtaatgctctggttgatatgtacgctaaatgcgggaagttgaattcagctcgggaagtattcgatgagctaaaaatgaaacctgtaagttgctggaatgctatgattgttggtttagctgtacatggtggttctgaggaagctttggaactctttgctgaaatggaaaatagacttgatgaagttaggcctaatcgagttacattcatcggtgttttgattgcttgccggcacaagggtttggtggaagaaggacgccagtattttgaccgtatgatccaacagtataatatcaagcctgatatcaagcattacggttgtatgattgatcttttaagccgatggggatttctgtatgaagcttatgaaatgatcaaaaccagatctggcgaaacaagctcggtaatatggagaactttgcttggtgcttgtactgtacacagaaacatggacatggctgagaaatgcttccagcagcttgccgagttggaccttcttaaggatgcagattatgttttgctatcgaacatttatgctgaagccgaaagatgggatgatgttgagcgactgagaaatgaaatggttactgccggggttgtgaagatacttggctacagccatataggag

SEQ ID NO: 112758 - DNA, 1562 bp, Cannabis sativa
  modified_base (58)..(59): a, c, t, g, unknown or other
tgccatcttggactgcacgtaacagctagcgatactccttaaaagctattatattaanntatatgggacccgatacttagttagactaataacgatattgacacataggagggtactagataccactggtgccctttagcatttctcttttattttatattcttacaaatacatcatatatcaaaagttaattctcactaatttatacaaaatatttttttttttacatattctccatatttttacccttatttagttaaaaaaaaaatcaactctccctcaaacgcatctctctctctctctctctctctctctctctcttttctatcttcctccctcggttttccctctctatctcactcaactctctcagctcactctctcacaatctctcagctccttatctctcaatctctctcgatagtagaaaaccgaaccattcaagaatcaagaatcattcactctaataataagaaagtatttttctaacaatgtcttaaatattaggaatagtatgtagtttgtttctgttatatgtgtgcagcgtttgtttgcactggtattattttactgatttttgtttaaaaggtcgagatttgattttctcgtggttgctagttttttttttcaatttatcgatggtttgttgataatatatttatatattatcgatgcaagccaaaaaccacaatgccaactatgtcataagctcggtcacatagtgcagcaatgtttctatcgttttgataataactttactagtcctgaatcctttgaacaattcaatgggtctgccaacattgcagagatgcaagctgctttactcactaagcagaattttgaagccttgcttctatggtgtttgaaataagttggctcaagtctttactcactaagatacatctgcctgttgtctctcctcttctaatctggtgtgataatctcagcaccatcatgttggctgccaactctgtgcttcatgctcgcacaaagcacatagagattgatttctattttgttcgagacaaagtgcttcaaaagaaaatttgtgtgcaacatgttcctgcaaaccaccaactagatgattatctaactaagcctatctccaattcttagtttcattttttgcgagataaacttggtgttgtgtgtttcaccacactaagtttgagagggcctatcaaggctaatgatctatctgagctggcatagtctccttaggcgtgtgtttttttaatcagttagttatattctgttaaaagtagttaggatggttgttcgttgtaactacttttttcttactctgtttttgtatgtaaacctttgtaacattcatcatattcaatatatagaattgtcttttctctctcgttctttagctgaaacatagaagtgttcattaagtatctgatccaatataatccgcacgatctaatccaatcaaatccgcaaaatgcgaatatctacacttgcgcggatttgattgaaaaatctaaaatccgcactacttgtgtggattggatgttgtttgacctcaaaaagtaactgattcaatccaatcc

SEQ ID NO: 112759 - DNA, 1999 bp, Cannabis sativa
  modified_base (44)..(70): a, c, t, g, unknown or other
ataaataattatttaaatatatataaataattttcataattaannnnnnnnnnnnnnnnnnnnnnnnnnnaaactaagcggtctttacattactggattagagaaaatatcaaagaaggattgattgaattagaaaatatcagatgacaagataatcttgctaacgatgggactaaggttctaacagttaacaagttcaagcactgcttggacttgattaatctcaaaagttagtatactgagatatctggaacaccaaccatgatggttgcatactttcttcatcaccatcatttttattttaaaggaattaggtggaatttgtggtatagttcatccaaatgaaaagttctccaaaaagattcttgtggaaagctagaagtcgtccgaaaaggagttttagaagtctaccttgtccactctggatggagtcctcaagaaagttagtattccttcggaaaggaatttcggaagactagtagttctctcctagaaggatgtccggatagtctgctccaactatctttgtatctattcggaacatccctctagcaacacacttctttagtctgggactttcgtccaggaagcgtgctgctcatccgaagaagctccaatttgagctgacatggagatattattacgaggagttgttaagtcggaactcacttaacaacttaattagttgttgcaaccaccgactttgggaattcatattctagatctataaataccactatcctcatctttagaagatacaaaatacatgagataattttgagagtgagattgaaaggtagagagaaagagatacaaagaaaagagagagaatgagttttgagttttgcatgaagaagcttctcttgatgaagaagttttttgggtaagagtgttagaaaagtaaacatcttaagagaaaccaaagagagaatctctcgaatgtattgtaccactgttcttgctcagttaatatatactattagtttctagaactggagaagagccttagatttcattaatctataggacttcaaccaatatatattagtgttgattttattattttcatgctttatttgtttatggttttactctgttatttttctgattcttaagttgtaattttattaattttggcattgctaattatttattaatttgtctttaaatttgttttaattatgtacattagttgtaattttctaatgaaaggcaagatcaaataattgataatagtaataattttatatttgattggatcaaaagaaattgaaataaaaaaggaagaagggaatatgtgtgataaaatcatacatatcaatgtaagactacccaaacaacaaaaagttcatataatccaaaacattgaattgaatttaaatgaaagttatgtcttttccataaataaacaaaaaacatttatacaattcatcaatatggccggtttgtttcttctcaatttctcttcattttttttttccttttttcataaattggaatacaaacccaattctatattttctcctctgcggttcctaataataatattttttatttagtaacaagtagttgaccatttttcaactagaaaatgttgctaatagtttttttcttccttttttttttcaacacatccatttccaatgatgttggatattatattggagttgttagtgtttttcttttttgtctaataaatgtgttgttttagattttttttttaaaaaaattatatattgcattaaacttgataggttttatatcaaataaacatatttttgaaaaatagattaaaagaagttgttttaatttttttatttttgaaaaggaattaactacattaagaaagagcaattgtcttaacaaaataaatataaattcctcaagaacatcactattaggggtgttcataaagtatccgatccaatccaatccaatccgcaaaatgcggatatatatccgcacttgtgcggattgaattggattgaaaaatctaaaa

SEQ ID NO: 112760 - DNA, 3584 bp, Cannabis sativa
gttttcctttttaaacggttgcatatattcttgtttgtcttaggtatatccgctttattctttttatagttataaatttgcgaatatttagatagctttattttgatatgtgtggtaacggctacttgaccatgtttttatttctttcgattttctaggtttctgggaacctttgaatttattcaaattcagttcccttgttgatattttcctaccgttcgtcatccacatcggattttgccatctgggcatctttggtttgaaccaaaaagatgcagaggcctccgccggaagatttctccttgaaggagacaaacccacatcttggtgggggaaagatcactggagacaagcttacgagcacctatgatctcgttgagcaaatgcagtatctctatgtccgagtcgttaaggccaaggatttacctggaaaagatgtgactggcagttgtgacccttatgttgaagttaaactcggaaactataagggtacaactccacatttcgagaagaaacctaatccagagtggaatcgggtgtttgctttctcgaaagatcggattcagtcttctgttcttgaggttactgtcaaggacaaggattttgtgaaggatgatttcatgggtcgtgttcttttcgacatgaatgagattccgaaacgagttccacctgatagtcctcttgctccccaatggtataggttggaggatagaaatggggttaaggttaagggagagcttatgttggctgtttggatgggaacccaagctgacgaagccttccctgaagcatggcattctgatgctgcagcagtgagtggggctgatggtcttgcaaatatgcggtcaaaggtatatctttctccaaagctttggtatttgagggttaatgtaattgaagctcaggacttgataccgaccgacaagggtagatatcccgaagtttttgtgaaggctacacttggaaatcaggctttgaggaccagaatttctcaaaacaggggtatcaatcccatgtggaatgaagatttgatgtttgtagcatcagagccttttgatgagcccttgattttaagtgtggaggacagagttgcaccaaacaaggaggaagttctgggaaggtgtggaattcctttgcagtatgtggacaggaggttagatcataaacctgtaaatacaaggtggtttaatcttgaaaagcatgtgatcatagacggagaaaaaaagaaggatattaagtttgctagcaggattcatatgaggatctgtcttgaaggtggttaccatgttcttgatgaatcaacacattatagtagtgacctccgacctaccgcaaaacagctgtggaagactagcataggagttcttgaggtgggaattctgaatgctcagggattgatgccaatgaagacgaaagatggaaggggaactactgatgcttattgtgtggccaaatatgggcagaagtgggttcggaccagaactattattgatagctttactcccaagtggaatgagcagtatacatgggaagtctctgatccctgtacagttattacaattggggtttttgataactgtcatttgcaaggtggagacaagggtggtggggctaaggattctaggattggtaaggtaaggattcgtctttccacccttgaaacagatagggtttacacacactcgtatcctcttcttgttctacacccaaatggggtgaagaagatgggtgaaattcatttggctgtgaggttcacttgttcttctttgctcaatatgatgcacatgtactctcaaccgctgttaccaaaaatgcattatattcatccattaacagttagccaactggatagcttgaggcaccaggcaactcaaattgtatcaatgagattgagcagggctgagccacccttgaggaaagaagtggttgaatttatgcttgatgtgggctctcacatgtggagtatgaggagaagcaaagccaactttttccgaattatgggagtcttgagtggacttattgctgttggaaaatggttcgatcagatctgcaactggaaaaaccccattacaactgttctgatccatatcctgtttataatattggttatgtaccctgagcttatattgcctacaattttcctctacctcttcttgattggagtctggtactatagatggaggccgaggcatcctcctcacatggacactcggctctcacatgctgactctgcacaccccgatgaactcgatgaagaatttgacacattcccaacttcccgacctaccgacattgtaaggatgagatacgatcggttgaggagtattgccgggagaatccaaacagtggttggcgacttggccactcaaggggagaggctgcaatctctcttgagctggagggacccaagagcaactgctctattcgtgctcttctgtctgattgctgccattgtcctgtatgttacaccattccaagttgtggcacttctcactggattctacgttttgagacatccgagattccgtcataagcttcctgctgtgcctctgaatttcttcaggaggttgcctgcaagaactgactgcatgttgtgatcagggccagttcactgcaaattgccattgagttttctggcacaagaaccttctccattgtggtgacaaaagtgaagaagatctagtaatatataaacctttgtttattttcaatgttaacagtcatggaaggagcagaaacaaaaagagcttatttattcccagtgttttagcagctgatgatgtatggacccttcacttgaaggtagtagttttttccatgaattttcagttcatcatgtgagctgcatgatttttcttttgcctccttcctttttcgtttttggacttgaccttattatgttaattatttatgttatttgtaatcttgtaggctgtgattggaattagtttattctgaatctctttctatgtgcttaattagattttgacaaagttttcttcagaatgattatttgaaccttttttgagttctgtaccatgtgatataaaacctggtctacaatccacattccatctatttgtgatctttatttagattctcttttacatataagttaaccttatttaattttggctaattaggatttttgcttaagaattttgacatgtaccaaatcatgctctctgaatttaaattcttgttgaactattgaaattgttagatttaaggatttttgttcaattttaataagaaaagtataacatggatgaaagtttaggaggtatgatttggcacatgtcaaagttcgaggagcgtgatttggtagaaattaaaatttggagagcatgatttagtacataaataatcactaaattagtacaattgaatgaaattggacaaaagtccttaaatttgataatctcaatggttcagaatttttaacaatcagaaaagttcagttcaaggaattattctatatactatttttttatttatttttttattttttatttttatttttcaaatttacagtttgggtttctaaagtggttgcagtcctaattgcaatagaagtttctata

SEQ ID NO: 112761 - DNA, 3118 bp, Cannabis sativa
  modified_base (558)..(581): a, c, t, g, unknown or other
aatagagagttttcatttataataaacctatcgaaaaaccatcaagaacctatcaaaaaatcatcgaaaatatatataaaaaaaatatcacaacacagtttctagtgaactatcaagaaactatctaaaaggcattgaaaacatgtcaaaaacgtaacaaaaaattacattaaaaaatcaagtaaaaaaaaaaataagctgacaatcaaaaacctatctaaaaacaatgcagaaagtattaaaaatgatcatccctgaccttggtatactatatatcgagaattcatcaataacataccgacaatgtatcaaaatttaaattaatacccaaattacactagaaaatcagatcttgccataattttctaaatgtttaataaattacttaaacaacacttacccattattgcgtgtttttagggtcgtccatggtggaggaggaggagcaagctgggcactcgtgggatggtcgtgtggtcctacgacatttgtgattgtcgtggtctctccgacgtgggtcgtctctctggtggctgaggagagagagagagagagagnnnnnnnnnnnnnnnnnnnnnnnnagagagaaagagagagagatttctaagcgtaggtggtactttggtataggattaataatattgacgcttgtgtgattccaaagcttattggaacatctccatcaaggttccattaaaagctttgacttgacactaaactacacttctcaattacctttttctacatttgcaaaatcaaccacgttgatcttttgactttgattttgactttggatcaaccttcaattcaataagagttattagagctgccaattcagtgataagggatgtatggattctcaagaaaataagagtcgtggtggttctttttgaattgcctggttcttactagtttatagaaaattgaatctacattaaattttacttgaatagctctatctatcccctgagaaagtttagttttaaaccccagttcgaacatgagaagtatttcatttggtacgctttattaaattatattgtattgtataatattttattatattatattaaattgtattatatattatatttttgtataatattatgatgtaaaacttaaaatattatacgatataatatagtataccaaataaattttagagtgaaaattaatattctatttctgagcaaaatctttgaattttcctacctcgacttcaatttattggaataaagagaataaataaatcatgtcgcaaaaaatgtaataaaaataaaaaaaaaattaacaaaacaagtgttatattaaaaaaatatatatttcacttatttctaattgattttaaattataactccagtcgttattagacgaaaattttcatcgcatacaagtcttttggttcaaatttgggtttttttggtgttttttttttaatttctatatagtttgtgttattatttttctcaaagtgttatcatctccatcatttttctcaaattatttaaacaattacatgttaacatattcttaaaataacattattaaacaaaccagcataaaaataaaataattcaatttaatataagaaaaatattaaattaaattaaattgtgccttagacattcaagtgatataggtacgattgcagtaaataaatatgtttaatgttcatgaaatttatttatttatttatttgttgggaccaataagcataataaaatgtggtaccaccaccaacaaacatgtcacatgtcacattgtcccaaacatgaatggaatgaatgtcattacaaaagccatgaattatttttgacaaaattcaatgcagaaaaaaccctaaagaaaaatgtaccattttctactttaccacttcccacacctatcaaactattctcaaaagtcacataataacaaaaataaataaaaaaatcccttaaaattgtttttctaatgtataataatgcagtaaagttataggtatttatcaaattcactagtttaatcatagtcatgtgactctacaaaattgatcgaacacctgcaaaaattgctaagcaataggttctcgaccaaccatgtgtaatcacgtgactcgggttagttggtaggttcaattggaacctcatccatacctataatctatatgatgaaatatggctttaattattttattttagttttaaataccataataaatatgttgttttttttccaacttttttatataaatttattgtcatttgctaaaaataatttaagggttctcttcctttttgtcttctacaaatcccatagatcttattatatttgtattcaagtaattcatgtcgtttagttcttgtctttccaagactacttctcctccttattttttatattttattttttttggttaaatttcatttttactctttttactgacttaaatttccaagaactttatattttacccttcttctttttttcactgaaaatatttacccttctttttattttacttggttacaatttttgttagtttgtttggtatcggcacatccctccatcattcttttttgttttacttagatatattatttctataaataaattttaattaaatttttttgcttaacaatataagcaatacttattcttctttcttcattcattattaatcttgttttgttagctaactgttttttgttttatatacctttttaaaatttaaatattctttatcttaaacacatgaattgtccattaattatttcaattccaagtttaaaattcaacataatattgtatgttttttctgaaatgtggtaacaactaacactattcaccatccacatcacatatttgtttttaggagattgttaaaaaggctttgcctaatattttctttttgagtgaatttattttttctaaataaaaatattatgatttctataatcatgcacatatttacaaaagtgcatttgtcaaaccaaattggacattacttaaagaggttttttctataatagacattttaggtccaaattttacatttttagcttagtaaggaaaattaaacaaaaataggaaatctaaaagttttttttaaaaaaaaatacggacaacttatctcct

SEQ ID NO: 112762 - DNA, 7993 bp, Cannabis sativa
tcttaatatttgactcttgtatgtgtataaatagtggttcaccccattggaataaacaactaagaaattctcattaagtttctttttctctcttcatttcttcttcttcttatcaattttatattattttataacaatgttttaatttataatctattttcttaggtggatccgggtaatttcgggttttgggtttgtcaatttttagaactcgaacttggcccggtttggtaccgggttgaacccgaacacaaccttgtaatttttcgaacttgatttttttgaatttttctagttcgagtcggtcgggtttgccaagtgaatgagtttttcatgtacaaatgttgtgccctattacttatcatcatgatgtggctttgaaaattataatactcttgttttgaaaactacaagtgaaccaattattttatgaacaccattttgaatcattaatatgtgttagtcaaaattaaaaagatgaagaacggggaatacaaggaaagaatattctaaatactttagcaaaacaataataaaaagcatagaatccaccggtcacgcaatcaatcaatctctttcactctctcactcgctcaatctcttcaactaccttatactcaaacaaagagtatattcccccaaaatccacactccgaatattctccaattctaattccattcttgtttatataatccatatttatttagatcaaacccaaccaacccattcaacctatcaatccaatcgaaccatgaagttctggaagatcctcagcagccttcttgaggagatttttcctgaatggcgagacaggtttctgtcttacaagtcattgaagaagcaattgaaatctttttacccaaagcctggtaacccatcatcacccaagcgttccaaactatcacacgccgaagaagaagaagaagaagccgaggttacggaggaggtcgccgttttcttgaagcttttgaatgacgagattcacaagttcaatgagttctttgttcagaaagaggaagattatatcattgcatggaaggttctatcttttttcaatatgaatttgtttatgagtcaaagtttttgttttttataattgggtatcgtctatttatctgtaggaccattaggaatgagttgtacttgtatgtatatgtcatatgtttctgtgttatatgttgtggatatatacctattcttttgaattcagagctttgcttccttgctaaagcatttgaaaatgagggaaaatattgttgatgggcatgaacctataagacaatgcggtagctcttgcactttccaatgttatttgtttaggggaaaagagaagggagaaattgtaatcttagaaggataatttaaaggtggatttgttgtttaagcatgttacaattcaagtgttgtagcattaatatgtgatattattaggctgtggttctgcttgttattgttgcattttcagtgtagattaattttgtgaatgttatgtgttgtcttctgtgttcgtggagtgtaggaactgcgagacagaataataagggccagggattcaaatgaagatctgaaagatgtagggaagaagttggtggatcttcatggagagatggttttgcttgagatttacagcatccttaattacacaggtaattctaaattaaagcaccaagtaattttatatatgctttgtcgtcttgacaaatctgagattttgatatgagaagaagtttacatcattgaagatttcatatgacatatgttggctgaaaggtttcttttctaacaaaaactactaaataaaagagttatagggatgcacatctcttaagatagatgaattatagaaaaattgctcgatcacagatacagtatcattaaacttcataatcaatgtcttatcttccctgaaactgtcagtctctcaacatgacattagaatatgaggtttggaattctttttagatcatctaaattaactacatgtatagtaaaagaaagagtaaataatgaaaggaagaaattctactcaagaaaatgatgaaaattctacttagattgagcattgctattgggtactacggtgtccagctactccattatgagataacttcctataaatggtcaacggttttcttttatgtagtcattattaaagtaaaataagagggactcgatattgaattgcaccagtagtgatatgatgacactatgagtgccctttagcatttctcgttcagatttacgctggttctttctattgtttgtcatttcctgaccttgatatcctccttcctatgcacaggactagtgaaaataacaaagaaacacgacaagctaagtggagctcttattcgcgtatcttttatccaaggcgtcttacaagaaccatttttcagtactgatgtggttaagacactggtggaggagtgcgggacaatgctagataacatattttcaaggaatgagctcgtggagattgagcaattagagagcacatacgttaagctaaccttattggctttgcaagtcttgaaggatattaggggtgaaagttcaactgcaggtccacattccatttctcagttgcatagagatgcaggagagtagtagtgaaagtgtgagtgagagagtttacttgttggatataatccaaggcaccaaatgagtcatttgggaggaaaatatattgttctacacaaatatagaataatcagtcaatacgtacggagctcactcttttttcttttagtatttttattactatctcctgctgtaaattaatttttcacaaatagaaaaaaatgctggggtgtgcaactcttcttatattatcacgttttgtcttattttggatttcttaactgaggtgaaaagaagatagtcaaagatttagtttgcatgaatgtaagatccattatgcataatgaatgtcataggtttatgtcaattttatttgggaaatttgatagaggatgcttaaatgttaagcacggtctcttaatatgccactcattttaaaatttacaccttatacttctaatatcctttaactcaaaaatattcctaacatcttcaaacaaagtttctctctccaactctctaactccctccctctcaaactcactctctctgactccgacgacacacccaccagccccctcctctctcaaactctctctcttccactctggcgaactcacctacatccaccacagtctctctcattctctcactgtctaactctccatcgccctcagactgacccatgacatttcgcgataacccacaacaactcacgagaagatcactgaagccacccagcccttctgtccacctctgtcgtttatgtggataacaagacatgagccacccacccgcaattctcacaaaaattggttttttttttatttatgagtgattttttccatttattaggttttgaattgaaattttgggtcggttttgttgattatggttgagattaagaaaatttgtgagattttaagttgattttttatgtttgggcttgaatttcgatgatgtatgttcacttcccttgttttttttttgtatttatcgacgtttttcgatattgatagcgacatttgatgatatcaccccaatggtgttgttgttgtatgttaattttcttagtttttatgtatttatcgacgtctagcaatattggtaacgatattacatgacattaccctaacagtttagcataataaaaattagcgacatatagcgatattttttgcaatataacacgatatgacttctcactaattatggttgagatgtttagcgatataaggtgattttgttagcgacatatcgcgaatatatatgactagtatccatgtgttgagttgtttaacgatacttttttaaattaacaatgtatttggtgacatatgacgatattgtttgcgacatatagcaatattttttgctacatatcatatttgtgttttaatttgttgtttctgtttgttttctaaaaatttatgtagatgactcttgagcttaaacttccagtgtccgaccatttcacaagtcgtctaacgtatcggggctcagataggtttagagatagtaaggccacgtttgaaaagcataagtcgactaagcaggtgaaggcgagcccattcgggccattctgggaagttggataattgactttctctcgtgcgttggtgcaccaattagtgttggaaaatgaaagttaataaagaaaaggaagatgagatatgatattatgttggtaaaactgatatgagatttgggcggactgagtttggtctaattactggcctaagtatggtacttctcctacagacgaaatgatataagccaagttcagtgactgcttgttgagcatgtattttgaagtgaagagtagtgtgcatgttgatacacttatggtacaacttgagagatgtgaggataaagatgatgtgtacaagctcagactatgcgcctttattgagggtgtattggtttcaaaagatggcaacattattgtttggccagagatgttgaaacttgttgacgaccttgagttcttcttcaagtattcgtgggacgagcaaacttttcctaagtcgatgtggtccatgaataaggacatgatatattacaagcaaaatattgagaagaagaagggtaaaaaggttgcttaggaggcgaagtataatgtacatggctacacacctgtcatacagtactaagcatatgagaccatagagaaagtgggaacgatgtatgctatgtgtatcgagactaagttctctaggatgataaattggaaaacccctgagggccaaaaaaacaagacgtgaaggcgaacgatactgcactactgtttaatacaagggtaagttgttaaataccttctaaacaactaattgttttggttgctaatttttttctagttcaagcaatctatatgtttttaagtttagcaacatgtttgagacatatgacaatatgttttgtgatacatttgatcagtgagcaacatttaatacacctctgcatgatgtagcaacatgtcacgacatataacgacatgttagcgacataagtaatagtttgatatattttgcaatataaatgagtataactacattaaatttaaaaattaatttagtttgtgatatatagcgacatatttgcctattgtattgcgacattaaagattttttttcctttttttgtttgcagttggtcataaagaaatgtgtgtgccctcgacctactgaggaggagtatttcaggtccatcaatgatggtaaagccactctttattttgagatggacattgatgacctggtggacgacgatggtacacgaggttcgatgtttgaaacacaagcaaagacaattactgatgtcgtgagtaaggtgaatatagttccccccaccactgcctccgaaactagctgagccatctgctacagctgctgcagctaatacaccagactatagatcgttggaggaaaggttgaatagaattgagaagcaacaatctgcgactatattatcttagacggacttagtgaatagccaaactaatatgaggtgttcatttatggaaaaacagaaagaaatgaaggagttatttatggctcagttgagcaacctgatgacattgttgaaggaggaggcaccacaaccacaaccccaactagaagattaccgactacctgaggcataggctcaccactcgtgtgataaagacaatgatggcacccaaaagattggaaacacaatggtgatgagcctctgtctactccaaggaatgccaatatcacgactatcggtgatacacagtcgcaggacgatgtcctattcttgaatggacccctagtagggataccatttgtgaggaagaggaagaagccttactatttaaaagactacagattgttatgtactttcaaaaggtgggtggttggggacatcctaaacaaccgtattaggaatctctataccgacaatggtgatgtccaattctttataaagctgttagtggtcggacaatagttggagaacgatataagtatttacttttatatatagtatttttgacagtgcattttttttcaactaattaaaaaatgcatttatcgacatagggcgacatcctcgcgttgtctcgcaacactataagtggtgtgtagctacattatttgtgatgctttgttagcgatgtctaacgacgctgtatgtggtgtctagcgacatgtgacaatatagtattcaatatataggtagcacatgtaattagtgatgattagtggtattatttgcgatgcatagcaacatgtgccgatattgtattcattagatagggcacatgttgttagtgatgagtaacgatataggttcatgatttagtgatatttagcgacatgattgacgatatataacagtatattttttgattttaagcgacattgtggctatactagttagttttaattggtgttttgtttaattttcatgtagcatatagatgttattgcgcacttgaagaggaggagacgacaattgttcctagactagtaccctcagctaggtgtgattctagacatctcatgtctacaattttttattggactttagaggacacacacgggtggcaagaacacctttaaatggccagaagttgttacagactacttccaaggtatcaaagaccgtttcctaccatgctgagggactaaggattcttatacttcatcctgcactatgataaacaaaagtattgggcagctgtcgaggtagacattgatgtgtggtagatttgggtgtacgataatgacatctcatgtaccaacgaatcagattttaatgtaatgatgaaatcctaaaaggagctgttaccacatctcttgaagtcaactgattactttgagaccaacaattacatcctcaactacactttaagggatagtagccaacttagaacaatgcatgttaaacacatgccaagtgaggtggttccccaaagtaaagaaaagtaactaacaaattacctacatctatttatctttatatttcacctagtaatgcatcatgcttacaagtaacaaaaatgaattgtttttggttatgcacttgtgcaaaatttcctaataaattatctacatctatttacctttataataaattatcaaaattaataaatagaaaaggattttacccgcgcaaaattgcgccggtaaaactcatcccaccatcaataaaatatggtaggtaagacttatctcgacgcataagtgcagaagtataagtcattcccgcaaatatttaattggcggggaaaagttttaccgactcattgttgcactgacaaaatctttacccgccaatttggaaaaatgcgtgaaacttttatcagcgcacttatgcgccaacaaaagttattttacccgtccattggcagattagaatcctagtttacactggtgtatagtttttccttgcgcataatagcattgacaaaagctagttttaatgtcgcaaatgtcaactgcgtcagcaaagtcttttaccgaccgagattcatagacagcttttaccggctctatgatgcgccgataaaagtttgctaacgcattatgcctacttttgaaatgcgccgccaaaagttaattttcttgtagtgcaaaaattagtgatcataataaacgctttttatatttatttttatgctattttttaatatttattgttaattaaatttagctatgggatttgttgcccttaattttgcccaaaatacgggaggtcagagccatggtaaggcacctccgagagataccagactccatttgaacggtcacctcgcatttaatgtcgcatgggagaagacgtattggaactgccataagcaataagtctgatggtgtaacccctctgttgcagctattacgctatgattaataagcctagtgacggctactttatgagggatcacat

SEQ ID NO: 112763 - DNA, 2344 bp, Cannabis sativa
  modified_base (324)..(330): a, c, t, g, unknown or other
  modified_base (755)..(756): a, c, t, g, unknown or other
  modified_base (2304)..(2318): a, c, t, g, unknown or other
ttgggaactccagttcaactttttgagatttgtctttcatggatctaaaaattgaagtcaaaacattagttttatgcaaattaaactggattgccggttgaatttcagtttcatagtagtttttctacactttttttatgaattcgaaatagcccatattttgattgattctggtcgtcttctcaggtgaagtcgccagaattaatggtggttctcttttttgttgaatttttgtttcagttgtgttaggttgctgcgtagttacgcgatggttgcgcgatagttgcccaggaagcatgaatcctgggttgaaggtgtgtgtannnnnnntttgtgtaatttttttttatttaagctgtatatttgtttatttagccagctgaaagtatttttgtaatattgttacattttttggttaaaactgaaaaaaaaccctttaaaatatgagatttgttaagaattcttataaacttttatatttacagaaatttagtctttctgttaggtttcgtctcattattccgtttaaatgatgttatgtctttgtaaattaacaactttgttccctaaattttgatagttaacaaatcgtagcatttcaaaataaaaatgagaaacatttaatattttttttagtaaatctttaaaaattaatttagatctttaaaaaatcattcgaatgattaagaaaattaaaaataaactaaaataaaactaattaagcgatttgaaaaattatttattttttattaaannattcatttagatattaaaaaaataattaataatttaatttttgtaaaaactaaattttacgtgaacaaacttgagtctattttattttttttttttcaaaaaatgtagatttatttaagtaaacataatatttttttagtttaatttctagcttttttttttaaaaaaaataattctatatttttattaaatttttaattatttttctttatttgttaagatatgagtttatatatataataagtttgattttttttatcaaaagatcttagtttatttaaattatttattagattctcaataattttagtttgattttttcaaatacgtgtttataaataaaataaaatttgaaaataatttttaggaataatttaagtttttttttaagtaaaattaatattttttaataatttaatatttttatcaagttttttaataatttttattattttttcagaattaatagaatattataatttttaaaatcaattttttttttaaaaaaaaagagcaaaattttgtattggtcaaagttcaagaggtaaaaatggtaatttttaacgataaaagaaaatgaacctactaggaggggcataattatgtaactgttatatttaagggagaatttttaacaattcgtatattttaaggagtaaggagtaaaagtaagtagtgccaaaagttcaagaagcaaaattactaattattcgatggaataatatgaactttataatagattaaatatgtagagtataattattatatatatagtggctatagattaattgtagaatattagttgaatactttgtaatttggaaccttaaggttatgtttttggaacacaataaaatcatacataaaatgttagattggcttgtaagtaagtaaagcagaaaactatagtaataataattaatggagttttacactgtcaatttagagacctaaaaatagaagagaagtggtaaaatgggtcctagaaatgtggacaagtcacatgactagaaatgtggcttattgaaattcagcacatgactaattaagtgatttaaaaagaaaaaggaaaataagtcatgagttgtgcctagccaatattctactatcttttcctctcattcttgaactatagtgtagagaaaagacttactctttagatcaaccttttattgtttcttttcttatcattttcaaacccataagataagaggtaaacaccattttatttattgttcatctgccactcacttgacaatctcttcctatctattattattgaaccacactagaaagaaagaaaaagaactttgttctttgaccacccacaaaattactctcttcaccaaatcttgtattcaaaaacctaaatagctaatttcaaaaaaaaaaaaaaaacctaaatagctataaatcattgtgtatgagccgttacatcttctttcactttttgtacgggactaaagaactagagaagaaggctatggtttccaaggtgctcgccatagagattcagggctcgtttggaacgccgtattaagtcgtatnnnnnnnnnnnnnnntatattgaattggattatatatcata

SEQ ID NO: 112764 - DNA, 1885 bp, Cannabis sativa
  modified_base (1712)..(1721): a, c, t, g, unknown or other
aaaaaaaaaaaaaaaaatgaagcatcttatctgttaaattagcattgaggcaaatccacctattatttacttttgatgaattgtattcttttcacacaaaatataaagtgcttcacgctcccttgaaataggttcaccattgctccttatcttttttggcatttgagaaaaaaaattggtttagtgtttcttttaatagtcgtctaagttttagttatttaagatatattgtaaaattttgtgagattctaaaaaatttaacacgctaaaaatgagatttaaatagtctgttgcacatgactattttattttatacgagtgtgaaatagattgtttgaaccatatttctagcgtgttaaatttttctgaatttatcaaaattttgtaagatgtccaaaataactacaacatagacggcgatgaaatcttttactaaaatattctcccaaatgtcaaaacaaataaaaagtgcaccgataaaacccttttagcattgtaaattttcttccaaaatatttatttgatacatttttgtatatcatgattttaccgtaacaatgattgcgattctttactaataaaaagtggatcttaaaccatctcccactgcaatatctaaattttgaactaaatttagcgcacaaaataagattgaactatacctactatttatagttgtgttccaatgcacaagatgtaaaataagtaaaaataattaattatattaatggcgatttaatattttagtgagagtacaaaaattattactttttattgtttaaataatggaaatatgataaaagaagaatccaaagttttctaaaaattaataaatcataataattcgtgacactataacaaaaaaaaaaagtagagtttattgtgggtcaaatttgatataatactatattgtactaaatttaacataatttttatcctgcaccaaatttagaataatttttagaacataattaaaaatagtaatttttcataaatgttctaaaatatagtaatacattttttactttattggagatgctatttagaaaagcacaaacgtaataatctaattagatcttcattgttttttttttcttcttttctcaaatttttagtcaaacctagctaggttactacaattaaatatgatttgttgtggatatatggatattgagagaaaagagtaagtacatgcatctaattactaggtatacgtattccatactgctatttaaaacaacaaataacgtggaacaaagtcaaatatgaagccaccaaatttaagcgagtttggtgagtttataaataatttccacaaagtagtagtggtagtaggtaaatgttgggtgtcgggtcatcttcgttttccaacaaatgacttatcacttatcatcatcccaaggcttacttccgcctttcttttctaccaaaatatatttgactcaaatctttcgtaaattatcaaatttaccatgtcactccatgtcaatatttattaattcttactattgctatttgagcattactactctaatgttcaataaactgtaaaatgttattttacaattagttaataattttttatattaattattaattaaaatttatgaaaactgatatacattagaatgtattagagttaagatgaaaatgaccgattagttaagtaaatgttactgtaaaaaattattatttttagtgacaactttttnnnnnnnnnntaatttttttgtgactaaatgtggtttttagtcacaacaaaatattgcttatgaccaaaatatagttttaaatacaagttgtcactaatttagttttgatcacaataagtattgtgactaaaagtatatttagtcacaacaaattaaaatttttgtgactaata

SEQ ID NO: 112765 - DNA, 1728 bp, Cannabis sativa
agctgcaaatagagcatcccaataacaaaccaaagccttagaaggcagtaataatgttcaacattaattcctttaactctagttttggtagcaagttttatggataaactaatcactttttatttttctttttgttgttggcaatactatattactattttccatttcaaaaagaaaaggggctatactattactaagtgaattgaatatagtgaactttggagataatttttttaagaaaataatgagaaactttattaaacttcaatttctcctaccagcaacaactcagttggggcacctcccaagctgaaaacacgaccaggataaaatttagaagctcttgcaaatgaatgagctactgagtttgcttaacgttttacaacataaattaaaacattacccaattgcaagagtaaagccttacactcttgaataactgaaccgaagctataaatcattctcacagggctccggattgcttgaatgaccaacaagcagtcggattcaagtgtcacatgctgccatcccttggctttgatccaacttaatgcctcacgaaccccaatcgtctctactaactcaagtctaaccactcccaaataaaagcgtgtaacaccctcaattaggtacccgatttcattcctagcaacaataccaaagccatagctttgttggagaatttggcattgaagagacacttgatcacttattgaaggatgacatggttgaaccttaggctttgaactatctctcgagttaccaagaggctcaacccgtggggactgttgatgtgatgtggtcagttttgaagactaatagaatacttttacaagaggcgttgcagctaggtccatataatttgttcgtcaatcggagacaagaatggtggggcttgggcacgtgctctctattgctaccataccgattttatgttcagctgcaactccggtggcagcttcttttacgctccatgtggctcaccgctcacgtggatgaaagcttttacttcgctccatgatctcttactttgtattcgcatgagccatttaaaagatgattttttagacaatcttcgccttgttcaaagtatgaatttgcctaattatttggagtgatgagttttatttgtatgacatgtggttatctttaatttagtgcctttaatattgatgaaatttctttaaaagaaaaataagaaagaaattaagaacatttaccctctcactacttttccaagacaaatgttgattagtttactttttgatttattgaatgttctttctttgtagacttatttatagattttactttattttttgatttattgaatgtcctttgtggacttatttattgatatttggagggaaaactcctcaaatttcaaactaagaaagcaacctcacaaagcacaaaaaaaaaaaaaaaatacaaaatttataatttagcccataaaaaaaataataaataaataaaaaacaactttccaaagagagcgcaaaaggagtgggaattttcttttcaaataaataaataataatattaaataaataataataaaataagaaagtctctcttcttcttcatcttcttcttctctctctagtcccactgtacttcttcaacgacacaataacaactaccaccaccttaatttaaacctaatttatttgtatatattatatttttatatatatatatttagagagagaaaggggaagagagaga

SEQ ID NO: 112766 - DNA, 1877 bp, Cannabis sativa
tgatcgattagagattggttaccaaagcggtaaagagggactttgatacctgctaattatcaattaattaataaaatttacaagaaaaaaaacgcgtcggtcatgtaattgcactacaaacataacaacctaggaaaaccaaacaatggtacacttgcacatactcagtggatggtcatatccattaaatagtgcaccattattattcaccaccttgcatgatcttttatgtatagaaccaaagtatgatatcaggaaataaactatcccctaactaattacttccgactaaccagtgaaggtgagagaatacacaggtcggtgttgcaaggtagacataagtattactatgcctaacacttcagtcagtgcaactactaactgtatagtgttttgtaactttctgaaaccgataagactatagaacaaaaactaatatataatagtgtcagtaccaaccatgtggagcaaaaacttattccacaaacctatgattaaaacctcatttagttaatgaatattacgtatgaaaagaacagccattatatgtaaacatctgggtttagcacatcacactagcgtataagataaaagcaatagaacaaaaattagacagataataataaggataatctgaaaccataccttcaaggaactgaggcaactttgattgcttagatttcgccaacaaattctcatctcgaagctgcttgatcccaaccatttttaaatagattatttgtaccaatgaacaagttaaccaaaagaaaactacccacaaaaaatatcagtattcttaacaagtatagatgatccaaaaatataagtttgagtgcgaatttcagcaaccaccaccagcaaggaaggtaagatccgccggatgcccaccagccgaaggtagggcaccacgaccaccgtgaaacgtaggggatgcaatcaagaatttaggaacagtttccttgcattgtttacccctattaatcttcttagcacaagtctctttacaaagagccgtggtggaaattacccagctgccagccctaattggaccagcaaactctcctttcttccttcaagaagaaaccctaaatcaatcaatcataattgaaaagataaaaacaaaaaacaccaaaaatattgacaattatagcaaaattacataatttggattaaaaacccttactttagaatgataatggcagagaaaaactccaatccttggtagtcaattccaagcagaaaattgtcccggatttcgaagatagaacaacaaagtttacaactgcaatgattaaaggtcaacggaaattcaaaatgaaagcgcaataattggcgggaatgaagaggtgaacgcaggaaaatgaaattaccagaattgaggttgaggttgaagatgttgggattgagattagcagaagaaaatatatgaatttttgtttgtgggtttgggtattggtatgggtatgggttgttgtaataatatattatcaacacttgtcttcttctgaattctcttccctatttcaccaatacaaattggacatctgtatctcatcacatcatccttaagattttctgccaagtgttaactacttttttaaggttcattttaggggtgttcgcggtgcgggtgatgcggttttcgaccactttttcaaaccaactcgcatatgcagtttttttaattttctaaaccgcacccgcaccgcgaaactaaaaatgcgcaaaaaccgcaccgcaaaaaatagtgcagtgcggtgaggtttttgtttttatgcggtttggactatcactaaataaataaactatcacaaatacaacaaactttgagcaaaacttgtcaaaataccataaggcttgaatataaatatgaaaaa

SEQ ID NO: 112767 - DNA, 3132 bp, Cannabis sativa
aaaaaaaaaaaaaaaaaaaaccccaaaaaaataaggcaaaaaaaaaaaaagaaccaccaccaaaaaaaaaaaaactaatccaagagccaaagtaaaaaaaaaaagccagttgtgattcgggaataataagccaccaaaaatccaaaatacagatccaaaaagtaaagttaaagacccattatgatgagtgatagtgagccaaaaaagagctgcttatgatcgagttgtccaagatggtgatctaataaaacagctactatcttaagggggatgttatagagtctcacattgttaatgtgtggaaagataatagaatatataagatgaatgaactactcctcccattatcaattaattttgagatgaaacctcattcatcttatcccaaattctaaaatacactttttccttcaaaattttaaaaattttaatccccccattttatgaaggactagagaaaaaacaaattatgcacaccaaatactagaattatcttttaaaaaaaattataagtatctatactaataaggatagtatagtaattttaatcaataatttcctctccatcctctcacctttactcctaataccaaacaacacaaaggaaaatcactatcctctctatcatctatgaagttactatcattcttactctccattcatccttctctctttctttcctgccaaagatagcctaaattacatgaaagtaaagtaaaaactatccctatgtatggtactaatttattataataaaagttttatttagttgaatctcagtatctttatttttaaattatagagccatcttaccagactatattaaattcatcaaatgagtgcataacataataacatggagtaattagatcttaatacaagagagtaaacattcaatttaatttcgtcttcttctcttttcttttcgctagctagggtttatctttttctcttctctcgactagggcgttgcccgcaactgtgctatgcagttctggtgccttggccgagaagactatccaggaagggctttggttgctcgtggtaggtgttgttcccttgcttatctccttcctcagacttggtttgtctggtgcctgtgttacaggttgatgttgcccaaccgtgtgggtgtttttttgatctatgagagtgtggagtcaagggtcaacaatcctgaaggttggcagggccgaccctgagttggccgccttaggcccccaccgcttaaggcccttattttaaaaataaaaaataaacatagtttgaaataaaataacaaattatacccatattactaaagggaaatttgcagtataaataccatatgttaatatatggtatttatgccgcaaatttttctattacaaaatatatgttgcaggttagtggtaagtatttagagtaataacttgaaggttaagagttgaaatctcaacaacctcattttttttatacaagggccctaatttttatttttacttaaggcccaaaataacatattgttggccctggcagttggctttgtggtggatgagatctcttggatctcgtttgaaggagtagtggatcttggtgaggttgtcgacggtggagacaaggctttgggattcaatgcttttggggtgttgtgggtgtttgtggctttgctctttaaggatctcctccttagttgattattgattgtggtatgcctttgggttcttttttggtgtttctaatcttgcgtactttgtggagaaaaagagaagacatgggtttgattatgagggaagtgtacccttgtattattctttctcctgctgtgggtgattcttatttggtttgttcttatgtctcaatcattttatctgattgtttgaggttttctcctaatgtagattggatgtttgtcttgtgaattttaattttttgttgtaatagtggtgcttggcaccctatcctctgcgatgttggctttgtgcctttttgttggggtttccctctttgtatcgatgtggggtaccgttatttgattgtctccttgtaagatccgtgcagtttgatttttgcctaacttttttagaactcgttcctcattcttaaatgtatttcaatttttctttttctttttttttaaaaaaaacaaaacaaacaaataaacaaaccttaaatttttatttgggcaaatactattttgcaccttgtgttttgtaaaagttaccgaccgtgccttctgatttattaaatgataaattagacatatattttacaaaatagtacgaagtagtaccttaagctcaattttcgttattttttttaatataaccaacttgaagccaatttttaatacgaaaagttgtaaaaaaatataaccaggctagtcataacaacaccaggtcaagttattattaagttttattttgataaaaaaaaccagctcaatatattatattttatttaattttgaaaaatcaaggttcaaattgtcatttaacaaaataggaggtccaatcaataacttatgcaaaacacagtaaagatttttacaccacgtactgaaattttaaacttttttatttttttattgtgggtcagaatatttttaaaaaatactatgtaagttttatactatatactgtgttaagttttcacggttgttttttagttgtttcactgttgttttaattgctctattttgctgttttataaaaaaaaaataccttttgtaaaaaaattctgtatatgacagtaaaattataaacttttgcctaaaatttaatattttttgtaaagccctaacatagtatttaaaatagtattcctaatttttttttttatatattttttttttaagaaacattgaatttgactttatagaaaataggtacgatcttttttttttttttgaaaaggaacgataacaatacaatttggactactttctctatctttcttattcacaccacaccaccataaatgaaagtgattttgtaccataacacattgaatttgatgacaaacttcctacaatttatgatactagtaggatggattgcacgagaaatgctaaatggtactagtggtgtttagtatcttcttatgtgtcaatattgttattggtttaattaagtatcgagtcccatataattt

SEQ ID NO: 112768 - DNA, 4626 bp, Cannabis sativa
  modified_base (4028)..(4037): a, c, t, g, unknown or other
tgaaccgctcttccgatctaattaaaaagcaaaaattttaatcaatcacgttttccataaacctcgttgattagcaacgaactgcacagcatgtttaaaaatcacgtaatacgctgggacaacaggtgtatgagccctagtatgtacaatctgaaaacacaaaataatatactatttaataactctacacaaaaactcctacgaagtttcttcttcttcaagaggaacactagaaaagtagattttctgcccattgtatatgaatctatatgaacatttattggccgatgatcctaataaagtggactcgcggactaacgattgttaacgccataaccacgtaaaaatctcacatttgttatttattttgttatttctttcttaagctttaaatatatttggtttttgaaaagctcagtaaacaatttggtgctttgattgagagctaaagaaagatagaaacatgcacggtggtcaccatcgccaatctataaaacggagagcccgtgtaaggaaagaagaggaaaggtcgcctgtctgctcgctgtggacaagtctggggtcacaagcctattggccaagggtgtcgtcagaggttgagatcttcacctttttcctgacaaagaaagcaaataagatagatgcatatggtttagaagtgctcgtagtactcacgcatgttagtagaagctcagatctggccaacaaactctctgaggaaatggctaaccatcgacatcatcaagcctgggggcaccgctgttcattaaggcataactacgcataaacaacgagatgcaagggatgttttggctaggtggagaagttaagactagtcgtgttgatgatgaacaacttataaaaggctttcacataagtccagctcacaagcccgaccccttaacctcttgtctcggtgccagtgctgatgctagtgcctgattagtcgtcgacgactacttccactgtcttttcactgagccaaaaagtttatgagaagctagcattgtaggatcccatggtggaggctactgggggtctttctataatgtcatcaccgcctgctaagtttttgggttggtctagttatggtatcgtgggtggaaggtgcattgtcaaggctaatcacttttggcaaaggttgctgacaaggaattctgtcattacgatgtaactataactccggaggttataacgatgaaagtaagtcgagacattataaaccagtcaggaagtcttctagagtaacacttaccctatgtctgagcctttgccttaagaattactaagcggcttccaatcccccaggggaacagactgcaaaggagatcctagggcgcactaagttgcacacgttacctgaggcttcccagagcccatgtcgcatgtgcacattgttttttgtgcatgaaagatcactgggctacgacacatcttcaaccctccttcccggaagagaaggacttcttgaagtctgtcacacgcccagtgatgggctctttttcctatattctttcagatggcactgctacgtctgcccactacagagcaggcctgactcccgtgagtaggtccgctggctttttgtacggctttttacttttatgatccggcatgataacaactcgaactccacttctattctttcaagagaaggccgagaatgcctctgagatacccatggagatttgggcatcatccagtagcgttgatgcctttgccgtagcacacgctgcttagcaacaggcggttggggtaaagtgttaaaagatttccttttttcttctctttttattttacccctggtcatggtatttagcttttttttgtttatctttgcttattacaacaggtggctttgctagtgtagagggctgctggagaggccagtgtactggtcacggagctagagcaggccagggcggacaaccgcgacctacacaatgccaatgacactcttctttccaaacttgtcaggctaagccttaaattgagggcctaaagaagaaaaaccagctattggaaacaaactatgctcacagactcatctcatacgtggtatgaggtcgtccatgacatttacagggagaccgtggagcggatgtctggagcaaagtcttctaactcggcattttttgttgttgttgttttttttaattttctccacgtactctttttagtgtgcgaagaggattaatttttccctagtcgcaaaggctgcttgcaatagcaataggatgtttaccatatctttttggagctttacttctgatttgctagactttttaggggctggtcacatctcgaagtacatggttccaacggctagtacttcaaaccttcccgctagtcttcatgtcttttagtttatttagggatagttcatggatttaaacttcttgtccctggagcaacaatgcttcttccccctaacgaatttcctgcctcggaggaccgctcacaaaatgctagcccagagatgattacctacgcggaaaggaaattttgctttttcatacatctcttaggctttagcttctttacgaagttgggttctgaaagtaacgcccgtgccggtactagacttttgacattttttttgtatgtgccatcatgaagttttagctttttgcaaaactagacaaactaaacttttaggaaatctactgagatctgtaagaagggattcgggcaaatttttcttttcaagaattttggccgaataaacatctcatacctagatttacactaagtttagttctaaagaaacaattcaagcgtgtttccctcaggaaaacttggttgaagatgtatcttgcttttggttgtatatgcacgtcaagctaataactttggcaaatgagtgtaacaaattgcggtcgtcggtagtcggcatatcatacccccaaatgagctgagaggtttggagtcctctgaattctcagtcattttcttgaaatccaagatgtaccctttcttattctcgaggaggaggtcctagtgcatattttttagccaacccttgtttcgggaagtatagattacgctaatcatccaggtcgtgcctttcccctccatgatcacttggaagggaattttcccaaaagtttagagaggctacactagactcgacagtaacctcctggctcctgcggggaaaatttgtgggattgtaggtggaaaccaagttggatggtgagctttaagcggttccttcttccaagagggagggctgaagttgcactaatcttctaagaggtatttccatccataagtttacaatgtgtgtcttttcaatgacacatacctcgtgtggagagcataagctctggcaggctttaggtttcctaggagaaaactagaactgcatcatcatttgtgcaactattccatgttgaggtttgctttgatgcgcaagagtcacaatgaattttgaagtggcaaactttgtctttggcaagaaaaggctaaagtcgcataaaaattcaagcgatgtcttctctttaaaagaccaaagggtgaaagcatcactgggcctgtgacaaactccaagcagtccttctcttatgggaagaagggttgaagacgtgtcgtacccgcagtgatcttcacgcacaaaaaacaacgtgcacgcgagagtcatgttgaatttttatgtagcaaacctcaacttccgctagggaaggatgtttgtatggcagtggcattttcgtaaatatcttcaatattgttcgaattaggacgggacttggtatttgccatttatttgggtctacgaatataatggtgcaatcgagttggagaaactctttgatttggtatgcggtttggccgtatgtctacagagccaaaatcatgtatgttcttggtagaaggctaaaagctcagaatgctatttaaggaggtacccaggtgtcagctctccaccaccccctggcaccttggtgctaagtgcgctactactagtcagttggactagtaggacgggcatatgaggaccacaaggggactcatatgtttccatgagnnnnnnnnnncatggacattatcgggccgacccagtagtgcttttaagaagctgccagacgttaatgagtacgtttccattgccttgtcggtatgccgcttgcacgggacgtggcccaaacctccaagagacgttatggtgcaccttggccacaagtctgaacacgagatgacatggttagtcattcgtgggctagtttgcatatgcgcatgggacagatacaccatgttggaaagagacagaggtctaatgtacgcaattagtttggtggcttgtcttgagggcctaccaacatgtgtggaggcgtgctgccttaaggattggtccatggacgtatgggagttcttgggcaacgagggagactgttcggacagtctcgaatggggcatgatagaagcgttggcacgttaacttggtgttggcatcttgccacacatgctaccttggtcacgagtgacaaggtcagcgtcagtgttgggatttgccttatcatagtaagaacctatgttcaattcgagtatcttggctagagagcctcgatgcatggatgcactcatggatgcttgcgagcatgactcggcgggagttgttcgagagac

SEQ ID NO: 112769 - DNA, 6811 bp, Cannabis sativa
  modified_base (30)..(62): a, c, t, g, unknown or other
  modified_base (632)..(635): a, c, t, g, unknown or other
taaattgaattcatacattatatataatcnnnnnnnnnnnnnnnnnnnnnnnnnnnnnnnnnatgttatttctgatctttatttataagtaaatctcattgtattaaactgggttttatttagggcacaaaacccaacaaaaactgccctaaccgacagaccaattctctaatcggaattcgggttctgtggggtttccttgggaccacccggaattctggttcctataggtcccactgaaccggtcgaccgattcagtgcaggaaaacttcaaaatttctttactcactcaattcaactccaaactctaccaaaccttccaaacctgctaattaggccataatcaacatatccaaggtaataaaacactacaacatgcacaaaattaagagtcaccattaaagaccaaagtttgagttctaaaactcaaactttgtctaacaacccaatcaagcaataacctagcctcaaatcagctcatttaacataaatgaaacatcagaacataaacccaagtaacaagaacaaaaatagaaccctaacacccaaaaatcatacaaaaaccttacttacaacttaaggaattcaagggaaaagatgctagagtggttagagagagagagagagagagnnnnagagagagagagagagagaccgactatgagaaaatgtgatgtttttcattatttttggttaattgaaaataaaagggatattatccaactaactataggatagatattcagattattaaagcttatctaatgctcagtaaaggacaaaagctaattggccaaaaagaccattttgcccccactaaaacctaacaagcttctaagtacttaggggtaatttggtcaactctaaaatctcaactattcccgacatttccaatgtcctactatattgccatgctatactaaatatacgaagatgtgattctaatatccaaacaccgtgttctaatgttgccgcgcacaaaacatgcaaaaatatgaaatttcatatatgacatattaaatgcattctgaattcaaataaatctccgtaaacttataattcataactaagaaaaaagtttcataattaaatcctaattatctgctaatgtccaaattaaagttaagcggtctttataggtaatagcctactccccttgtattgtattaactcagcaaaaggaacaaactgttctttttcttggaagctcttacaactgatctctgaatgtgtttatttcttagatcactcgtttctctttggaatctctctctaaggtaattatttcgatccctttcatagtcaggcgaggtcactatttataggggcttcatgcacgagggacggtttcccttttgcttacaattaataaaataggaaatcataattattccataattacaattcaagaaacaggaaactaaattatagggattgtctttgcattttttctaagactcaatcccacgattatagggattatctttgcgtctagacacaatgaagttattttctgaggtttctatcttttgtaagtttcttggaaattgcatgttttttaaactgtgcttttaaggggtgtcatccgacctgagtactagttattttatccaatctttcgaacaagatctgcccaaaagccatttacttaaaagtaaatgttctagcattgtgtacttgaaggggggtcgtcagaccatgtacacttactggtagtattttcttaaatgtttcccgttccaataccttggtactagaatgaactcaatgttttcgtcataccgtcccaacttgtatgctccagaatctgtgacttcaactacctggtatggtccttcctagttaggtctgagcacgccagtcgcggtgtcttttgtgtttaggaatactcttctaaggaacatatctcaaacaaagaatttgcttgcccttagttgttcaggtattgagccaccttttgttgatgagctactggctaggtttgctgaggttcatttttcttcaatctcatcaagtgattctgccgagagggcatgattggtttcttgattataggttaatcttctttgggatagaggttctaactccactggcagcatggcttcataaacacaggccatagcaaatggtgttttcccgattgttgttttctccgttgttcgatatgactacagtacttctggtagttcctctggccagttctctttagcctcttcaggctattttttatggtatctttgagtgtcatgttgactacctcgacctgaccattttttttaggatgtgctactacggagaaactttttatgattccatgtgtcgcatagaagtctgtaaacatctggctatcaaaatgtttgccattatctgaaacaattttgtgcgggagtccaaatcttcatattatgtttttccccacaaagtccaatacttttttagatgtgattgtttctaaaggcttagcttctgttcattttgtgaaatagtccactgtgatcactgtatattgtactccgccctttcctttgggaaactatccgatcaggtcaatgccccatataggaaaaggccaaggactttgcatctatattagctcgttaggcggtgctctgtgaatttgttcacataaaccaatacaaggtcaaagacaagtacaatataaaccaataaagataaaagtaaaatgagttaaaataccccacacgtgggtaggagcattctcccaaacaagcagagaaggaggctcctcgtctaaagaatcttcttattccttctccacgaaaaacgaccctttccctttcctgccactggggcgggtgaccgagcaactctttcaggttcttcccttatcctgatagaccactcgacaggtacttggttgcttggaggggccttctttttcctaattttgctcggagtttcctgttcgggcacagtttcctatttaggcacagtattttttgctttcttcacagcctttggtacaaaagtagctgtataaagtttgtacttgacaaaattggcctcagtggcaaaaagagaaatggttcgtccagcacgagggagttgaagaattttttgagccctcttactaagctccaatgtgaatggagggcgccagttgcacaacacctgctgaaaacaagtatggacgggatccatacccttgacaatgtaatactcatccacaaaacctccaatccttgccacctcggtggtcgtagtgcctattaaccatttcttctctttttgagaaaaataaaagtatcccaacctattctgcttgggacatgacctcagattaaagaaccaattggtatcatgtggggatggctcacaccatccttgttggacgtagagtatgaatagggtagacaagtatatgaggcccttgggagtgaattaggttggacttatgtggtaatagtctacaacccttttgaggtatgggagaaagggtaacatcgcacattgcctggcgttagctcccgaccaagcgcagtaacctccccctaggttagtcaccagctagtcgggggagggaaggaagcattcgacattcccaagataactacgaacaaatagattcgtcatctttgccatggtcaccatagatagtagagagacccatcaagctcctggtgcaccttgtctcctcaaaggaatagccttaatgtattccttgacaacataatcctcatcagcctccaaaacatcacttgaatggcagcacccgagctactccctcttcctcatctccttcagcatcaaaaggagtagcaggacggacctcgccttggtcctccacctcttggacttcaacatcccttataatatcctcttccttagtggaaggtcaagcctgttcagccttgggtaagctggcaaggcgggcaatgtgtgggtcgaatagtgaggatttttttatagtttgtttggttagcgccatcattctatgtttggatggagttgtatttgtgtgcctagtaattgtcacagaaaaagtggcaatagatttacctacagcagtaggatttgggtggccctcgggtaagttctcaactatgtctggatggactatgtacgtccagttggacgggagatagcgtctccacccattcttaagttcccaaaggaagtagtcgtatccgtaaccttggatctagttgggatagaagtggtgtttcacctcgggttcttgggaagttgtgtgtttgctacttatttcccagtcttcaaaactagagttacaaaggttgtcagtagatgaagatgggctagcacagagatgaggatgatcctcgtatatagcagatcctggtcgatatagtgttggcctccccaaaattcactagggttcatctacaaaaggtaggagacaagaagatgagaattggtaggggaaacgaataaaaataggttgaatgtaccgacgagttttgattgaggaatcaaaaaaagaaatttcactcggaaatggaattttcaacccaaaagttcaaaacttcaaattggaatctaattttcactaaacccctaatggataagtgaaaattgatatcgtaaggttaaaataaaagcgcagttagaatcggacattgtggttaaaaactatcgagatttttaaaccctaaacctggaaatttcttaattatcctagaacaataaaagaacagtcaagattcacagctagaaatatagaaactaagcaggcatttcattgcaaatatgtacaaaaaagatatgaagaacttactcactgatttaaagctttttgttatgctcagattgtgttgacaagagttacctgggaattcttcaaagaatttgagggagaaatcacctgaaaatttctttgctcttgtttttcgataatgaaaattactaaaaggatcaattagggttttcaatcatatttataagcaacttgagaaaaggaaataatcatttcaaaattcaaactcctcgaattcccccaaaaagtgtacgttatgtactcattgctggcaaagtaaccatcatcacgcacgaacttcaagtcatgattcgaggtaaaaccgtcaatcaacattaatgatccaaaattgaggggacccttggtcagtgtcacatcgctttgtcattcaatgcctagcacacgcgtcacctacccggaaaaaaatccagatcgagggaagtccatgtgcgaccaagaagctcccgcgcagtctatgtgggccaaattttatttagttttttgcacattgacatgcccataaggtctagtaagacatgtcctttattcgtgatacctgggcagagggaaatgaccctagcagcctacacctgactagtcagtatatataatagccggatatccaggcagggttgtagagaaaacatccgaccaggttgaagcctgttatgccgagaaacttacaagagatagcaacttcataaaataacttcattgtgtccagacaagaagacaatccctataattgtgggattgagtcagacaaaaaaacggcaacataatttagtttccaatttctttaattgtaattacagaattattattatttcctattttattcattgtaagcaaaagggaaattgtcccttatgcattaaacctctataaatagttacctcgcctcagtatgaaagggatcgagagaattgcctcagagtgagattctagagagaaaaaagtgatctaagaaataaacacatttagggattggttgtaagtgcttctaggagaaaaaaaaaacactttgttccttttcctgagttaatacaatttaaggatagtaggttattacaacactaacggggtcgaacctcttcaaaacatggtgctccttttactttattatttttggtttcttttaattatattattcaatcgctctattatctgactcactatcattggctagaagtgaggtcaacaccatgttttacagtaccaatagaaccggttcatacataatttcccaaacaatttgaaactcaataaatttttccacaatctctctcaacttttccaaaacacctgtactaacatcgaggaataatttccaagcactaacaacaagaaaaatgcacaaaaaataaaattgtcattgttgagctaagcttgaactttcaaactcatacttgctcaaccttttctcgaaccaacaaaaaaagcaataatcaaccaaatttaacttaaaacaaactcataaattgaactaaaatcaaacttaaatctaacaggacctaaaatcacatattgcatgttataaccaaccaaagcttaaagaattcaaggaatagagattattagggcttacctcaagctacctctgaaattcctacttgaatttaaccagaaatcttgctgaattttacaaaaatcaattgcaatctccttgattcttccttggttcgaaaaaagagagaaaaggaggaagagtttgggtaatctaaatgtcgtttgtcctttttctttctattttaaataactaataattaaacttaattcattacaaaaagttggctggaaaacaattttgcacaacccactaaaagacaaaattaaaattttgcccttgcttccaacttaagtaacatatacacctaggggtaaaatggtccaaaaccataacaccacctgaactcgacaatcaaaatatctcaaatatttatcccactaagaattaggttctaaacttacccatgtgacattaacggccatccatcgcaatttctatcgtcgccgagtaaaaatcataaaaattacatatttcatatttagcataaataatactcttagagttta

SEQ ID NO: 112770 - DNA, 1629 bp, Cannabis sativa
tctgttcttgactgcattatcacaagaaggcataacgatagtactttcaatcgcttaaacaaccacaagagaatcagttcaacaattgtatccttccatcatttctttttaaccctacttagggcttccttaacaccaatggcttcggccaaattggtttaaactttgaacacaactatttttaaacaaagtaaaaacctcaatcaagtggccctcatcatcacgagcaaggcaaccaacaccaaatgcttgacttgctgcaaataaagctccaccatatttcccttgattttatttagttccggtttattccaatagagcattttttattatttttaacatacctcgctactcacaactctgattggcacaatcttggtgtcgttagaaagcttattcaaagctttacaaaatcatgtttcactaggaaatccaaattcgaagtccttatagcctaaattcaagtcagaagtataaaaatttaggcatcaaaatgataaacacttccctacttagtcaaatttcaaccatttgtgatataggaggttttgatacaaaatcaacgtttctcgttaaatctcaagatcagtggtcagcattgtatctcaagatcgcaaacctcatcattcaaatataagatcaagagcttagacatgaagactaacactcaaaagtatcttcaaataatatatattataatatttaatttaaatattatattacatttaaattagacttaaccatggttaagagagccacgttcgtaattaacttgatcatggagtatcaaatctataaataattagctttgtttattcatttatttttataatttaatttatctcatagtttgctatcaaacttaaaagctctcaaactctaataccctttgtaatttccaaatcttgcttagtaggacaaaagctcaagtagattagcttattattattaggggatgaactactataaattacttgtgttcatttattttatttttttcattgctaacttcaacaatacttcacctttaattattttgatttaatgttattaattttagtacttaagaactcactctttataatagagaaactataataaaatttgttgcttccattaactcctctaaataggatttgcataagggcaaaaatagttactattgtttgaagggatttttgccatgcaaaaaaatgagaagcaaaactttaaaatgacaatagttgaaggagaaaagtagttgtgtggggccaaacatttggcagttgggtccttgcccaaacccaaagcctcattttttgtgactttgggctaaaccctatattctttacactataagtctataacaactaccttctatgtccaagctacactccagtttgcaaacatgaggtggctattaattttattggagaaatgctaaaaagcactaatagtgtctagcacctttttatgtatcaatatcgctattggttcaactaagtatcggatcttatatagcttaatgtaataacttttaagaaatatcgctagtcattcgtaagagcatctccaatggtagcattctttgaagatgctctatatctccacatcatccaaaatttaatattttattttatttttctttca

SEQ ID NO: 112771 - DNA, 10127 bp, Cannabis sativa
acttaaatatttattactgtaaatattaaatttaaatatttatttataattaaaataaacttatcataattatttaaaaacttataatacaatcactcacattaaattttttaaaattaatttttcttaaatgttttaaataagatatatattttctaatattaataaactagtaaatatctctcactttacggtgaatattttaaattatatataataaattatatattttaattaataataattacttaataaaattatattaaaattaaattgaattaaattactttttaataaaacttttatttcaataatatgagaaattattatattgagtttttaatattaactcatttttaattagtttaaagataaaataataacaccagataaacaaattaataatttaactcattttattttaaatactaaagtttattttataatattgataaataactaaccttgaacattcgattcgtcccttcctctaagtttagttataaatctatttcttttattctttttttaaaaatataatattataataaaatttagttataaatattttttaataaaaaatcgaatatagttaacatcaataaacctatatgttaggaagcgcaaataaaaaatttacataaacatgatataaaaattttctcatccttcttcttgaaattagaataaataacatgataatataataatgatggaagaaattaaaactttaatatttaaaagtgtacaaaagttaaaaagccttgaaatgcttctctatacaaacacattagcttttctttttcttaatctgaatattttatagtaattcattcaaaaaattaaaagtagactacagaaaattacaattaaaaagaagccagagaaaaatctaatatcataaaaaacatagtcataaacttcattactcctctttgacattttctctttctccaaacttaaaacaaaaataagaaaaaaattattctcatattcattgatttttcttcacttctttcttataattatgcttatatatatgtatatttgagagatcaataagttaaataatactatttatataataattctaatttattataaaagtatagtgtatattaattgttattaaaattaatgtgaatatacaatatatagaacaattacttttatttaaaattaactatctcattgtatacacatgtgagattagtattagtattagtgtaagctaattagttaggtaaatctcttagtttgtttcacattagttggttatatcgattattttattaaccgactttttttgcctacataaactctccttcttttgtattcagttaattaatacaataataaaaaataaaagcattttgctctttttctcatatggtattaaacgaattcttgcccacggcttctatggaaagacctacaacttgctcccaagatggcgatcctccatctacggtcgacaacacaacagctgagatcacttcgatcatcatgctgctatcaatctcacctcccctgttgttcctcgcagaaatccagctccaaggccttaacctaacacaaactcgaaccaagaaatggttcaaccccaggatcagtccaccattgtcgacgagcttcacacaactgctcctcaaactcaaacaaatcgtcctgtcaatgacgatctttcaagtcctttcttcctgagcacaagtgatcaccccagacttgttctcgtgtctaccgtcctcaatggcagcaaccatcaatcttgaaaaagaggtatcacaatgctctagttgccaagaacaagattgccttcatctacgactcacttcctcggccaaaaatcggtaatccttatctcaattctgtgcttagatgcaataacatagtaatgtcatagctagtaattaaactctgtttctcaagaaattactcaaagcatcatgtattttgatttagccgttgatatgtggaatgatcttgctaaaagattcaatgaaggcaatggtcctagaatctttcagttacaaacttagctcacccaattacaacaaggtaatcaatcagtttcttcctactttactaagatgaaatccctttgggatgagttgaaagaatttcaaccaaccactacttgcacttgtgatgcaatgaagatttttttagattactataaccaaaatcaagttctccaattcttgactggccttaatgaatccttttcttctgttagagcacaaatcttgctcaatgaagcaatccccaatctttctcgggtgtttgccatgatcatacaagaggaatgtcaaagatctcttggctcagctgacacgattccactggctactgctaccaattctcaacctactaatccaccacgagccaagaaaccccgtccctcatgttccaagtgtgataaaccagggcatttagttgagaaatgttatttctcacatgggtttcccctggctatggggacaaaaagagacaatataaagggaaagcaaatgctaatcatgccagtacttccaagaatgatgcagatggacactcactctcatctgatctatcccaacaatgccagcacttgatctcctttctcagtcagcaactcggcaacaatcctcatgattatatggctgcaatggctcctactgcctccaatcttgcaggtaacaatcatcctttaccccaatttacatgaattttggatagtggtgccacacaccacatgtgctccaatattacatgctttacatctttttcaattcataagtttcctcagcatgttactctaccaaatggtcaaaatattcctgttctcaattctggtacagtgcatataaacccttacattactattcataatgtattatatgtatcaagtttcaagatcaatctcattttcatatctaattttgttcacaacagttctaattccatcattttttctccatacacttgtgtcattcaggatctttctcagaatgtggtgatttatactgctgaaaaatgtggaaagctatacttgctgcaacaagacacacctgtagccaatgctatttcatttcagtttgataataaatatgtgcaagcccataagcctttgggtaagcaggggagcattttggtgagccatagagcatttttctgagtcgtggagcctttatgctagtgatgggagcatccgtgcaagctgaagcatccattcgatccgtggtagagcatccatgcgagccatggtaacgtctatgcaaggggcttgcatgcgaggctacgaggctacaaggtggcaagataagggctcgcatgcgagcgtgcatatgtgcgggtgcgacgcagcaaagtaacacggcagacaaaggtacgaagcgcaaggccacctcctacacttgcgacgtgtagcctgaaagcgacatagtcccttttagggccacattgtacctcaggccattagagcctatacccatttcttagatgtgagaaggggttggaaaatcattcttgcaacttaaccttgatagcaatagaaaatttatcatttactctcaattttcaaatagcaatttgaatccatattccatctttcttttcatcttagatctgtgcttgaagcatagtttgacttcctagctaataagttagttgacgagttctcaccgtcaatagtttggcaccgtctctgggaactaaagcttaagccaagtcgtttatttacacacaacagatacaaaatgcctagacactctcatcaccttcaaaatgtagaggtttgctctgacaataagcagttgatcacttcagggcgagacctccctttgcccgtcgttagagaagaaggtgctaatggtcacaaacctcaagtaggagggataaaatgtgaatgttatcagacctcaagtaggagaagagggcacgagcgggtggggatctcaaacaaggagaggagattattatagtgaagagatcccaatggacaagaaacacaacagaataacttcctccattttaactgaaggtaatggtatgacacaaagagaggaggccccatcgtcacgaaggcaccctccaacaccaacactgcgagatctcggtaccttgcaatatcgccctcaaaaggagaactaagctaactctgtgagccataaattgtgaacttgccactatgaatacgaaataaatgatttctgcttgaagaaccaaaggctggaaactacggtggccaacatgcaaaaagtattgagcaccattctcaaaggaaaaactcaaactttgcactttctatacaaagctcaccagcaagagtgcgagatatcaaccgtatatggtgatggggggaagtccatgtcatcaacggatggtaccccaaaggatgagagcgtaaagggcctatcgtaagataagaacccaagaggttactcacaccaacatgaatctatctgtcggggtaagactgcaatgaggaaaatatcatgtggtcttatgaagggactttagccaacgaatctcatgctaggggacaccgcgcttgcacccccttttcaagagcaaaggaagcgaaaggcgtcacccctcaaccatggtggagagccttacgatgatgggatggaggagtactactcacaggctccatgcgaattgaaaggaaaacccaagtttcgctcaccaactcccaagaaaggatgaacaagagaatgaaagagcttgaagtagagatgcaggatcttcatcaaaaagatggctaccgcattaaagggaaattcgaaggatgatgagttcgatgaagaatcccctttctcaagggaaattcaaatggaaccacttccacctaatttcaaggagccttggatgacgccatatgatggtacaactgatccaagatatcatctaggagctttaacgagccaatgaagatgaaaaaggtgtcatgcaaggtaaggttcaatttacaaacatgatttggaaactgagcatccacaacaccaggtggatatttcatatagatctccattaataggtccccatttaggaaggaattattgacatcaagttgcctaatatcccaccccttggtaaaggaaatggtaagaaccattagaattgtaataggcttaaccactggaaaaaaagtttaagagaagtcaaatcctacttgttggtgaaaacctttagtaacaagtctagctttgtacttgtctagagttccatcagcattgtgtttcctctaaaaacccatttgcagcctatggcaattctattgggtggtaatttgaccaaggtccaagtattgtttctctttaaggcagtgttctcaacctacattgaagagttccagtgttgcatttgtagagtagctttaactattttagattcacaagaagctaaaaaggccttaggttttcttattcttgctttaagccttgtaatcataggatgagaatagatcactgatggttgagcacctgtaactgtggtggatacagtcgaggcagttggcagaggaatagagcccaaaaatataggcacattggtaactttagacaaagggggcatattagatgagtattgaataaaaacattgacaagggaaaactcaggagtaggcaaagcagacaaagtatagacgtgtggggaggaatatgttgcactatagatggggaggagtgaccaaaactttgtccagtaggaactaaagcatgaggagaaccgggtgtggaaggagtaggaggaccagtaggtggtgcttgaggcatgcttctgagaggcagcaaagggaaaactcttttataaaaaataacatctctagaaatgtaaagcattttattcttagagagacctttatatcctttacgggacaaactttacctaaggaaaacacatggggtaaacctgtattggagattggtttcattatgcggcttaagattgggataacacaagcaacaaaacactttgagctcattattattaggaacattgtgaattaatatttctaagggagagatgttattgatagtaataataggcattctattgaaaagataggtcgttgtcttaaaggcctcatcccaaaaatttaatggtaaggatacttgggcaagtagagtaaaccctgtttcaacaatgtttctatgttttctttttacaatcccatttcgttcatgtgtatgtggacaagctagcctatgaacaatcccactttaatctagcaaatctgtaaatgctctatactctctacctcaatcagattgtaaggtttttatcttaaaatataattgcaattccaattgggttttgatctaggtaaaagttggtaaggcctcactcttggttctaagcatatatatatttccatgtgtacttagaatagacatctacaaaaatgatataatatatgtaaccattggaagagttagtgggagaagaacccaaaaaatcagagtgtaatagctccaatggttcatgaaaagtagtggtggcaaatggaaaagataatttgtgacatttaccaagaaaacatgcatttcaaaagtatgaacaagttttatatagacctaattacagaattgagagcccttttcacaattcatgtagtagggtggccaagctaagtgttccatatggaaaaagtaaaagttcgtatagacaattgatgagtaaagtattgaggacttgactaagatgaactcatatgtgaagcatcaaaagagaaaagatgactgagtttagtgggtggaaatttttaaaggcctttatcaagattcccagctaatacgatctttttggtttcttgaccgttaacaaagaaagtaaaagggtgaaacactagatagacattgttatcttgggaaaattgagagacactacgcaagttttttgtgatggaaggaacttgaagtaaattgtttagcttcaaagtttcagggaaaaaatgtgagagtaaagacaggataccaatgcgttctatattaccactttccatgtggatttacttttgtaaagtataataactactcaaactaggattggaaccatgaagagtaaggtggtgagtagcagcaaaatcaaggtaccaactatcatttgtaatagtttcttgggagacatagaatgcttgcatctcaacaagattcacaactgcattaaaccaaccaaaagatttaggacttgtagaagatttgtcaaacctataaaaacattgtttaattgtgtgccccaatttctgacaaaattattattggggtttcagagaccaagaagaagattgacctctaccaaaagtgtttggactagatctagaagcattacgaggagctgccacgaccaatattgaagtttcctatagacatagagttcatgaagaaacttggatattaaggttaaaaaataggacatgtgttagcagcaaagagaatctgagaactagaatacaaattacacatataaaagtgagattgagggggattttcagtgagaaagattagcttctccattgctaatgttaagagacttggcattcttctccattcgaatacatttagccatgagaagagcttccatctctacaacggtttaggtatccttcttggaagtgactaatgtagcaaaaagatcgtattcatcacatataagaatagcatatacatttgatttataaagtttaaaatatattagattttttaagttactatctttttacattaaaatattaatttatatatgtaatttaaaatatatctaaatatgcagattggatttgattagtttcttttatatgtcaatcaacattcaatctgcacaaatacaaatttttgatttttcgatccaatctgcacaattacagatattcccactttgtggattggattgagtattttatgagcactcctaaattaaaaagatatcattcttacaaatttaatgcaactaaaagtttaaaataactaatataacactaccaagtagtaaacaccataaaaataagcacataaaacaaccaattgttataaattttacagaaaaaaaagccacaaaaagtatgattatcatatttttatacatatatttcatatttttatcagggtaaataccatttttcattgtgtattttgtaaaagttactaattggatcctctattttgttaaatgataaattagaccttgtattttgccaaaatagtaacttgaattaattttttttgtcaaaataaaacttaataataggttgatgtagagatgttatgacaaatccggttacattttgtacatttctttgtatcgagaaatgtctttaagttggttatgttaaaaaaaatatcaaaaattgagctcaaggtcctacttataccattttaaaaaatatatagtgcattttgtcatttaacaaaataaaaaatctaatcaataatttttataaattaccagtgccaaaatgatattaactctttttattatatataaataaatataaataatttttttcaatatataatgtaattggattggattcaattttaatttgattttcgagatattgacacacgatagcggatccaatttaattaaaattcaactttcaacatccaatctaatctaattgtaattacatgtccaatttttataactgaattggattggacgggttagtattggattttgttcattcctaattgagatatttctaaaagtgatatgctttggtacaaatgtgtatttcattatcaaatgataattataattctgcatcaacactgattgagtgaatttctaactgctatgtaattatctaattttattaattgatgatatgaatcttaaacaacatttgctaatgcagctaggaatggcgggtgctttggaaactttatgtggacagacatacggagccgaagaatatcacaaattgggagaatacacttggtgtgcaataatctcactcacctttatttgtctcccaatatctctactatggatatacatggacagagtcctcatttgggttggccaagaccctctgatttcacaagctgctgccaaatattccacttgcctcatccctgctttgtttggctacgcagttctccaatcccttgttcgcttcttccaatctcaaagattgattcttccaatgctcataagctcatgttctgttctatgtttgcacattcctctatgttggattctggtgttcaaactccatcttggaatttctggtgcagcattttccattggaggctcttactggctcaatgtagttttccttggactttacatgaagtactcttctgcctgtgagaaaacccgaattaagttctccatggaggcttttagacacataagggagtttatgagattggctattccatctgctttaatgctttggttggttgagttcttctttcgcattatcctttcatagaaataattaattaaagcttatttttaaatggttatttttctgccattgatcatcagccttgaatacgcctcatttgagcttctagtattcctctcgggtttgtttccaaatgcaaagcttgaggcttcagttctctctatatggtatttactcttttgttataattttatatgcatatatgatcaattcgagaaatgaacttgttcatcaaaactgtttgatgattcggaagacatttataattcttgcagcattactaccactacatctattttttacattccatacgggattggtgctgctacaaggtcttctctacttctacctctattttttttcctttcgttttttaaaaatttattaggaaaatagtagataatgctatatataatttactaaaataaagaaagaatactctgcagcacacaagtgtctaacagattaggagcagggaatgccgagggagcaaaacttgcgatcaaatcggctttggttcttggagttgcagaagcatttttagggagtacaattctcttttgttgtcgcaatgttttaggatatgcttatagcaatgagatagaagtggtgaactatgttaaagagatggtcccattactttctttctcaattggtgtggacagtttggtagcagttctttctggttagctcttttttattcatttattattattattattggtatttt

SEQ ID NO: 112772 - DNA, 4136 bp, Cannabis sativa
  modified_base (444)..(455): a, c, t, g, unknown or other
  modified_base (516)..(517): a, c, t, g, unknown or other
  modified_base (619)..(619): a, c, t, g, unknown or other
  modified_base (3941)..(3947): a, c, t, g, unknown or other
  modified_base (3989)..(4022): a, c, t, g, unknown or other
ttgacatttataggattgaaattagaaaatatgacattattgaaagaaaagatgaattatgaaataaagtggcaaaattgtaactagtgaggcttactactatggtcggccacttagtcattatttttcctattattttatattttttaatccatataattaaatcctaaaccctagctgaaatactataaaaggaataagatgctctcattctcatcaaactaaaaatttagttttcattctttgtcaaacaacgtaaatgagagtctccttctatagtgatttcactccttgttcttcatcaatttcaagcctttagtgatagggtatcatgcccagtcataacaagtcaagtactcaatcatagtgtggaagacggtggttaaccaaactgaaagagagaagatttaggttcagatctttattatgctctgctacagaaannnnnnnnnnnntagagatctgaacggaaggaggcaaatttttccactaccatcaatgtaaggttttctaaannttatatgtgtttatttcattgttcatcgtattaggatattcatatatagggtgttagattatagattataatcaacatacatattagtaaatctagatcctngtaaaataatttccaacaaatttctcattatgcactggagcacagttgtaagtagagaacttcagttatcatacttaaaactttattcaattattaataaacacccctcattaattttataccatattatatttattttactttaacatacctactttacccctttcataaaaacccattctctttctctcttttctctctcctcaaccaaacagaaagggcaccatcccttcgtcgctcttgtcgtcacacgttcgacattacaaggaaactagtgtagcaccttcaccccattgtcaaagttgggaccaaacctctataattaatgagtaattcttttttgtaaaaaaaaaatcatgaatggtattgtatttttcaagtatatggtttgtttgcatcagatctttatactattggtagtttttgtgtattttttatctataaactaagtagatttggttttccacatctttttgttgtttagccatattttgatagtttctcgatgctttttgattgattctctatggtattcctaaatttgctttctgaaggtcagtgatgacatattttgatagtttcacgatagtttattgacaatttttcgatagattattctcaatggtttctcgacttgttttcaacaaacatttttgatggcttttcgatagattttcaataagtttctaatagaagatagctttgatgttggcttttaattaatttaggttatcgataggatttcgtgttcacgatgactttttcgatagtttctcgacagataaaaaaattgttgcagatcgtcgtcctctggttcgtcttcgcgatgacgaacaaagatcggtggttctcgccctttaaggctctggttcggtgggtcgtcgacagtgaggacatggaagaaccacggggcgtctgtgcttttgaaggtttgaggcatttggggtttcgatgagagaaagattggagaagaagaggtggcactggaagaacttagagctttggtggggggcttttggtggtggtgacgatgacaggaagggaacttagggcttccgggggttctcttcagatctaaagagagagaaagagagatgtttttaagtgaaaggggtagaataggtatcttaaaataaactaaggatagattggtatcaaattattttggaaaatatttttaggtatgtggtaaacttttaagcatatttaatgaaatttcctttgcaaaaagttttccaaatatagcatttattaattttttgtgccaaaattagtacattttttatctcatgcattgaagatggtcttaacgaactttggttttttaatggaaaattaacattttgaaatttgaattaatgaattgcttatctaaaaacaattaaaaagaaacctaacttcaatttattgcataaaaataaagggtgttgttttagaaattataaaggaaaaagtttttgttaggatattaaatcttttttagtagctaaagcctgaatagttctctttcgaaagaaatattgaatggatgtagtttctagaaaatttggataactttaggactagccaaactttttaactgcctatgacttagattagctttaggcttttatatacattaaaaaattaggggaaaaaaagaatttacttattcgggtactttgtcgtttgtattttgttgaagtgtaggtttggtccactattatacataacactaatacggtgccctaactatgtaaaatcatttgagctaaaaaaaactatgtaaatcaaaataaaatagtacctatggttcaaatttgggtcttctcgggtttggggtgtattgtcggatttacaaagaagtcgttcatcaatatggtagtgtttcaaaattgaaggggtgatcaaagtttgggatttaggtcatagatctgttgcatttttcaattttattttgttgtttttttatgttttcaataaaagtcacattcttatggatttagttagtccaccttgatgtggtgttgtgttagtctctttgccgcaattagtacatgtctctcatttagtggctcatttatgtgacaaaaattgaattcgagaaacttttatgctacgagattgaaggtgcgtatattgcaccagtgaaaatatggcatgtatgttctttctttttgggtatttttgattttacctctttattaatgaaattgttctcgtttttttaaaaaagaaagaaagaaagaaattggtgctacaaagggatttactcacacaagtaacaaaatattatattgtatcatttttcaagggaaagtttttttttttttttcaaaattagctcattgttttacttcaacactcttacatcctatcagcaccaaatatacttgaattctatacaagtatcactataatcattacaattgctcaaattattctatgtctactctttttattttcttaggcaataaagttgaaattaaaaatcatttctcttttaattatgtagacaagttattacaaagtaggaatactcctgctccaataaccactactaaaaaattagatttttctgactattttaaacagttggataaattactttcatcgatctctataatcatcgcctattcaaccatcgcaaaacaagtagaataggcaatggtggaaaattgtcgacaaaatattttgtcgacaggtgaaaatcatcgcctatagtttgtagcagaagctaggatttaaaactgtagcctatagtataggctacgatattaaaccgtagtctatacttttattgttccaccgccaacaacatgaaaaacctaaaacccttgaagcctagtacagttattagcaagctttcaaattctatcaatgcatagatccacaatctctttcccaactaccaaaaaaaattacaaacttgaacaaacattcgaagtaatttcaacaaaaacctataaaagagattgtgtaatggcctctaatgatgttattggctaatgagttgttcggggtaaaaaactggcaataagtaccggtcctcacttcatcaatgaccgttagttctagatccaaaaacacagcacggggtgtgaatccgacttgaccaatgtgcatcaagatgcactctctcaattctcttctctaattttttttgttattttgttttagttcggttatttggtgtgagagagatcgagagagacgagaatgggtgatgggtggtgggtggtggttgggtaccgtcggtatggatggggctttctgttagaaatattttaccaggatctatctaacaagtatgtttcattaacatcgtaatatgaattctaannnnnnnaaataaacacatataaagtttcaagaaaccttacattgggtnnnnnnnnnnnnnnnnnnnnnnnnnnnnnnnnnntctagcccttgattcctttctgaagcagcgcattatcaaggcctgaacctagatctctttctctccttccttgatgctgattctctttcttgttggttggattcttcacaatct

SEQ ID NO: 112773 - DNA, 4931 bp, Cannabis sativa
  modified_base (774)..(776): a, c, t, g, unknown or other
ttgtattaaaagataatatttatagacataatagtaatttaaggtagttggtaaataggttagagggtaaaggttcaaatcccactaactacactttatatttctttttaaatttattcacgccccccctgactttaaattctgggtccgccactgcacccatacgcttttttttttttcttattttttttccaaatatttgaatagatataattttaattttttatacgatggcttacagtatttttttttttaattttaacaaaaaaaataactatattataaaaataaataattatatagcctaaataaaaaaaaatatatatacaaataccacttacgcttacgcacaccttcaacccaagattcatgcttcttgggcaatcattgcgcaaccacgcaacaacccaacgcagccaaaatgaaaaattcaaccagaaagagtaccaccattaattccgacgacttcacttgagaagacgaccagaatcaatcaaaatatagactgtttcaaattcatgaaaaaaaaaatgcagaaaaactactaagaaactaaaattcaaccagaaacctaatttaatttgcataaaactaatatcctgactttaattttcagatccatgaaatgcagatctcaaaaagttgaattggcgttcccaaacaatccaactcaagtataataaataaaaaattacgtcaatactataataaaatatttatcctaatgtatttttgttgttttccaaatatttaatggtgaatttgttcatattnnntcatgaagagacatgtagatagagttacgtacgtagaaacactattctaattttaatgtttcataacagttgcatgaacattaattttgctaacagttatttcgtctgattgaaacatttgtctcatgcatccttcggctagctaaccacccaacaacattcgtctgattgaaactttcgtctgatgcaaccttcgaccaaccacccaacaaccttcgtctgatagaaaccttcatttgatgcaaccttcagccaaccacccaacaatcatcgtctgattctgtaagtgataatgtaagaggtattttgataattagaaacacataaaatgtataaatgttgttatggaggtatttttataaataaggtattaatttgtattttttaagtagtaattcttctatattacttattttatttatgcattaatttacttatataaaaatatgtatatcaattttttttagatatatataatatatatgtaaaatttacttattttatttaagtattttttagatatacataatataaaattaattaagaatattatgctaaataattttatattctgttaagaaaataaaaagataacgttaaataaaaaattatattaataaatataaatttttaagttgtattttgaataataattaattcatttaataataaataatctgaaatattaaattttaaattataaatggatttttgtgggaatctccttcttattaggagatttttctcttctcactcaactaaaaataaacggagatgatgattaaattattaacatggatgggatagtagaaattatattgtatacctactttattttacttgttttagtttataccttcattttcatattccttaagatatacccatttttatagatgatgttcccattagaccccttagatcaatgtaaattatatatgatagacttaagtacatagtgaggggacaactcactcataaaagtgggtattttaataaaatataatatgagagcatttttaattaatggatataaaaaagagattttcttcaacttatcccgatggaatgggagagcactcttgccaaattctttacttatgtgtgggtttgtttatgtagaatgagaagcagtgatcacatttttataaattaattactttatatatatacaaataaatatatcataatttatttgtatcttaagttgatagtaatttttttatattatttgttataaaaaatgggataaatattattttgggttttgtgttttacaaaagttaccaattggaccttctgttttgttaaacgacaaaatggaccctatattttctaaaattgtacaaatagaaccatgaactgattttttgtcaaaacaaaatttaataataatctgatttaaaagtgttatgacaaaactaattacattttatatatttgttcgtattaaaaattgtcttcaagttggttatactaaaaaaaaagatgttaaaaattaagctcagggtcctatttttactattttggaaaatacaaatctatttttccatttaacgaaatagagggtctaatcagtaacttttgcaaaacatatggtctaaaatagtatttaccctaaaaaaatatctcattattcttctaattaaattgtaggatcgataactaattgtacgaataataatatattaatactgtaatccttagcacattttgattttttctttattcccttagagtttttctttagaagttattagttgttgtttgatttttttgcctgaccagactcgctgaccgtttctcgactttacgacgtggctctggtctaatctattcccacattattttcgacttcgctaaagttgttgccatctcttcttttcttctccatcttttttcttcaaaggtaaatttcaatgatttactcattcgctttggattaaaatttcattggtattaatctttttataagtatgttatttctagtagctataagttttgttttttttttatgtttatttttatttttaataatgatgttactttaccaccttgctattattatagttgtaggactttattaatttatgacaggatattgtgagaatttcaattggttaaaagtaaatttgtgttagtaacataattatgatgtgattatttgttatgattgttattattgtggttgattgattccttatttcattttattctagctagattgaataatagaattgttatcacttaatttttattaaaaaatctttaactgattgtcatttataagtgtgattaatttattacgtatttatttggatgaaaaatatagtattcttcacaattatttgatgtttcaacactgacaatttatttgtcctttttcttaattcgagtgatgtattatcatctaattatattaaaatttctatttttctcattaataagaatgctcttggtgaaccataattataaatgctgctcattaatgtttatcgtaaaaatcttgaattaaggagtggtaatttagtaaatggacatcatggtctcctgaaagcagaataataaatgaagtgctccaagtgtttgaattagagaaaaagagaatcattcaatcaataatagccccatttattcagcaaaaaaataaaataaaatcagtaatagcatttatggtcagtgtaaataggtacaaggctgctgctttacaacgcgtgtgaatgtcacgtgctccgtagcatctgacacacattcgcctcgttctgaacaaaagccactctggcaacacacgtggttctgtcaccgtggacccctaagctcttgtccatgtcagataatgtgcgggccccactttctgtttgaccttatggtcaacttctgaactttctaattctaaagaaaaacctaagacaaatgacgtcgtttcgatatgtgttgccacgtaggacaacgagttcgtgtggtggctcgtgacctgtgtgtaaaagttgacatcaggtgtagtgggaaccagatggtggtaccttgtttttttcggatttaaataaatataatataaaaccatactttgtattaataaaaccaactcaatctagctaattaaaaaaaaaatattaatgtattttttcattagccagtcgttgaatgttaaaagtgatttttttggtcacggggcattgcttttcctcttcgagtctccttaattaatgtgttccacatgtcttgaaaaatatacactatattataatatatacgtataacgtatttaataattatttataaacttttcatacccagctcatggatgatagatttagttattaatttgcttataccttatggttacttttgctatgatatatggttggaatttatatatatagagggagtaaatgtgttacggatttactttttattggatgttaggactcttttaatcagcagacttcgaaatccaacaaattaactaaattatttaacaccgaactaaataaattattatgttaattaacaacaaaagaaatggggatatatagatgatgaaatttaatttttttttagaaaaaatgtcttttcattgataatgaaagaaaaaaaaaagaaaaattacaaaaatatagtctctacgtacaaattttttaatatttttatagtttttcaaatttatttacataaaatacgatttttttatgttgtactcttattattttgttgttaattgtttattatttatatattatttttttgtgttgttttgttattatttcgatattatttttttgatacttttatttaatttttctgttgttgttttcttgtaattttatagaactgtaaaaatgtaaaaataaaactttaaacgtaaaaatgtaaattttttataaaaaaaaaatattttatataattatttcttaataaaaaaagctaatgtgcactcacttagcaaacgggcacaatattacaattaggagaaattcaaacaaaattataacccaacaactgattagcagtgattctataattctggatatgtgctgaacaaaattagtttggggtgcaaaaattaattatagagaattatgtaactttttttctttacatatttactatactaggtgattgttacgtgccaagccacgtagtgttagttttatt

SEQ ID NO: 112774 - DNA, 2135 bp, Cannabis sativa
ttgaaaattaaaaataatattttgctattttctgttttctagttttttaaaacttaatttttaaaaaactgtttttaaaattttttgccaaatgactcctattagaatttaaaaactagttttagttttaaaaaacagaaaactattttttaagttatgaagccaaacaacctctaagagtttttcgagttttgattttgggtgtgggggaagtgtataccagacccgcccgttagggagtgcaggttttgggtgcgggtgagtcgggcttgggtcagcacgggtccaggtggttaggattggatttcgagttaggctaggccaacaaaaatggcttttttttttttaaattctttttaatatcatttttcccataaaactatccaaatttcagtagcttttttctctttaatctgattttttggcattttacaatataatatttataaattctaatctttaatccttattctcattatttctatgacatgtttactgagaatcaattgtatggaattgattcttattcatttctttactaaattttataatgagagaagctagtgagatccatttaattaaggagaaaagaataagaaaattctactcccatttatagggaatgtctttccttatcataatttactttatttatattttaattttataaattaaaaaattaaaagataaatatgcctttccaaaaactattacattttttaacaatgacaatttagtcaaattttagcattcagattatttttttctagttatgtaaataaaataaaatgattttaattttttttccggacagtttagtaaacaacataacaaattattatttccgattatattatattttaaacccattcatttctcacattgattattctaatttcaaatacaatttagtaagtccttaagtagagttttaacttttaagtaacaaaacaaatgaatgctatttaatttaaaagttctaagaaaagttagcccatagtccaactctaacaaactaaagtctatagtgtgaaaaaccaatgtctataatctaaagtccaaacaaaccaaagtccacagtcctacaacaaacatataatcaaactatcaaagtttgattatcaaagtctgaaactaaacaacaaatacatatctaatcaaactagattgtctaacaaaacaaagtcctctcacaaaacaaagtccactcgtaggcatcgtttgagatggtctaagtgggcttcttggttggttgccgaaatgaatagagagagggagggagggaagggtcagggatgggagaattattttagatttaggtttcgataggatttttttttttcatttggggtaagtaaataaattatattttttttattagttttatagtgtatccaggttttaggcgagttcgagtaaaacttgggttccagaaatgttaaattatactaacccatgaacctaacccagtttgtaatcgagtttcacccgaacccacccaataaattttacaacccatttttgtcaagttttctgagctcaggtcggtcgagtttggatttttgggtacaaatattctgcccttatttctattattattgttgcccctcttcaaaaaggcaaatttaaatataataaaattaaagaaaattttaagatgtaccttaaaaataggtctaatgatgcaatgggctttagggacctctttgtgtttaataaagctcttcttgctaagccaatctggcaaatttataattttcttgagtctctagctgccaatgttttgagggatctctattttcttaactatacgtttttaaatgttgaagaaccttataaagggccaggaatcttttccttgatgatgctcggtggttaatttgtaatggtaccaagataaatttgaaattgatatttggattcctaaaaagactgcatcaatttcttattcatttcatggtcactctagtgtttcaaattttagtgacattttgttggaaaatgggaaatgaaattctatttttgttgactctttgtttgatgttattgaagcttcaaagattttgactattccaagtgttgggattttgtgccctaaataaaacctattccaatataatctgatttgttatcaa

SEQ ID NO: 112775 - DNA, 8331 bp, Cannabis sativa
  modified_base (40)..(59): a, c, t, g, unknown or other
tttatttcattgttttaaaattcatattaggatgttaatnnnnnnnnnnnnnnnnnnnntctagatcctagtaaaatatatcctacaactataggtttgacaaaagctttactggtgtagcatctggatccactcaacagaaccaacctcaagccaactttgttcagaacacagtctcacaagacacaaattggtaccccgactctggtgcaatgaatcactgcacaccagatgctcagaatctgataaatcgatgcaactacaatggccctgacgatatatatgttggagatggaacaggtttgcccattcaccacactggtcattcttgttttctgtctaaatctaatcacattcttgtgttaaacaatctccttcatgttccaaaaatcacaaagaaccttcttagtgtgtctaaatttggtagatataaccatgtttactttgagttttatcctgatttttgtcatgtcaaggaccaggtgacacacaaaatcctcctcactggtgctgacaagaatggcctgtattcttttgatgattcccagttccaactccagcctttcccactgtcatttagtcccagtttcagaccagatagtgaagccaaagtcaactcagaaattgtccaagccaatgtttcctttgctgccaacacagaatgtagtcaaaataataacaatctgtttcaaatgtggcataatagactaggccaccctagggagaaaattgtgaaaactgtgcttaacacttgtaacattactgttagtaataaaattcctttttctccttgcaatgcttgttgtctaggaaaaattcacaaatttcctttcccaaaagcatctgaaacagtgtataatgaacccctacaacttgttgttactgatttatggggtccatctcacataacctccactaatggttataagtactacattcattttctagatgcctacactagattcacttggatatatctccttaaaaacaaatatgatgcactcaaaaccttccaactctttaaagctgaagctaagcttcaattaggcaaaaaaaaattaaggttttacaaagtgattggggtggtgaatacagatcattcacaccctatctcactgagtctggcattgttcatagacacccttatcccacaacccatgaacaaaatggattggatgaaaggaaacataagcacatagtggaaaatggtctaactctcttagctcaagcctctatgcccttaaaattttgggatgaagcctttagaacagttgtatatattcacaataggctaccaactgctgtcctaaataatcagtcaccaattgaactcttattcaatataaaacctgattataccacattcaaaacctttggatgtcaatgcttccctaacataagaccttacaacaaacacaaactccaatttaagtcctcaccttgcactttcattggatatagcactaatcacaaaggttttaagtgtcttgactcaaatggcagaatttacatctctagagatgtaatatttgataagcttgtgttcccttatgccaaatatgaattcaactcatctgaaccaccaattgagtattctccatctgctctcattcccataggcaatcacagtgaacattcaccaactcagttctccaataatgacagtcctccttcattaccaactcaatctagaatcagcatctcacctggtttccaatctagcatcagtgtccaacctggtttacaatctgagcctacacctcaacctgactctactgatcctcacactaactctccatcagatccccatgtgtctattattcctgcaccagttgctattcctcctattaacctggttgttcccagtatccaggttcatccacacatatctctctcacaccagagtcacctaatcctaccattccaaccaacactcatcaaatggtcaccaaggctaagtcgggtatccacaaacccaaggttttactcactgagaaaataccaaagagtttcaaatctgctttgcaatttgaaaaatggaggcaggctatgtcataagaaatccttgctcttgcaagaaataaaacatacacagttgttcctctaccagcaggcaaagaactgattggttgtaagtggaatcttcgaataaaagaaaatccagatggctcggttgacagatacaaagcaaggttggttgccaagggctttcaccaacaacctggctttgattatactgagacttttagtcccgttgtaaagccaatcaccataagagttgttctgacattggctatttcgaaaggatggattgttagacaattggatgtcaacaatgccttcctaaatggtgagttacatgaggaagtatacatgacacaaccacctggttttgagattaccactcagcccaatttagtttgcaagctacacaaggctctctatggtttaaaacaagccccaagggcttggtttgagaagctccataagtgcttactgtctttgggattcactgcatccaaatcagatcattccatgtttattcttcataacacttcatcaactacacttgttttagtgtatgttgatgatatacttgtcactggaagtgaccccaagtcagtagcatcactcatcacctctctcaacaatacattctcccttaaagaccttggagagctcaaatattttcttggcattgaagttgctaaaacaaaaagtggcctatttctctcacaagcaaaatatgccaaagatcttctagtcagggctgatatgcacgatgctaaatcaatctcaacacctatggttagtggtcaaaaactctgcttgtggcagtgaagttttctcagatccacacatgtacaggtcaatcgttggggcattacaataccttacaatcactagacgcgaactctcttatagtgtgaacaaggtttgttaatacatgcaacaacctcttcaagctcattggcttgctatcaaaagaatacttagatatgtggttggcactactcagtttggtcttcatctcaccaagcctacacaccttgaagttaaggcatattgtgatgctgattaggcctctgatatggatgacagaagatccacttctggttttgccatcttttttggccaaaatctcattgcttggagtgttaagggaattctgttaaatctgttattttctgttaagttgtttctcaactgttttagttttcggttgttaggattagcttttcagttgtaacagattcttgtttgatgatcactcatctttgatgagtatatattgtactgaatattcccagtaatgaatcaatctttcactctcctttctcaatctatctcttcatcttttctctctgttctttctttattgcttatgttcttcatctaagctctaatggctaggagattcaactctcctaacatagactattatttgttctacctattaataaaaaaatttattctctctaaaaaaacatgtaaacgaaccaaaaaattatggacaaataattaaaagattctaacaagaccttaggaaaagggagggatggaaaaaggagaggtcatgagttcgaacccaagacctttaagctacatgctattaattgattgtaaaataccattacgccacactcaaaaaaatattctaacaagaaaactttcatgtatgatttttattttttttttaaaaaaaacacgtttcatgcattatcaaacaaaatcaacagttacatatgtacataacattaggatataaatccatatacaattgttccattatgattttgtgatatatttacattaatttttaaattatgagatatatacaattgtaaaatttaatataaaatttaaaattaaattaacatttttattaaaaatatgaaaacaaaataactttatcattaattttatcatttaaaacaataataaataaatgcaatatagtttaatgcaataactaaattgaataacaaaatattgaaaatatcataaaagtatatataaaagtagtgtatttattgtgatggaaattttgcattatattttattaagattcaaatttggattaactttttctatgtgacaaatttaggaaaacttttagcacattattaaagtaaaatttttacaaaatgaactatattttaacaataaattaccaatttgtatctccaatagagatgtcctaacagaaaaaacaagggtataagctactactccatttggaacttataattatattttttttatatgatagtgtatattataattataatagaaaattttaatatactgaaaataaagtttaaagtattcaattgcatgtatttatactaaaatatgcatgtgtagctgaatatttaaaccttatctattataaacaaattatttaatttttatatagatataaaaactcagtataacaatatacctataacgtatatttgtgatataaataaattaaaattatactttcttaaaaagatatgatgcatatttggacatgaagagatcataataattaaagaagtttatctgaaagtgaaagtatagaatgtccaataatgtcttatcatctcatttgagtggccgttggtgtagtttgggtaccaacgaaataaactacccaaaagctttccaataaggaaaataaagataaaatcaatgatgaaccatttgtttgttttgtatatttaatgaaaataataataaagacaactggtcttttataccgagtgagtggaatcaaaattgatagaaaatatgtgtataatataagcaaaaaaaaaaaatgaatgtaggaaattatatttaaaaaatgctcaaaatgttaaaccaaataatttttctttttcacaaaaattattttaagtttatttttgtttgcaaatttaaagttttaattaaattttaccattaaacaacaactagatgtgtcacagtgttacagtgtatacatatgtacacgtgtcatgtatttattgatcaaagtaatcttaactatttaaagattataaaataaataaaaaataaactaaacaaaattgaaaccctatgtgtttatttctttcatcgtcactctctctctctctttctctaatatttcttgtgtcgatgattgcccagacgacagttcttggggaagcgacgacagaggacgtcgaaggggaagtcgaagggggaagcaagggcagggtttttgcctggacacttggggaagggatcttggaggtttcttatctaggggaaccgacaatagtggagtcaaatgggtcttgggttagaataatggcgactgaagtggtccgttcgtgtctgacgaagaactaggagagagagaaaggagtggagaaatggagcttttaagagttatcgacctctgtttggctcatcttcattgacgaccgttcgtggttgtcatgcgtactggttgagatctcttttatttttgtttatttattttttagttgactttgatttgagatttttttgagttttaagtttaatttttattttggtttttgttgacggtaaaactttttagccaaattatagccaaaaaatttaaacttagatcaagatctaggattaagatgaagatctgaaaatatgaaaacttaacgaaaaatacaaaatagacatggagaaagatagaatgtatatttctctaggtcaagtgttacaatgattttacaaccccctctcacatttgagaatgaggtatttatatgttttaatgacctgggtacaaaggtggtcctaaggggcaaagtgacatccatgatctacaagctacaggttgcaaatggtggtcttgcactctgtacctttgtttggtgtcaggtggtctcgattgacaggggtagtggttgttatgcatccttggtcggaatgtcaggccttgtaggtgtggtgcccccactactcgtacctccttgacatcagaacttgcaggaggcgtagttgtacttatcttatatgcacgctttgtccttgtaatcgtaccttcgttgcttttgtcttcaacactagggaaggatctcacttggcaaagctattcatcgacaagagcatgaccgattgaagcgcatgaaaatcttggtcgagtggcatgcatactaccttggtcgagtgacattaatgcttaagcataccgagtgacttgcatgcccaagggcatgtcaagtgacatgcatgcttgggcgtgccaagtgatatgcatacttgggcatgaagagtgacatgcatgcctgagcatgttgagtgagatacatgcttgggcatgccaagtgactctcctcaatgcttggccaagtgactcttctcaacacttggccaagtgatttttctcaacacttggttgagtgactttcttcaacacttggctgagtccatttcctcaaaacttgaccgattgactttcttcaacacttggtcgagtgactttcctcatgacatggccgagtaactttcctaaccacttggctgagtgaccttcctcaaagcttggccaagtgactttcctcaaagcttggtcgagtgactttcctcaacacttggccaagtgactttcctcatgccatggcggggtgacttttctcaacacttggccgagtgactttcctcaaagtttggccaagtgacttcatgatgtgcatggtcgagtggccatcgtccttcacatggccgattgaccttggtcttggcatggccgagtggccatggctcttcacatggccaagtggctcttcaccatgcatggtcgagtgactcttcaagatgtatggccgagtgacttgtcaacatgcatggccgagtgactatcaaccctacttagcctagtggctcctaagatagggtttggtctagtggccatcaaccctacttggtcgagtggctcccaagttagggtttggtagggtggcccgagaatacatgcgtcgactaggtcattccttagtcgattcttaaagtcggtttctttcacttcttgagaccaaatattgactaatatcgagaattagtctttttcattttcaaggttaatagtttttttggtgttgatttagatatgttacggtgattctagtgttaagggtggtggttgcggtaggagtacatgatcggtggtggcaatggtaatggaaattgtgatgggtgtaccatagaagaaaaagaacaaaaatgtttagaccaatatgtaataatgtttaaagaataaaaattatttagactaatatatacatatgcacataagtgaacatatgtacattagggtggtggtgaaattttaccaaaattttaccaaattttaaatttgtaaacaaaaatgaacttaagttagctttgtcactaaaaaataaattaagtatatacaaattaaaacatacagaaattggccacagatttcttatgtataatacaaatatacataagaaatttttggttatatttacttttaatcgttagaattattattagacgattgtaattaatttaaaattttaatttaaatacataattaatttaattctaaaaataaaaattttacccttgttataaaaaaatataaccaattacatttttatttaattacataaattaagtataataatatatattatattatttttttttttttggtttttgagaaagagtaataatttgttgattagtatctttagtaaaataccaaattgatcacaaatatagaagaagaaaatgaaatttaagtacctattcataaattaatcagtggagcttcaaaaatcctcaatggcttacaccaataccaccataaccacagctcagacaccgctacaaccgtaagatgcaactcaccaacaacagcagcagcaatacaagaggctaggaaggaaaaaagttacggttgatgcgattgcgagctaaaggagggagggcgggtgttgtagtggtggtcaaggacgacagggtagtgtctttacttgctacgaagatggaggctagaggtcctatggaatgcgaattggctgccttaatcgctagtttgcaggtctctaaggagctggccctgaccaatgttaattttctctcacactattgactgctggtttcattccttcttgttttcgcaattttggtttcgaagaagtgtaataccccggttcatgagctgcccaaatggggatcaaacaacagttgtaaattgtaatggcttttgttcaggggttccaaccaaacatttaataatataaaaatatattactttaaatatacacatatatcatatatatatataaatatataaacatatatcatatatatatgtatact

SEQ ID NO: 112776 - DNA, 2067 bp, Cannabis sativa
aaaagaggtaaaaatgatagattttaaaaaagaaggtaaaaataaaataggacaatataaaaagggtatagagtgtaatttcgcaatctataatggaagagacattagacgaagaaaacagaagaaatgcataagagcccattcatttaagaactaatacaattacacaaagatttttacactattgaaatttttattatttttattttttttattcttagacggaaattttcttcaaaaatattctgtaaattttatactgtatactgtattaactttttacggttattttataattgttctactgttgttttaattgttctattttatttttttatggttgttttataaaaagactatttttgtaaaaaattcaaaattatagacttttactccaaatctaatttaatatttttgtaaaaactccaatatatatcctgttttaaaaaaaaaaacatataaggcccgtgtccaaaagtctaagggttcatctttcaatcaagtggcccaactcacttttctcacataacccaacaacatagcttcaagtcttctttaaataacttgggctcttccccaaatcacctaagctgagcattaacaaacttttcaaatttatgttaagagaaatatcatataaaattaagagatatgaaaactatatcggccctaacacttattgggcccagacaaaaaaacaaattctgactccctttattttaaatcataagataattgtatgatattaaatgataattttaaaaaatattgactaagttttcggatctaagtgtgggcctagcccgccttaacacaggatcgtgactgctattgaccagaaaatggccagccacaacaacttgtctagttacataaaattcgagaacaataagccaggattgaaaaactaaagaaatatttgtagttcacctttttaagcagtaataaactaacgactagtttcgtacaattgtattgtgggaaaaaactgttagtagttgtaattgtgaggaaaagcaaatctaactaagctatagaataaaattttggtgagtgtttagtaacttataaattttaatgtactataaaaattttaagattttgttagttataataatatgatatataatctagtttattatttatttttttagtattttatgataatattaattaattttaaatatatttttatttttagtaatatataagaaatatagtttagtataaataaatttagcatactttgtttttttaatgaaaaaatattttctaaaagttgattgttttggcttttagttttgttccataaatttttgagtttatatgaaaatttaccttgaattttggttgggtacctatttgggccttacatttgaataaagtagtctttttttttttttgaaggagaataaagtagtttttgaaccttgtgtttaaaaaaaaaaaaataccaactatcctataaattagggtgtttattggatcacatctaatatttttaggcctattcagattcgatccaattatatattagatgttagattttaccatccaaactgatccaattaatttcaatcatccaatcgatccaacatccattaaattggatcggttctatccgttgaatgtattttatatatatttattgatttaattttagtttatttaatattttagacctagtattttttagatcggattggatcggatccatccaatattgtaggtccagtatgtattggattagaaatcaaaaaaaaaaagtaaaattttaatgttaatttttatatgtatatatatatttaaaataattacatcacaatacatacttttgaaatatttatgaaaatatgctcaaatattttagtactgtcaatacctcaactctttctaataaatcgataaacgtgtaccgaaactcaacctatttattttgctacctaccacccagccattgagagttagcatctccctatggtagttctttttttttttttttttttccaaacttttaaattttatttatatattttaaaaaataattacaaatcagttctatttttt

SEQ ID NO: 112777 - DNA, 3618 bp, Cannabis sativa
  modified_base (103)..(113): a, c, t, g, unknown or other
catatgtaattaccacctcatatccaaacacaccgtgcattttaaaatatagtgtaattactacgctgtgtaattaccaccctagtaattaccctacctagtnnnnnnnnnnntacttccaaacacacccttaatgtacagctcatttattctaacaagaccaaatagttgcaaaccctgaagtttcattgccgaattctaaagtatttatcaatctgtaacaatttattttatagactgtacattcctgaagtattcaaatttattatatcatggattgacacaaatggatggagttgtctttggaaatttaagccaatgaagctaaagtgtgagggaatgatggggttaagggtagaggtctaaaattcaacacctgagacctttgttattttccttgtagtgaaaccaagggtgctgagtatataaaagcgtctctgaaactttgtttttgtttttatttacatttgaagatgtggcactggcacacacaagtcattaaactcatgtgctgtttcattctctggcagtccgaatatccaaactacaccccacttcttgctaaaatattggaaggtttgctttctcgaaacaacattcaggacaaaataagccataacgaaaaggtatgcgattttggcagcacaagacttccaacaacattggcattcctactttagtttgatttatgattcacttgtaattatctgggtgctgtctttcagttatgttttttttttaaaaaaaaaaagatttgggtattgcattgtaggtcattgatgcagcaaatgaggtagttgatagcattgacaaagatgagttgataaaattcttggcgcttaagattgatccagaagatgatgaagcagaggtatgcttgcttgtcaacagaaaatctttgcgatttatctagagcaaacattctaagttctttcccctagtttctagattggttgtacttaattgttgctgttgttacagaaactcaaaaagaaaatggagacgactcgtgatcagttagcagaagcactctatcagaaaggattggcattagcagctattgaatctttagaggttagaacgctcatgtttttcattacattcttgaaaactcaattgcaccagcagcaattgataggatcagtctgtttctagtaattttgacatatctttttgaagttaactgtacagcactaattgatgagtaatatatgatgatcgagtggtagtgtgttaacaatcatcatacatagcaattttcattctgttcaaggttgtatggttgaaattgacatgcacaggaaatattgcttgaaaataaaatagctggtaaaattttaagacagtttgaattaccaagtgaaggtactttattttctgagattgaattcgggtatatttctccttgactctcatatgtattggaagaatgattgttaagaatttgttcaaaactatgctaagagatttaatgttgtttttgtctgtgtttatcacatctttgttgctgtgataaatgcacgtttaccatacccttgtattcccttttagtcagggcagtattgttaaatttatttcgtattcattttatttaattttttttttaaaaaaactatgctaagaaatatggcttctagtttataactgcattttctgggtactactatttacaaattagatggggttccaattttatatttctaatagttatatgtgtagttcagatacataagaagcatctgaattctctctacttcaatgcttacctatacagaggtatgctcaagccagatggttctggtccaatcatcatgtgtaaatgggttttctttatttgggactaaaatctacttgctagtacacttgatatcctttataaaaacaatttagggttaggggggatcctagtaaaaaaaaaaacaatttactggtaaatttagttaagtgaactagagcatggtcgcggcatatttaccaccattatttatcacaggctgagaagaacaaagaagctgatacaaaggatgcggacaagtcggctgatccttctgaaaaggactctgatacaaaagatgtggacaagtcggctgatccctctgaaaaggactcttgttcgggccatcctgacatgtttgaagagaactttaaagagctgaagaaatgggttgatgtgaagtcctctaaatatggaaccctcttagtaatacgtgagagacgttgcggaaggcttggaacagcgctaaaggtactttcactcttcgctcttgtgtacatagacacaccacagtctacaccacagcacatttaatctaagcataacaataatatggattctagatttattttttattttattttaatccaagcttctctctcactttctttctctcctttacccgcactgattgattatatgtggtcctatcaaacaatcattcttttatattggtctcctcacaatctttaggcatataacgagttcatgacctcagttttacatttatgttttgcttggtataatttgagaagatctccacaaatcatttcatcttttactgtcttaggctgcgactgatttgattcaagaggatggggaacctcccaagaagaagctttatgacttgaagatttctttgctggaggagatcgggtggaatcacttggtgaaatacgagaaagagtggttgaacgtgcgctttccaccaaatctgcctctgttttgaaggtttgcctcattttctttttgagtcacacaccattgaataagtggctcaggtgttaggctctatattccaagtgttgatttctactaggatagttgatttgctttacattgtcctaatttgtcaattacataaaagtggcctgatgctatgatgccaggatgctaatgacaagttcatgattccaaggaaaataaatattttcagtttctattggttgctagagaatcgagctcaacactaatctgtacactaagtctatgcttatgatttcatttgtttttgcactgaatgaaaagttgaaaacagaacaagctcaatgatttacaagaccctattaataaataaaagatgttaaataagggaagcaagttcaatctaagctttttgcttgaacattatttttagcttaagtttgatgtgttactttgttattgagtttaaaatgagaagaccatctctaagtattgagcgcgaaagtcaataaaacaatatatttggctcaacttttataattgtgttccaaaaccaataatgaatttgattaaaaaataaatatttaattaatgatgtttattatataataaaataagacaatgaattataattagcatgtaattggaagaagaaaaggttatacattgtactctttccaatctattaagtattaatacactcaaaatgactttaaagtgtttttataaacgccataaaactttcttagccgcaccattttgcatcacatattagtaagcccctaactataaactgtcaattgatttgttatttttttgagaaaaagcgtctatatcatagattcaaataaaattagacctctcggtcgttacacaaaatattgttaggtacaactgaaaccgagatagacccaaatacc

SEQ ID NO: 112778 - DNA, 1657 bp, Cannabis sativa
atttttttttaaaaaataaatatcctgtgcccgatttttttctccgaaaaccctagccgcctccaccccatactcctctatccagtcttcgcctaagccaatctcaaatcttcctctgtttgtcccctgcgctggtttgcttcattcaacccattgtgcagatctgcctccgtctacctctctccctctctgtctcgcatctatcctctcactttcttattacccatatcgtgttgccgacacccatcaccatcgaccaaatggaggccaccattgtgtttgtcaactctccaaacctaaaattctgaagctatatagatctgcctctcgttttccctctttctctctctctctctctcactgctccctctcttggtctttaattggtctctcgtcctcctccaaatttgagaattatatttgggttttttttttgtcttctcttgatttggatttgagattgttttttaattttatttttgttttgggttcaaatttgagattgggattagattatatatgattttttttgttgtttgaattttattgatgtttattttgattatgttggtgtacatgttgattggcatttgagaaatagattgtggtagttgtggttagagcggtggcgttggtatgatagttatggtggtagtggtttcaggctggtggtgtgttgaagaaatgggttgaggtggtggtggtggtggtttctatcgggatttgagaaattgattgtggtggttgtggttggagtggtggtggtagttgtgatatgatagttgttgtggcagtggtttcaggctggtgggtgtgttaaagaaatgggttaaggcagtggtggtggtggtggtttctgttgggaattcgataatgtaattgagtgtgagcagatatggaatctatagcttttatccctatttaaaagtgaaacgatgatttcttttgagcttggctaaacacgacaaataatagagcactcatttcggtaattacattagtttactgaaattttatttacatgtagcaagtattttaaagataaaatacattgaagtgtaaaactataaatttatccccactcgatataaatcttctatagaagatcattaattatttagattgtaataatagataattcatagcgtatttatatttagtatatagagcattatatataattaaaagtgtaattctgaatttatagtggagtgatgaggaattaataagctagaaaatttacttgataaatttcggatctacttattaggagcttgataattatttataattattaaattaaaattagtatttaaataattagatgagatatgtgacaaaattagaaaagacacattaatttcattagttgaaataaagtggcaaaaatctaactctatggcccataaggaaattcgaccttgggttagatttgaagtccgattgtctttattttaagtccatctcatctaatctaaccctagtgtgaatgttataaatagaaagagatgagagctttgttaaatagatgattccaagcaattcaaccttagaattcttctctctttgatttttgaaagttactatttccctctctctcaaaatatgttccaaagttgatttgaatatcaacccatactattcaatgtgatactca

SEQ ID NO: 112779 - DNA, 4214 bp, Cannabis sativa
acaatctaaagcacagtagcatttaggtgacattttgtatgtacaatggttcattccacctctcttacttcataggctaaatgtattgtgatagaagagcattgagagtttgggcaactgttgcttaaaatcttatacatttatcagtatttattgtaagaattgttttgacattgctccttcatgaaacttgaaaataattcataaaattaaaggagaaaaattggtttaggattattttattttatgtttcagttgcaaaaatgttaaaacaaaagcaagaaaatttgagaagtgcttagtgaataaaataaaataaaaaaaaaatatagacataacgatgacatggtgaccacattcagcaatacaaaataaagtggaatgtcaaattaacaaacagacatacatgtacacgttaagacgtgcatatttgtgtctgtgagcacatgtaggtgggtggggctactagttgatccaatgacatccattcgcatttataagcaggaaaataagtagaaatataaagagagaaaattgattgtaaaaaggatcttacaggagcctgattcttagaagcttgtgaaactcttgcttgctcgtcgagtgcctctccaattctctgaactacagcccgtgcactctcaatttcagcacaagcaaaagatttttcttggttaaccaacttcttagcatcttcagaggcctgtcgattgataacagaaaacaaatcaaacaatgatacaggacatcaaaatgcctaggattatttaaggcattccaaagttgctaccgaagaaaaaaaaattaaaaaacattcttataaaagtgaaataaatgtctgtgcacaaatttaagacaccactaacaacctgctttaggaagtttgctagctttttcacttcgaacttctcctggattaattctccctcattttgtgtcaacttaacagctaaagcttcaacctgtatgaaaatttgagttgagaagaatcataacaatagaaagtgtacatttcagactgtaacataacaagttacgtcattcacaatacatataaagctacattattaataaataaatcatgcatagaaaaatttatgttgtgaatgcagatatatataacaagtcaacttatttgtagagcaatatcattggcacagaagtggattctttagtttttctaacaaaaaagacttccagaaatataatacagtagttttaaagtgaaaaatctatataatacagcaagaagtgagtaatatctacattggcatttggcacagtagttgtttaaagagatctgtctaacaaaatggacttccaggaatataacacaatagtttcaaggtgaaaaatctttataagacagcaagaaaatgggtaatatctacattgataggaaaggaagaaataacacaattaacaagaaactaaagttacaaatcaaagcttcttcacgtatcctgaacctgaaccttaaaaagcaattgtacagctgtctgttcaagatcaagcagtttacattatctgcaactgctaaattagtttgggcgataacaatagtaaaatatggtggcactgaacatatccacaaattgtgaaaaagaatttcatttaaaacggcaataaacaaaaataaacaatcaataaaacccttataaatactggggacagaccatagaaatagctgtctccacatcctctttgttacgccccgccatacgacctcttagatgttccagtgcatctctgagcttcttcaatagaacatgtccctccaatgaggcaacttctctaagttttgcctaaatttcacataggaagcacaaagaataattgtcacccaccatcttaaagattcatgatcttccaaaataaatgagagaatgatgaaataaatggatcaaatgtaattaataacttatgcaatagtactagttttgtcaaagaaaaattataaagccatataatgggagacctcttcagataatttagcagcagctgtcaagttcttgtcaaatttacaagcaagatcacgaactgagagacgtttgcactgctctgagagctgagtagtttcctcttcaataacctccttcaaagatggaccattgttgtcctcctttggctcttccagaatctgattatcagctcctagcttgtactttggaaagtgattggttgcaaaactcacatcagcagatactggaagaactggccccatctcaattgcttcaacttcaggagttaccttcgtcattgggtcagattgtattttctgtacagacaaggaaatcaacaatatactttatgttcaaaagaagtaggatttgatacaatcatacagactctccatattggcatgagcttcaattatcaaattagaactatgaatgttagatttttcaaaacctcaatccgggagattaaacaacaccacgcctagatattaatgcataaaacatgtgtgcttgttcacagaccactgatcaatcacaaattctttcatacaaaacattaagcaaattttcatctaatgtgaatgaaaacattaggaataggaatagagatgaaaagtgtctcacataattggttgatgaaatactaatgaatcagctcatcaggaaatggcatagtctttaaaaatgatttgttaacaaatttgtatgtaattcgtcaaatcatgcaccttttcttccctacttacaccaacaaaatcaattgagttggttggatccaacctattcttgaactaaccaaatcatacattccttttaccaaataaattaataaatgaataatacaccaagcactgcacttaatatgttatagggaacttggatcttggatctgtaaaaccattattaaagtcttaagttaccaaaaaagaagagagcttttctcattacaaactatccactctcaaagttttgaaaaagaaaaatgaggaaactttactagatgatcatgtgataccccaaagagtaaatccatcaaagaacagagtcttatacataccccaattgcagaaaagagccaactgcatgtatatatgtggtgaatgaagctagaattaggttaaccatctaaaataagcaagagaatactcttacaacacattgtgaatgtatcccagttctcaatgttgtatcaactactaaccatacgaaactaaatttcagaagaatattaacccacattttaaagtttttctatacagcaaaacaatatactaaccaagagaaaaattatgaaaagtacaaatacaccaaaaatactaaagctaatttttcaccacatctaaaggcaacaaaaaaaacgaagaaaagaaacatgcaaaaacatcaagcactcatcagtccatgtagctcagttccttaaaagcttcaagctttgatgcattgtgtaaatggtgaagaaaacccttttgaacaaaacaaaaactgaaaataatcaaatgtgaaaatcacacttacagaaaattaacagaatatctgaccacaaatacagaagcttttgttaatgctgatccataccaaagctcaagagattcatctccaaacaatcttctttttttctataagagagagttaggaagaaggaggagaagactgaagaagaacctaacaaggtattgtttggtttggtagcttagagtgctttatgaaaaggaaaaaagaaaacagaaaaagaaaaaggctatataagagttgtgaagtgtgtccatgcctgacctctctgtctcctgtccaaacaacttgaatgaatttatttttctttgttcttctctctcttatgaatgatattctatgctctgaggaaaaagtcacaaagaaataataatagtaagaaagtaaagagaaaagtgaaagcctgcatgctcacgcgccggtcccgccaccttctcttacgtaccctctcacttgggtcgggtcccactttagggtcagtcagtcatatggagcatctgatgagtttgagagccttcatcacaatcgatggcgcgtgggagatgtgacactcatgaatgtgtttggttcaaggatgtttccgtaaatgaaccacagtcattcttttttcttaaaaacaatattaaatatttgagaacttttgtggtgttttcccgttaaaacttaattcgagattttttttagtataatgcatgagaagcctttacgtaccgtaagagtatcaatttttttactctatcattt

SEQ ID NO: 112780 - DNA, 3869 bp, Cannabis sativa
acaacaagtattgtgactaaaaatatatttgatcaaacaaattgtaatttttgtgactaaaaatacctttagccacggaccttttagtcacaacataagaatgatgctttatatttagtcacaactattttacttttagtcacaagttttattgtgactaaaagtgattttttgtagtgacaccttgctcattaagatacacaaagttgttattcaaagctaacaccaaagagaaagaattggaaaataaacctttggcttgaagtcgaatatctcgatcccatcttaatcatacaaacaacacaagagctattgcctaagaagctgattaagtacctcttccatctacaaaatattaaaaaaaaaattattagtatagttatcagatttagttaagttagttgttaaggtgttaaagagttggttaaggaagttaggaaagttgttaattactggtaattagttaccattttgtgtaatgcttgtatagtaagttatataatgctcatactttgtattttctttattcattcaatcaatacacagagattactctttctctttctttctctattttttgcactctttagctaaaatagtatcaaaaccaatctttgtctattccattcttgattcttggtctcattgttccactacaagaaaaaggatttttgctggcgaaatttcgtgcgggcaaaagtctactaatagtgccgacaaacttttattgtcgagtaaatccaccagcaaagtttctggcaattatttgtaagggaagggtgttttgtcggcgagttgtggtattttgtcggcaaaggtggttttcacaggtgatttaagtcaccggtgaaatgagggccctcgacatttattcactggcataactttctcgtgtatttcctcattcgtcggaaagttttgtcaacgcatttaattgcaacgacaaagcttttttattttgtatttgttttaattattctcaatgttttgtcaacactatataatgcactgataaaatattttttttgaaaatattaaattggtttaatcaaataaaatataaacataatttaagtttaaattaaaactaaaattttataaataataattcaaaataatacaataaaataatcctgagcgcatattataattacactaaatttaagtaaataattaaaaagtgattgtcatagtttatagaaaatactaaagtttacactgaaaatactaaaataataatcacactacaaactaataaaatctttgttatcatcattatcctggttgggagggacgacttgtgatgaagatccaacgctaggaagatgtattggtggaatcggggccatcacaggcatgttgaagcaaggaatgaagtcgaaaatatacctaaattcctcctagaatgtagtcaggtactgattctgagtctacatcatttgtggcttataattattttgtgcatcttgcgcttccacctttcgcttcacacctcatattccttgatattaatagtgggttttctggaggagggacctgccctcggagttgcctttctggcccttgtcttaagtctaggcaaattgccaatgcctctcaggtggtgtgacagctcactaagcacctatgtcataacaggcaggtttgcaggagattgggtgagttctacatcgtcctagcgagggtgatcactctgtgtagttgagtttcgcatctctcaaatcatttgggcctacaaaaaaatattaataaattgttaaaattaaatagaaattaaatatagaacgatatggttaaagataaattacttacatgcaattattgcgtgtattcattacaccaagtgttattcttgtggtgaaacttctcaaaggtctccatggcactggaaaattcccccgtctcaggattagcatattaaaaaaatagtaatatattgttcaaaactcatcgatttcaggcaataatatttataacaatatttctatccaacgatgtgctccataatgatcttggttctccctccacctagaatcttcatcttcctctaattttttgtgttctattcagctcttgcctgtaatttaaaataaatttattttcaactaaatacgcaataaatatattagttaataaatttgtacatcttattttgggtctttccagtaagtgatcacatctacccacacctccggtgacaccgccttcctatttgtcttcacttctcctatttttagcaacattcttgtgccacgcctttttcggctccgatctctagttgcatagtccttttgacatctagtaaaaaatgtagtccacaaatttccaattgtcttgcaggaactcaaatttggtttgcaaaaaaaataaacattaaagtcatatgtatttttatttgtatactaattttgtttgaagtattacaataaacattgaatgttattgctagtctgtcccaaatattcttagtgtttgctttgtcaatagactctcaagtgaacttattcatgtgaatgttattgcgaacaaaaagtttgaccatgtagcgaaacttgttcccatagtcatctactggtgccccactcaaatgccatcggaatgacaatattgcccccgcgggctactaaacaagtgttgtttccacatttttcccactgtacggtcctcgaactcccttttcttattgttgccttcacctgcactagacattctacacgtacaagctatatttattaataataaaataagtaattaccatcattaattaattaagtaacaaaaaaaatatgtatttgatataattaatggtgggctaaaatattaaaatattttaaagtctaaaactcatcataatcatcaacatcattaaaggttacttgaccatcaaactagtgtcttcatcatcactatgaacaatgaaattatctaaatgttgatgatcagaatacatgctgtttaaaaattagggttaattatgataattttaccaactatgaatttatttttatgggataggttatctttaaaaaaggtgagagtaaatttaatttattttttgtaattatgaattaataataatatttttttaagaaaattaatttcttttacaaattattgaattatcaatacctagttaataccataaatattgttattatcaaaaaaaaaaaattaattgaagatgttatgcaaccgaaattttgatagtataacaacttaaatttgatcattcccaaattttaaatccggcaaattaaagcataaacacaatactaaaccagttttagtaacaacattttccacctatccaactgtaatatatttattcacaaaacttacttcattatagattaatacttcagatattcaaactcttctaatataaatttttatttatcaaaactaaactaacatattaaaaactcatactaaatttcaaatacaacaacagagagttcgagaaaataaccctaccaaattaaattgtagctaatattggagaaaggtagtagcagtcaaagatatcatcaaaactaaaattaatttgaactcttttgcagcagaagaatatagcatcaaaaaaaggtatgcaactctttttcctattgatgatcgagttcagtgaagtaatgtcatttggggaagatttaacattcctataaacatagattcattttttggttatcaatgaagggaaaacttcgtaccaagagttatattagcaagtatgagacaaatatatattgattacacgtgtctattacgttgtggtcaagatgaggatgagaagcacttatgttttttttttttttttaacatgaaatatcaacttcattgaaataaagcatttaaattacaaactggcatta

SEQ ID NO: 112781 - DNA, 3520 bp, Cannabis sativa
  modified_base (44)..(50): a, c, t, g, unknown or other
aatggaatgaaaattatttcctttccattccattccatttcatnnnnnnnaaccaaacgccaccttaaatcttaatataatttttagaccgacttagataaataattaataataaataatttttttaaaaaaaaattatttcttttcctttaaccattcacgaggtggaaagtcacgtggaagggcacgtgcatttaattttatttattatactaatttttcccttttaattttttttttttttaaaaaaaaaaacaagcgatagtaacaaaagaccgtacaatttagcttaaacttaaactcgtccatcaccgttagtgtgacggagattttcttacattaattaacactaatatttatagttaaaaaataaataaaaactaatacaaacaaaatttgaagaaaataaaaaaaaattacaggcgaaaaaaaaaaaagaaaaagacagccgatattttgattcccgccgatacaaaattttgccaaaaatcgagagataatgactgtttttttcatttcacattgtttcatagagcaacgagaggatctgagctgaaaatatcgccgatatcttgaaaataatcatccatcgggtacgatttgttggacgataaaccaaaatcccaacaagtctcggtaaaaataccagagaaatcatcattacccaaaataccgtctcgtaaactcgtctcgtcgaaaaagtcgggtatcgagctatgaaaatcgaaaatatcgtctggaatgaaagaaccgtaacttgaatgctccgaaaactccgagaaattctccgatacacatgaatcttctcgcatttctccgatatctcgcgattctttcgagggtggtgaagaagactcggcttcttcttcgatcgaaggagaaggacaacgaagaacagaggttggagaacagaggttgttgttgttggactcttcgccggagtaataaccggaactaacagccggcttaataatattctccgtaacaacatttttcggtacaggcggtactgtagagaagttagtgagcgcgtcgggtccacgcaactgaatagccgcgttgtcgtaaaccatggcagcttcttctgcggtgtcgtacgtacctaaccagagccgtacacgtctcagaggatctctgatctccgccgcccattttccccaaggtctttgtctcacaccgcgaaactttttcgccgccacagacgacgtcgtttccgccttcatactccgttgattcaccgccggaaccctcgtcctcttgttcctggaatttctcgacgatctgctcttccaaacggcactggtttcatcagtagaacaagactcaatcgtaatctcattaacgaacttcttaactctctggcgacgattgttgttgttgttgaaatattcctcttcgtcgctggaagaatcggtggcgttaccgtctgtgactgaaacacgcactattctcggtcgcttgatgaccatttccggcgatgttttggtaatggatttttcttgagtagtgagcttagtgtggtttttgtgctcggtgaacttgattactgaacctcctcgattcatgtttgagaagcttctctctattttttttttgtttagattctcaaagctgtgttgttatggcatttgaaaacgaagtgagactgaaataatggtggaaaagcgaagaagagagattccttttgagatttgacacgagaagagaatattaaaaaaaaaataaagaagaagaagaagaaggaaagattaaaagctatgaaaaccagtggtttatggggttttggggtttattaaaggaagagaaatttcacggaaagtcacacccagaaaaagggaaagagagagagagaagagtaagcgtgacgagagagaaaagagacccacacacactacacagagtacggaaaagcagagatatatatatatactataactgagcgtggatttggggagaagagagactgagagagttggagaaccaaaaaaggagagaaatggatgaaaatggaaaattttctgggaaaaaagtttgaagagaaaaagaaaaagggaaagaaagaaagatgggttcgttcgtgggggggagaatagctttaaccggaaaggtaagagcaaagcaaatgaaggaataaattgtcttcactcactctttcactaaccactactacagtagtctctgatattttctctcagattcccgggaaaatttaagaaaggaaaaaagagaaagagaaagtaagatagataatacacagagaagaaaaagagcaaactgttgtggtctatagagaaactttgctactttataggatccaccaaacagagccgtaatcactaaaccctggtttaaatgttcccaattttaattaatattaattattttaactttttcttgtttttattattccaattttaattatttcctacaacattaaaaatatttattattattttaattaataattaataatacatgactttcaccggttagtagtaacctgagtttttccggctccggttactcaccgcagatattttataacgagccgccgcataagctgggcaagttggagccttacacgtggcagaatctgagtaatgagttttttaatctaacggccagggagagagcttactcagctaaagaatttgtatttcttggaatatgggattcgggtcacgtgagatacacacatgggggtacagactacagtctttcctttgactgaaaaattaaaaagaattttttttatttaattattataatgcccattaaaacgggtgattagagtttttaacaaagagggggtattttggtcatttcagtaaagtgtactttgtagttttttgagagagtgtagcagtggccgtttccgttatactttttgagagagtgaatttacccttttaaccccttatcatttacagctcagtgtaacgtggcaggcaacctcgaaaatcgacaatattaataactactgtccttaaaccatgcacgctcttcttccttaatcttacctttttatatctttaattaatttatttttacctattttttagttttaccatttcgtaactttgtacggctaagaaagtaatccagtgtgctacagtacagcctagactctataactcagacacgtttcagcatttgattagctgtgtagatgaaaagtaaaacaaaaagtcttgtccggttatggttagtcaaaatttaaaacagtgattcgccaacaatcttttgggtaagcattaaaaaacataataacgcacctaataaaatttgtcaacttaactcgtctatatagaatattaagagcatgtttcgtattgttttctgttttttgttttaaaaaattatttttaaaaatgagaacaaaaaatagtttttgaagtttttaaaacacaagtcacgttatgttagtgttttttaaaaacaatatggaccaaaagtgaattggtttttaaaacagaaaataacattttgttgtttttaaaattcttgttttttgtaactt

SEQ ID NO: 112782 - DNA, 1042 bp, Cannabis sativa
ttttacaaaaaatggtgtcttatgtaattattcccttataaaatggggggtttgtgcaatggcccaaagctgcccaaagctgcccaaagcttgggccgacgttgcccgtcagggtgggctctcgacccgcaaaaatattccagctttccatgcataagattggtgcttatttgtgtgttcttaaatcaaatttgatatatgaaaatattcatttagctaggtgatagaacttatttggaaaaaatatcttatgaacaatattgggaattctagtcaaccctaatgcgttttgctaaaattaatgcttaacatctaagcagtttttgacataaaggaatttagctattcaaatctacttttctgttgataactctttctttagttgtcattcatttcgctagtaattattttttttttttttttttataagaggcgtttatatcatagattcacaaatagttagatttctcggtcattacaaaaaagggtttcagggacaaattcaaccgggagagccccaaaagtctgatgggtaaaagcccacctagccacattatgagcggcaaagttacaagatctactgataaaagaaaaactacaactactaaaagagtgggatgacttagtacaaaaggagatgtagttatctattgcccaacgagaccccttcccattgatggcgtcgataaccactctcaagttactcttgaacatataattattttgtttattttattttagtttgtgttttcacattttaaattgttaaataattaattttacactaaattttacttgcaatcccaataacagaatcttactcatataggtaataatcttactcatacagttacattacctacttttgtgattatatatattaattttcataccaatagttcctgactcgaatatggatgaagcataaagaaaacattacaaaaaattgctactttattagtgacaactttttagtaataatataatttttttgtgacttaatgtgatttttaatcacaataaaatgttacttgtgactaaa

SEQ ID NO: 112783 - DNA, 924 bp, Cannabis sativa
gtatgttgagaaagtgtcagacaaatcttgattgttcgtttatgattagatccagattctagattgatggacggcttagattattctgctgagcagcacttgtgcttacttgagattacacacacataaagcattgtgatatctgtacgtatacaataataaataatttgttttaatagtaaagcttgctcaatagtattagtattgaactattactatcagaaatcagaataatgtcattttcatgagtgtcgctattggcatcaaccggggaaaaattgacacaatattacaaaaatcaatggataataaaaccgactcttttgaatgtaaaagaggtaaagcaataatagatatattattttcatcattctttcattttgacttctcattataagtgtttaaaatccacttgtatataagcatgaatcatgctcttttgcttcacacatacattttatgagatataaagcaatatacttgtactgtatatatatagaagctggcctctaagaacattatttcagtagcaaaaggggtttctcctctcatctttggaaagagtttccaaagccaattagaaaatcatatatgatgaagatgaggaacacagtcctaaagacaatcttccttgtggtgtttattgggtcgttattggtttgggttttgctacctacaaaatcttacaataagaaatggactcctaagctaaccaccaaactcagctcaactacatacttacgagagcaaggtttattaattgacaaatattttaaaaaaatttacatgttttcttctcaattaattagtagaatcttattactttgcagggacaaatcttcttctttttacattccctatgatgtttataggagctttgagctgtgtttatcttcatctccagaagaaatccaataacaagtc

SEQ ID NO: 112784 - DNA, 8657 bp, Cannabis sativa
  modified_base (43)..(70): a, c, t, g, unknown or other
  modified_base (7908)..(7925): a, c, t, g, unknown or other
tgttagttagggtgttacattcatatttagggtgttaatcaannnnnnnnnnnnnnnnnnnnnnnnnnnngtaaaataatttccaacagtaaatactcaagataatgtggacgattgtgtagtgttcttgtcaccttgatcagaaaccaggttcatatgatggtcatactctacgaaagaagggatcaagggttaatgatctgaacaaaggaggcatattcatattatattccactgccatcaatgtaaggttttctataactttatatgtgtttaattcattattttagagaattcatatttaggatgttagattataaatttataatcaaacatacatgttagtaaatctagatctggataaaatatttctaacaattacagcttgcagaaggcttgacagcttacagcttgcagaatgtcgggcgacttacaatcaatagtaggctaggcaccttacagcctgtacaaggctagacagcttatagtctgctgaatgtcagacaacttacaacttgtagaaggctaaatagcttacaccctgcagaaggttgggtagcttacaacctatagaacgttgggcagcttacagtctgcagtctgacaacctaaatgagttgcggttctttgtatggtccttctagaagatctccaaaaactcctatgaaagctctaccaaaatgtaactgccatatattctagggatattttctatttgttatgtattttgaatcatgtaatgccctactactatgtaaagggacttcatctcacataatggggaggattctctagactcttatacacatattttacttagagcactcttactctctcattctctttcattctctcatacttttcacactattcttgatattcttattattgtaacaatgaagtgagtcatagctagacatgacaaggttttaacttgtaatctgcatggtattatctcaagagtaaatacaacaaaaggggagtagattattacctaatcaaagtggtcgaaccactataaattcttgtgtcttttacattaattatcattctgcacatggcaatcataagaaaaatataatcatagtcagactccgtgtcagttgactaaattcacaatcaacaacaaggaattgggttctcagtctaatccggacctagttggtttggtaaaaggacaaatggcccacttatggggtaaatacagttgaatattgactattagacctggtaggtgaagccaaatttagagtgtaactgttgtctgtacaaaactgtgccatttgatgttggcatctaggcatgtgccatcgttcgtgaggcatgcgtgtcagcatagtgggagctcgacaaaaatgacaatcccttttcttgttgtgttcctctccaaggcctgacataggggacatgcctctaattctttgggatttggtgttagaggtgtgtcacgtcagattgatcttgcacagtcgacgctccatgacaccctttggacgactcttccaagatgactactagagcgcatccgtctatatttccatggacactctgtaatttgattaactatcatccttccaaatctatctgtttggctttatccgtgacagagttgtggttgagtacagatactagtatgactttgttaatggatcgaaccattgatttatttgggcttattgaatgggcttgcaaactaacttagaatgctaaaaagtgtatgtgtcatgttcccgaaaacatggataacaacttctaaagatttttcaagcctcatacgctcagtctagtgtctaaggattatcatatcatcacaaagttctaaccacaacaagtaattccaacaaagtgtctcataagtgagctcgatatgatagaggattctcttgtttatgcatccccgtaaggtaactataattctttcctcactaagatcctcgatttgtgagaaataatattatttatagagttttcgttcccatatgaacatgaatgatcactataaatttcttggttgttactaatcattaagtgggcgttcataatattatttgggtgatttggaattttttgagttgttagaaatgcttccaacgtccaaaaatgcacacaatgatatgttgaaaaactagtaattggttattagttgccaattttttaagtttttgtcaattcttctccaaaatgctccaaacaactcccatttatttcgaaccatttatacaccatataattgataacatcaagtctcccgtaattaaattttcaatagttatcattcattcacatccaaactcaattagtaacatcttttacaaatttaatagtgataaaagagatgagagttacatattcatgtgtcatcaaattgatggatgtgtaactcttattttgtgataattatgcacaaattttgtaatctataaagcatgttacaattttaacgaaattagtaatttctcacattttattatttaatcttaataatgaattatattaaaagaaataacattctattcactacttaaattttatttttagcatcttaaatttattataaatataatatacaccggcatataaaaccaaaatactcctaaaagaaatgaagttatagaggcatgcctctaactaaaaattttgttatgaattattttattgagacttcaaacttgttgtattattaatttccaaaaaaaaaaaaatttgttgtatgtaccataaaaaaaataatattaaagtaatggcgataggtgataaagaaaagtattaaaattgcttaatatgatttgacaatttttgtaattaaagttttaatctacaaaccttgcttacaataacaaccttaatcagtcaacaaagttcattttaattattattattgaaaaacaaagttcattttatttggacgaagaaagaaaaataaagaaaagtatgcagcaagttctaaactataaaaacaaattaagttcattttatttcaatatatatatgtactttccgaatttatccccatgaccaaacacgtgtgcaatcaaaacaagccacgtcactaacttctgcaaaagtttgtgtacccacacgaggaaatatctcaagaccaggtgtacaggtcaaaagttcgggcaaaagctaaataccattggttgcaccaaaaattttgtgcaacttagagaattaatattaaaaagagagaacaaactttgagaaagtctgttaataaggttttagaagagaagaaaatctagaggccacaagaacttgtggctgagaatcaaaccaagtagctgacgtggcatccacctctcatttaagcggatcaaaatcatagacgtcgtttaatgccaagttcagaacactctcccttgcacctccaaaagataccaacaattttctcgcgccttttcttttcttttcttctgtttgtttggctgcccggaaagtagaggggaataaaaaatgctggaaagtaaggacccggctatcacgctgttcggaatgaagattcctttgccgtgcgagaacgaggctccggctgtatccggtgatgattttgcttctcagccttcggagagagaagtggacaatgatgatgatgaagaaccagagaaggtactattggagcgcagtaattttttttttttatttcttttcttctattgaaagttgttcgaatggaaatttgaagatgaccctgttgttcgcttgctgagaaattaaaacggctctgtttcggtttttgaaaaattctcatcgaattttgtgacttcgttgatcttcttaagtttgttttgatttcttttgggttaattattgccgttttaaaacaaacatatccagcgtgatttgagattaatcagcttacttctgttttggttttgtttgtgtaagtgaggatgaatttgaagatgcagaaagaaataagaatttgaaagaaaattgaaaacgaaaaaaactgttttgacttgtgagatattttgcagtttttgtgaattaaaaagtgttatcatctttgttcttgaattaaaaagacctctattgaattttgtgtctaatttgtagtagttgcttagagttataaagatttaattataaagatttaaaaaaaaaaaagaaaaaaaaaattaatttttctgatctgctggttgattgtgcagaattttattatcaatcataattaagcaactttaggaactaaatgttcaaaaaagctgtactctttctgggtttttctgtttacgtttcttagaagtcactccaagtcatccacttccttaaaagcccctataacaagaagtagcttgctattgttggatttttttaaataaccctgttcattatttatattttcttagttccagtggatattactcttttaacaactccgtatcccgtgagctttagccaaaaaaaccctttgttctatttaatacagtaagattaataggctttgatattgtcaataactaaaatgaagaataatagcatccatttaaaacatgaccaagagttttatcttgtgaagttgtttagtcaaagcttatcttgtctcatacgtttttgttttttttttggttattatgtcttgcatacatggttcttagtttactaataaatatgcctctgtttttgcgaaatctcaggattcatcagcgagatcagtgagtgatgaggattcagaacaagaaggtgatctttgtccacaaactgactattcaagaaatctggattctataccagggtcatctagtgtcaaccccaagacaccgtccataaatgaagaaagttccaaatcaaaactccagatgacagacaaagaacatggtgatgccaccaatactaataactcccaagagaaaaccttgaagaagccagataagattcttccatgtcctcgttgtaatagtatggacactaaattctgctactacaacaactacaacgtcaaccaacctcgccatttctgtaaagcttgccaaagatattggactgccggtggcaccatgaggaatgtccctgtgggagcagggcgtcgcaagaacaagaactctgcttcccattaccgccacataagcatttcagaggctcttcatgctgccagaatcgatgcttcctcgaatggatcacaccacactggattgaagaccaatggtagagtcctcagctttggcatagattcccccatttgtgattccatggcttctgttttgaatcttgctgataagaaggtcttaagtggaaaccgaaacgggtattataaaacggaaggtaaagaaaacaacggtgatgattgctcaagtgtatcttctgtaacgatttcaaatacaacggatgaaacaggcaaaaattgcccccaagagcctcaaatgcacaacatcaatggccagagattcccttccgtgccatgccttcctggtgttccatggccttatccttggaattcaggagtccccccaccagctttctgccctccaggatttcccatgtcattttatcctggagcttattggaactgtcctgtccctggcacttggaacgttccgtggtttccaccacaaccttcttctccaaaccagaagtctccaagcccgggttcaggttcgaattcacctacgttgggaaagcattcgagagatggagacactctgaattcagacagttgtgagaatgaagagcctccaaagcagaaaaatggtagtgttttggttccaaaaacattgagaattgacgacccgagtgaggccgccaagagttcgatatgggcaactcttggaataaagaatgattccatcagtggaggagggatgttcaaagccttccagtcaaaaactaatgacaagaaaggcatagccgaaacctctcccgtactccgagctaaccctgcagccttgtctagatccctcaactttcatgagaactcctaaaccagttgctaaacttggattttttttctcatttagatggagattcaactcatttgttaagagtttgaattagtgatcatcatcaagctgtgtgttatctgattcagcttgatgggttaatctgactgatatgaagaactggagggagatcggttgttaaactctcttggtccctcagcttgatagagggaactaatgtaggatataagctttagtggcagctaattttgtttttgtaacattatgcacagttggcttctgatattcttagctttgttgggtttgtgatcatgtaaatatctctttatatgtgaaataatgcgagagttaaaaggtaaatcttttaatttccaaaaaaaagatccagctttcattcctaaattaactttttcttttaaatcctttgattcttggctcaataaccaacaaggaactagtttttcatagctaaacctctcaaaagggtatcgttttctcttttgggaaatcaagaaaatgctcattaaatttgaaaaggcagatcagaggcgatatataaagaaacaaaaaataaataaataaataaccttggtcatacatatatgtattatacatatcagttcaagccaaagttaaaacagttctaataccaccttatgcttcaatgagaagaaaaaaaaggagttgtggggctaaatggtgacataccaccaaaactgaagtagataaacatgaataaaattccatgaaggccaagttgctttccttttcaaacagaagggatccaaacaacttgcaataaagttgtattggggactttttagtccttaatcttttccttttccctcaccgtattcccttttatttcacattatcctctagtatcaattgggtttgtaataaattcttgaatggaaaaaatcaatgtcaaaatcaagcaagtgactccacttttccaagtggccttggcaatattagaattattatgtagcattaacctagtttgcatcttatttcaatactttctctacaccatcatgtctttagtccatcattttacaaaattctagatttatcacacaagttctttattttgtgagaattgatgagtagtattttataatttataagctactacatcagttaatactttaaattagatattgaatatgaaaagctacctaaataggacaaagttttgtgaattagtagataaatacgaactttctttttacctagaaaagtattacatattataatattatttcaaagagtattagaatctttaactacttgcactactatctcctctgaagaggtgacaaaacacaaagtagtgcttttcccattgaaaaaattatatggatatttatatatacatatatatatatatatatttatttattagtgtggatgtatctagctaagccattttagagcacttgttagatatatcagagtcagacatatttgccctcaatcaacaaagtaaataaatataaatacaccattacatttctttttataagaaaatagaaaaaaatactctatagatattttgctgttaggagcaaatacaggccacattttatgtgagatgagttgggtatgggaccccaaaatgcacataatgccataaatctctttggctctctccttgccttttgctttctttactttttgctcttttcttttaatgggaaagcaattggtcatttcttttcatccatatatatatatacctcaatttttcattctttagaggatttaaccaactactatatgagtgatggttttcttaccaagtttaggaatgtcaagcgggttgggccagacttgatctgacttagacctgactcaacatagacccgacctagcatagacccgacccagcttgataacactactgtcgattcggcccaaccctctacgactcattagcttggtgggtcaggcccgacctgagctattcctaccatctgtttttaaatttatttatttattattnnnnnnnnnnnnnnnnnnattattattattatttatttttaaaagaaaattcattagtatattgaaatagaaaggaaattcttatattaatttatgccactatgtctatgccaacaattaacaaaacttttgaccttttattttaacattctaatctcatacggttttcaaaggattattattagttagatacattcctacattaatataaaaaactaaattgaaagaaaaataatgcgaaattgagaatattctcaagtcccaactctaattcatcaacttcaaaaaaagtttcatttatacttttgaattgaagttcaaatatcaattacactcatacgctaaaaataaaaactaataatcaaataatatatattttaattatcaagatcaactacgtaagactcctaaaaaaaatgtattaataatataaactaataatttatttgtaaaaaaataaaacaaaaaaataatgctactaataaaatgaatatatatatagttaaattataatatagtatataaaatacagtatatataaacgatatgtaatgcgaaaaatacaataaacatattgaaacatatatgcaataaaagatcgaaatacctccagccattgatctttgagcttcaatccttgcgatagctttgatgttggagttcgggcttctcgctctctcaactctctttagatggaattttgctgaataaacagaatgagtgaggagcttggggaccgagaccctatat

SEQ ID NO: 112785 - DNA, 2550 bp, Cannabis sativa
  modified_base (46)..(52): a, c, t, g, unknown or other
agttcatatttagggtgttaacaaacatacttgtgagtagatctannnnnnnggtaaaataaatttccaacattagcttgcaccaagtgagaccagcaagaagagcttgtgcttcagcaaggatggccgagtgagtacccattcgaggcgaagagaaagttgccaccagatctccattccaatcccggatgacagcacccaaaccagttcgatggtttttagaatcaagggctgcctccacatttacgttgtactcacctatagctagctggggaggaattttgggagggtccctctcagccacaaaagaaacttgaggatttgatctctcaactgtagaagaattaggacattgtgaatgttgggccattgagtattcctgcaaataaatgttagcataggtttcaagatcataatgacaatttggctttttatgaaaaagtatttcgtttctttttgtccatattagccaaatcacacacacaaaaatattaaaatcctgctttattaataaatcatatccccgaagaaaaaactccctaatgtcacactttttattttatctgtaaaacttgttgaacgaagtcttttcccacaaatccttagctgtgcgacagtctaatagggcatgggagactgttttctcctacgtttcgcaaccaaaacaaaaaggagtaggaatactttttcttttaaagagattataagcacaagggagtaggtgatggaaggctttcgaaacaaagtgttttatttttggggaaacatttgaggaccataaccgcttccaccatgaggataagctagtctgagtcgaagtggaaggagagtgagtttgggtaagagagtgagcaaggtggtaggccgagttgacagtaaataaacttgaattatgatggccccaaagaagactgtcatctctagatgggtcaatgggaacttggagaatagactcaacttggtatggaggaaggtgaagcttgagtttattgtaattccaagtatgattagtgtcaatgaaaaaagaaatagttttgtccctaagatggtcaattgtcgtaaaagcatggctatgaagtccaggagcccatcaggtgtctgtgataggaatagcagtaccctttccaactctccaggtaaggcctttaagaaggagttctcttccccaaagtaaacttttccaggtactagatggattatgaccaacacgggaagagagaaaatcattccgtttaaagtatttggctttgagtaaggatgaaagaagggaggaagggttggtccagactctccaggcttgtttggccagtaacgcttgattttgcaatgtgatagaacgaaacccaagacccccagtaaattttgagacaaaaagactgttccaatttttccaatgtatttttttcttatgatttgacgaaccccaccaaaagtttgcaatgagactttgcagttgcttagtactgcggatgggaagtttgaaggaggacatggcataagacgggactgctttgaccactgcttttataaggttttcttttccggctctagaaaaatatttagaattctaaacactcattttggaggagacattttggacaagatagtgaaacaccgagtctcagctcgagcagaagtttgttttgtccaaaggattggtattgggtgagaaaaggatagaggatttggcaaagtttaccattttggtcagtggcacgattgtggattgaaagaatgtcttgaatggcactgcaggaatcatcattaacagtggtaaagagaagactgtcatctgcgaagagaaggtgggaaacaacaggagcgcttctacaaatggcaaaaccagtaaacttcctttggtcctcgtagacacggatagcagctgagagaccttcagctaccatcaaaaaaggtagggagataaaggatcaccctgtctaatgcctctagaggaggggaagctttcagagagtttaccattgatccaaagtctaaaagtgaccgtagaaatacatcgaatgatgagagtgacaagacgagttggaaaaccaacacatctcaatatggctttaacaaagcttcactccactctgtcaaaggctttttccatgtctagcttgacggctgcccagcctatacggcctctctttctattggatatacgtttacaaaaccaacacatctgagtatggcttaaacaaagctccactccactctatcaaagactttttccatgtctaacttgtcatatttaattatgttttacctttttactttttaaaaaataatgaacatggttcacttttttttttttgaataaaattgacaaaataaaaatataaatattgtttactttgttacaccccaaaataactaatatcaatttttctatgtaataattttaatatagaaaactaaaaagaaaaaatttctaaaaagagaaacaaatttgacaagataaaaagctaaattaccccatatactattttgttaacttttttttaaaaaaatttacagtttgagtttctaaaatggttgcagcgctagttg

SEQ ID NO: 112786 - DNA, 5038 bp, Cannabis sativa
  modified_base (3846)..(3851): a, c, t, g, unknown or other
ctatcgaccataatgtcagcctatactcaatatgctagtcagcctataacatcaatcagtatttcagccaacatacatttatcaataatcagtacaactctaagtatactattactactatcaatgtaatctaactggcataaacaacatgcatgctaaacatgtaataacatatgcatgacattatattaatcttacctcaattccgaattcaggtgtgccggccaacttgagtggaacagctgctcggcgaattacaggctcctaaatcacatcgataacaacttggataagtaacacactaaatcacaaccgggacttaggttttaaaccaaaaatctatttattgtaacttaatatggcaatatcctaaactagcagggaattaaccaaccaaaaacttgaaactagcatgaatcgacaacctgaattttttggggaacccagctgcaaaatctgggtaaccgattagccagttttccccaaaaaaacccaaacaaaaccataactcaaccaaatcgatcccaaactttaccaaaccttcaagacctacatattataccccaatatacatttttcaagcaataaaataactacccaagctcagaatcaaatttcaccattaatgagccaagcttgagctctaaaactcaaagcttgctcaatcaacaaaccagccatcaaaacatgctcaaatcaacatatctaaacatatgtaaacctcggaaacatacttcaaacaacaacaacaacaacaacaactaaaatcgcaatttcatgcaaaacccaatttcttacaattcaagaaactaaggaggaggttactaagagattacctagagcttgaaaccactaaaaacttgctgaatttagcttgaattgcagagaacacaccaaccctagctggttctaggtgggttcgaaaagagagagagagaaagagagagagagagagagagaagatgcttcctttttcaagaattttccaatttttaaaataaatgaataaataattttgttttaataaaaaaaactcagcttatttactaataaatctgtttaaaatcaattaaaaatttcactaaaggacaaaagtcattttaggccaaaatgaccattttgcccttcccacacaatacatcaaagaaggtcacttagcggtattttggtcacttctaaaatctcgactatttttgacattcccaatgtctaactatactgcccccctatactaaaaatactaagatgtgattctaatagccaaatgccgcattccaatgttgtcgggtacaaaacatgcaaaaatataaaaattctatatatgacatataaaatgcactctgaattcaaataaatcatcgtaaattaataattcacaactaatatgcaaatttcataattaaatcctaattatctgctaatttctaaattaaagctaagcggcctttacacccaatggggacctgaagaatactaaagacaatatcactgtcaaaatattgtgagagcctatttaaatcccattggaaatttcgattaataaagaaattaaccctttcaaaaggaggtgtattattgtctttataattaaggtatttaacattaggaacccagtagtcatgcaaagtacggatggtagcaccatcactaactttccaaataagtcatttattaaaaagatctctaccccaaagcaaactggtccaagtaaaagaaggagaatggctttttttagcttctaagaaagaattgtacttaaaatatttcgctttaaggatcctggataagagggaatcaggatttgagaaaatttctccaagcttgcttggccaaaagggcttgattatgatggaccaaagatcgaaaacccaatcctccaaagaatttagaattacaaagacaagaccgtgatttccggtggattttaacagagttccctagagaaccccaccaaaactgagccatgagctttttgattttttgacaaatatacacagggagtttaaaacaagtcatgacgtaagaggaaatagcctggaaaacagctttcaagagaacttccctacccaccttagagaaaaacctattgttccaagcatttatgtgcgaactaaccctctcaagaatgaagttaaaattagttttcttagaacgacccaaacactgaggaactcccagatatttactaacaaaaggtttattatctaatcctagagtattatgaaaatactcagagacagatgaaggtgtattaggggagaataagatagaggacttcccaaagttaacctgttgactagtggcaaggttataaagctgaagagcctccttcagaccatcatatgacgcaaaagatgcatcagtgaataaaagtgtattatcggcaaaaagaaaatgagagatagaggggcaaattgagcaatggaaatacccctaagattgcctaatctttcttcaatccttagggcagaagagagccctatagcacaaagaaggaataagtagggagaaagagaatctccctgccttatacctttggaggggaaaattttcttagacacctgaccattaatactaaatctgacagaaaccgaggataaataattattgataagattgacgattctattaggaaaattgagtttattgagcacagcctggataaaactctattcaacccgatcaaaagctttctctatgtctagcttaagaccagttcaaccaagcctcccttgcttcctatgagtaatggcatgaatcatctcgttcgcaatgtatatattatcaaagatgagtctatcagacagaaatgtgctttgggtaggggatataatatcacacaaaaacaccttaggcctattagctatagctttggcaacgatcttgtacaaagtggtgcataaactaataagcctaaaatctttaagagaggtagcattagtttttttttaagaatgagaacaataagagtgttgttgataggggatatacttgcattattattgagaatgtgaagtataactttgccaagatcctcccctaaaatattccagttcttttgataaaagtaggcattgaaaccatctaaactaggagatttatccccaaaaagttgaaacaaagcatctcggaccccgtcacgagtgaaaggggcatctaattatgtataatgctgatcattcaggcttttatccacaacagagagagtcaagtcaatagcctccctattaatattgtgagaagtgaaaaaggtggaaaaataatggcagacacattctccatgtcatcgacagtggaagctatgctgccatcttccaggtgaagatatctaatgtatttggctctttttctagtggaggccttattatcgaagtacttagcatttttattcccaactctcaaccaatgcactttggatctctgttttcaaaaaatttcctgcttatacaggaggctatccaattgagattggagattagaggcctcatttaaaacctcattagagacaaggagggaagaaaagatattattgagacttttatcgatactactaatcctactagcactactgttataagacttattccaattttgaatagctttaacaaattattttgtttagtaagaaagctttgtacagagtagtcatagcttgtgttgttattgcacaaggactcacagactgtatggaaaaaagagttttcagttagccaataattttcaaacataaaccttttgcacttaatcttattcatactctcatcttttagaactagctttaaaactctatgatttgagccataaaagttaagatgatacaaggtttgcggttttgaattgttaatnnnnnnttcaaaccgcaccgcaccgcatattataaaaatgccaacttttatatttatttaggtccaatatgtgaatgtccaacccaaaatccactaattattgtattgttgaaacttaattttttttttcatatttattttctagccttacagtatttttgacaagttttgctcaagatttgttgtatttgtgatagtttaattatttggtgatagtccaaaccacagaaaccgtaaaaactgcaccgcaccgcactattttttgcggtgcaatttttgcattttttaagttcgcagtgcgggtgcggtttgggaaattaaaaaaactacatgtgcggattaatttaaaaaaaatagtcaaaaactgcaccacccgcaccgcgaacacccctacttatttatacctatatttctatttttttctccttttttccattctcttacgctattctctttctctccttcttctttctctctcttctttcaaactttaaaaataatttatgattacgtcgttactcggatgaatttaaaaaagtatcattgcgatctactctttaacgtgaacatttcaagatgtggaaaacatatattttttcgttatatccagaaaaaaaactatttagttacttatatagtgattaattactatttataatttttttaaaatcttaattaactttcattttataattttgttaattgaattatattatattatacgataactaattagctttcaaaataatcaaaaagtatataaaataatcagtatatagaaatagtaacttgttatattacatgacaacttattagtttcaaaaatattttttaaggttgtctaaatgtattttaaattataatctaccataatataacttaaaaataactagttaattactaagatgtatacaaataagtttttagagagtaatcaatatatattttaaattatatgatataaaaataatattttttatataaaggtaactaattagtttctaatcaacattattagtaatctaaatattacttttaaaaatgcagaaaaataaaaatcagaaaatgtcaaaaaacgtcaactttggttaatttacggcaaaaatacttaagttttatcccgagtagcagataaatacctaagtcgtatttttggcggtaaaaataccttccgtcacacttctggaacttcc

SEQ ID NO: 112787 - DNA, 2866 bp, Cannabis sativa
agcaaatctttccaagttatctgatccacgtgtcccctcttgactggtccacgtattttgggcgaattttggagcaacataactaatatatgatttttttagagagagaatggttggttgttttctaatgaatacgcgcgtttaaggggtgtttgtaagcggacattgtaagttgtggccataaactaaattatatatgcggtttttataaatttttaaactacaactgcaccgtaagatcataaaatttcaaaaatcatactgcaaaaatacagtatagtgcaatgcaatttgaatagtttatactattatcattatcaaacattataataaaaatttaaaaattaatcaaataaaatatatatactaattaagttaaattgtctttaaatattatgtcatatacattaattttgtaataaatagtacggtgcaatttaaattaattattaattttaattaaaactgcaaacaatattgtgtaatttaccaaaatacaaagtacaaccacactactaaagattttaaactacaattttttatgcggtggaaagtgaaagattatgaggaaatgacattgtatatccaatttactttatttattttaattttaattttttatttttatattctttaagatatactcatttttataaatgatatcatcattgtatcctttaagttaatataaattatgtgctggacttaagtaaaaagtcaacatatataaaacaattcactcataaaaatgaataaattttaataaaatttaatataagaatattttttttattaataaatacaaataagaattgttttcttacttatcccaaagattatcctagtagtttcataaataatttcttaatccaaattattgagaaaaagcaagacaaaagggcattattgtcatcctagtcacatctgactacgctaataaggagacaggaaaagcgtagaattagagctcacccccctataatggaactgccacgtgtccgatcttatcctttttcccgttcttaccaaactcccataaatacccccacccaactctacaccactttattctcgatactctctccactccttcccttttttctcatctcttaacaaaaccttcaaaatctctttgtctctctcaatggcgaccaatattctccactttcggccctcaatgataggagcccgcgccctccttgactccaactccgatcaggctcgtcgcaaaaccacttctgcgaattggtggaccccgctcttcgacttgtcgtcggagccggactacattgacaccggcgctggaacagaacgcaaggacaaagctgagttcagatctgagtcagtttcagagtcaaagattctgagatcaaagttcgctcccggctgcttcacggaggacaaagcgaagagacttcggatgcttacaaaggaatcggagtcgtttcatgacgttatgtatcactccgccatcgcctcaagactcgcctcagatttcaataaagtttccgatccgtgagttccaaccccggcgaagccaagttgactagcctgggagtctgagtagaaaaatcaaaacaagaaagcccagaaagttcctttatttgttcatttttgtatattttttttttcttttccacaaaatattagggttaaaatgacataatcatatattagagtggtttaaagtgacgtatatgattgaggatgtaaatattatcattaatatgtttgctattgatatgaatgtgtaccaaaccttcacaatgaattgaatagtaagccgcttaattaatttggtattatcttattaagctatcatcctatatacattttctttgtttaatatcatctatgtatttaatatggggtatcattgacttgagaacattttcttggttcatagggtaattcagaatttggaaggtcgaatttatttttcgatttaggtcagattatgtcgtaatctatcaagtgggtttatgaacatgggatcgttgtagtatatttggatcttagtttcgatacctcgaatcttcttcatcaactattaaagattcgaatatgccacgcacgacgaattcttttatttatatatgttttttttgttgatacatggatttcttgatatttattttatatgtttcatttcgctttggaagaaattaaaggcggcggcccctgctgttttgttcaaacatttcaaagaaatttaatcactcaatagcaccgttgacaaattagcatataaaagaaaatcattagtaggcgatattaacttaagaatggatccatcgaaaatgtatagaagaaggattgtgttgatcatcaaacattggggaaatatgctgtgttcaacaaacattggataattgttcgactatcatttaacataattgggaatgttttatgttgaactcgttcaatcagagattattaatatttgttataaccctcttgtggacaacagttataatgatcaaagcatatttaagcaaatctattctgcagattactaaaatgccagagtccatagaactatcgacctgcctttactggcaaatgaccaatctcattgatatgaaacatcaattacctacaagtctagaagagttttacaaggctcttgccgaccaagaagattggagatcggcactttaacacactttcatccatgggaggcaaacacacttaaacacatttaagcatatgatccaaggatggatatgcttaaatgtgcatggttgaattttaaaagtcgaactaacaatccagaatttaaagttgttttacctggagctatactaagtgacccttttgcaattatactcttagggcttgtttggaacgccgtattaagtcgtat

SEQ ID NO: 112788 - DNA, 1947 bp, Cannabis sativa
aaaaaaaaaaaaaaacttaatttacatttatatatatatatatataacttataaaataccatataaatttatcaaacctaaaagtatcatattttaaacaacttttaaatctcacattttatatatatcaaattctaagttgaagtaaaatatatgtggacattcaatagaagttgctatttgaaggcttggcacactatattgtttttctctctccttttgtatttcttcaaattggaaatgtatataaattttgagaaaaaacatatgaaacaaagtagacaacttgactaccatagtaagaagatagtaactattctttttaataatttatagttttaggatttatcatagtaaacaaaacatctctaaaattgttcatttccctccttttttttggtcttttgtctttttctttgtggtaattgtcattttttaagcaatttgccaaatcggatatctaaataaagattgtgatgtctaaggttacaataatcatatcaaaatcaaagaaatcataatgttttctatttttctactttcttagattttatctttattttagagatactttcttattaaatcattggtgtgagtaacatattttagtacatgatttattattattgatgtaatttagtaactaattttatcatatcatatataaaagacttaatatttaattacactaataatgatataaagtgtttaacactttaagatcttttatcattgttcttcttatcaatattttttttcataatttactaaatttaatgggtccataagagtgaaccaagtaataaaagaagccatgaatgaacctttagaagtccctttcttccttaaaaacaattgtgtagtaacaatttagttactaaatatttttgttactagcaaagaaagaggtaaagggatttttttcataatcaaccgaaaaatgtaaaaaaaaaaaaaaattataaaaatatagttgttgtgtgaaattttaaacgtttttacaaactataaatttttttaaccaaaatatatttttatactacttttctgttatttttatagaactcaataaacttgtatgcaactaaaaaaataaaaactgtaaatttggaaagaaaaaaaaaatgtgagtgaatcatatcaatgttaaaattgtatcaaaaatggcattttgtataaaaatgatattatgagagctagaagatagatttgtttttccattagaagcagccaaatgtacaaatttgttcttttcaaataaaaaaaaaattgaagaagctacgagcttaatactccgcttttttaaattttaactccgtcgccctgacaaacttacagatagataataacgaattttgaacctcaagttaagtctcaagattaaactataattattattattattagtatttttccaacatgtgtgtgaaattgttgtcaatttgaggaacagataaaactttttaattaaattatttaattaatcatgagactggtggttgcttggttcttaggcaaaacgacatacatcatgatcttatttattttattttattttaaaaaaataaaaaataaaaaatgggagacgtgttaaaagagccaaacattatcacacattttcctttggcccacgtattgggcccacatatagggcccatataacttgaggctgcgttagattgttggcccacattgatggaatggacctttttggagttccaatacaagcctttgaatgatttagtgatgttgatagttatacccactaaccctaacctctctctttttgtttcaaaattattatgctatcacctaataatgatgtagatggattatgaaaaatgcattttttttttaaaaaaaaaatagtgaagtagttttaaaataccattcttattgattagctaatatatatggaggaggtttcaatggttacatttttattgt

SEQ ID NO: 112789 - DNA, 1007 bp, Cannabis sativa
gaacatggctgacattccatcaatgccaggactcttatcaggagccattgattttaaggcaacttcaacttcatgggctgtgaaaggtttgataaggtcattgttcatatccatggtgacagtagttggaatagcattcagaatggctgcaagagcttcttcatccgtaggggttgctgtgaagatatcagcataatattggcaaataacagtagcaatatcttgcttggttgttactgtgtcaccagcagcgtttcgaagagaggtaattttgttgttagctcgtcttgcacttgctttagcatgaaagaattttgtgtttttgtcccccgattgcatccaatcaattctagatctttgttgccaatatatttcctcttgttcaaggagttcatcaagaatagcctcggatcgctgcaagtttgtaagagtgctactggtgtgatgttgcaggttatttagatgagagacttgttgctgagcatcagtaatatgtttcttcattcgaccgtacttgtttatgtgccatgactgcagagttttggcacatgaatcaagcttggcaagaacatccacaattggatcggctgaagtaaaattagaccagcaagaggagatgattttcttactctcaggatccgacaaccatagtctttcaaatctgaatctgctccttcgtttttcagcagtaaggttcgaattcagaggggaaaattcagctgtgatggctctgtgatccgaaagataaaaatcaagatgtaccagttgtggcgagacaaaggattgattccaattattgttaacaaagcaccagtctagccgctctttgatggtagcaattgactttcgattcttaacccatgtatatttatcaccaacataaggtaatactcgaaattgacagtgatcaataacatcttgaaaggctttaatcataacatcacttctatttaaaccaccagctttgtcattggatgacaagatttcattaaagtcaccaatggcta

SEQ ID NO: 112790 - DNA, 8944 bp, Cannabis sativa
  modified_base (8884)..(8919): a, c, t, g, unknown or other
aaaatatgtccatttaaatattatttattttctgggatattacaactaattccatcttcttattgtaccgaccaagcttataagcacatttacttgtaatttctgtcccttggtacggtccttcctagttaggtccaaacactgttgttgtagaatctttggcatttaggaatactcttcgaagcactaagtctcctacaaatgatttccactcctcaacgtttttatcgaagtaccgcgcaacttcttactggtaggtatgcaactttaagttggcctagtctcttctttcttctatttcatcaagggattctgccaacaaggtgtggtttgttccttggtcatatgttattgttctatggggcggtggttccaattcaacaggcagcattacttcatagccataggctaatgcaaagggtgtctatcatggccatcttctcagtggtcctgtatgaccaaagtacctctgggagtaggtcatgccagttttccttggcctcttctagatgctttttcatagtgtcattgaaggtcttatttacaacctctacttgcccgtttgcttgagggtgtgcaactacagagaagcttttaataatgtcgtgtctattatagaagtcagtgattatgccactatcaaactatttcccattgtctgatacgatcttctgagggagtccaaactgacatatgatgttcttgacaataaagtcgaggactttctttgaagttatagttgccaatggttcagtttctgtccacttggtgaaataatcaactgcaactacaacatattgtactcttccttttcctttaagaagttgtttgatcaagtctatcccccatatagcaaaggaccaaggagactgcatttgtgttagcacgttttatggagctcttaggatctttaagaatttttggcacttatcacatttcttgacatagtccattgaatcttcaatcaaggtaggccaaaagtatccttgtccgagtatctttttggaaaggctttgcccctcagcatgattgccattaaaaccttcatgtacttcaattaatagtcattgagcctcttccttggtgacacatcttagaagttacattgagaagccatgtttgtacataaccccgtccaagatgagctatcgagcaactttcctctccattttctttcttcattcctgtcctctagtaggactcattggaggtatgctattgttagtttcatccatgtaggaccatcatccaacatatctattttttctaaaacagttatgcttgggtcttttaagaactgaatgggcaccaagttggtcttgtctgttaaggtgctgctagctaatcgggtaagtgcattggctgttgcattttcttctctgaggaattgcctaatggtgtacctcttgagttgacttaataagtattggattcttctcaagtagatcatcattctttcttctcgagcaatgtactcacctaggacatggttgataactagctaaaagtcaccatatatgtccaggtagtctgctcccacttcatgtccaagctttagcctagcaatcagagctttttattcagcctcattgttagagactttgaaaccaaacttgatttatctatgtagttgttgaccccaggtgtaatgagggcaatgccaacactagacaagcaatgcatacaacttccatcaatgtgaaacttccaggttgaattttcttgctcttacttcttctcttactcttattttcacttcttctcttgctattacttttctcctgaatcttgagagattcaagagatatgcctgtacattcagccacaaaattcaacgagagcttggccttttatcgccactcttggtttgtaggtgatttcatattggccaagtactatttcccacttgagtaactaccgagatgctttaggtttttgaagaacctatcgcaagggctagtcaatgtacactcttattggatgagcttggaagtaaggtcttagcattctcaaagctatgagcaagtagtatgtcagtttttcaatgagtggtatcgattttcagcgtcaataagtcttttgctgacatagtatactgggtgttgaatgccattttcttctctaataagaactgcacttacaacaaactctgtgaccaccaattatatgcccaattctttattgtctagaggttttgacaagatgggaggctgagatagttgtttctttagctcttggaaggtgacttcacactcttttgtcctttcaaattttttatttcttctaagtatgcagaagaaaggtacactcttctttgtggactttgacacgaatctacttagtgctgctatgtggccagttaagctttgcccttcttttatccttgtaggcgacttcatatcgaaaaggtcttagatcatctatgggtttacttttattccccgacattcactatgaatctaaggaacttgcctgagcctactccaaaagaacacttgagggggttaagtttcatgtgtactctcaaaggatcttgaaacattcatttagatcttctatatgcccatagcctttttggacatgacaagcatgtcgttcacatagactttcatgttatggccgatcaagtctttaaacattttatttacaatcctttgataggtagcccttgtattttttagtctaaaatgcatgactttgtagtagtacatgcctacatctgtcaagaaacttgtatgttcttagtctggtggattaattttgatttaattataacttgaataggcatccttgaagcttaggatctcatgaccaattgtagcatctactagatggtcaatcattggaagtggcaaaaaatcctttagacaaaccttattcaggtcagtaaaatctttgcatactcaccacttattgttggtttgggtaccaagataggattggacacccagagcaagtagaaagcttcaatgataaagtcattggggcgcaacctttcgactttgtctttagaagcttgtgctcgctctttatccagcaatctccttttctactatacagattggaagtttggatctatggtctaggcttgaaaaattacagatggatcgacccccaccatgtctttatgtgaccaggaaaagatatagaggttcacccttagaaattttatcaatgctgattttcaatctcctagttggaagggtgggatcaatctctacttcttctagttcctctattggtccaaagctttctgtaggttccccaaatggaggatctaaatctgcctcctcgctttgggctgaacttcattgcccttggctggactcttcactagagctcttgataggcatgttttctttcttggctttggacaaagccaagttatagttgtgtcaggcagttttttgatctccccttaggcaccctaccccatctctcattgggaactttaggcatatgtggtaaattgatgtcacaactttcaggtcgtacaaggttgaccaacctatccttgcattgaacgatgatggcacatcgatcactatgaactgagccatcagtgttcttcttgtggaactttccccaactgtcaaaggcaatatgatgtattccatgggtgcaaggccatggccaaagaactcatacatcagttgtgtataaggtgctagatctatcaactaaagccccatcttttcataggttaacttgaaaagtatgtttgaagaggctccattatcaatcatgcacctggccactgtcatgttccctatctgtgttgctatgactaaggtgtcattatgaggaaacccgacctgggcggcatttctctctgtgaaggagatgataggttcttcaagatttatctatttggtatctcttttttctacagctagtacgccatttttttgctcatgatggagggtccgagcttggcgctacatagctttgcttatttcacctgcaatatggagtcatccaactatgagccctaaatgacctatcactggcggtggtattgggtctttgttttaggcaccttgtgcctgtgtttggttgtcttgtacataacgatggatatggggatttttctttctgatcaagaacttgatttccaactttaagtgcttgcactcattggtagcatggccaaaatcattatgaaattgacaaaatttgaaaggcccctcttacttacgtctttcctcatgggaggaggcttcctgtatggaactatggactgtgtggctgcgcagactatttcaagagtttttattaggagagcgaagcatgtaaatctctcctccttctcctttgagtcttgtggcgtgggggaattattaaatttcccctttatgccttttgctcggccagagttgttattatgctagccttcattgttttgggcttttgagggctagccacctatgatggcaggtgtgctgggcggaactgagggttgtctaccactaagggcccatccagcaccttcttgtctcctatttttgacttgtcggtcaacttcttcaagcttaacaaagccttctaccctatcaaggaaatcagccatgttttgagttgagtgtcggcggatgtccttgcacaactcactcaaatgtagtatgccactcatgatggctgtgtaccttccttcttccattagattcttgactttggtagcttcagtcatgaatctttggagatagtctttcagaggctccttggcctctgtttcacatcaactaagtcttccaacctataaggtgtttgtttggaagacaagaactgtgtgtagaactctcttgtgaaaggattccatgaatcaaacctcatagcagctaatttgaaaagccactattgtgaagtttcagacaaggtttttaggaaaatcttgcaacgggtgtcaacctcaacattttacaaatccatatagattttaaaatatatgatgtgatccaagggatcttctttccctgcgtacatcttacaagttggaatcttgaacttggtaggcaagggcaacgcattgatgcacacagaaaaggtgaccctcaggtcttgtctagctctaagtcagacaattttagaccagacaagccttgtatcatgtttttgagttgatccagttgtgcttgcactagaggatcaacatcagcttacctttgtccgataataccctccttactaacccttgcccagccaggctggtgggtgggtgggcaagaaatacttttccagggttggccagatttagcctattttgccctcttggtggagttattgggggcatgacgtatctattttgagcatttcttctttggttcagatcaatccaaagatctattcttactttgggcccattctggcaaatatagaatctctgggcctcaggtcagaatatgtctaaccatcatcgttgcacccagtatattgagatatgcagttagtgtgctcaccacttgggtgactagtggaattgtcctcattgggattggggtaaaactccccactatgagaccaactctgccctggcctcagtgggatgtcttcccctccttcatcacctttaagaaggccttaaaacttgtcaatcctgccatatgatctttcaagcaagatctacccatcattaggcagataggacgaccttgtttgggacgcagttggccctcttggccttgaggttttcccatgatccctagggagctaagttccctttaagacacagggacctttaccctaaaggggatcccttatgagggatggctcttcaacctgagatccaaccctctcattgaatgatctgattaggtcattagcctccctattatggcagtttagctccacctattgggcttggaggattgcagcaaactgatccatccattcctagaattcgcgtctctattgggcaaacgcatcacccatagcagcgcatgtttcttgttggtcatgatgaaggagatttgtatgaccttgaacttgtcctacaacctctctcagcctgacaagttcagtatcattccctaagtccatgtggggctcatcaatgcctggattgccaaccccaggtctagtctcactagcataaattcaaagtccaactctcgtaccaggaactttagcgtttggctggacagtgggtccagtaggcttctattctcctagctagacttctgtggtggatgtgtcagctagctggccagagcatggtggccgggcaaacacactcaggttgaccacagcaggtggcacttaaacattaaggtctgtggccataggttctcgtggtttagttgaatttccacgtcttgtgatagccatgcagaatgaaaattaaaaaaaaaaaaaaaaaaaaaagatgagagctttctgaatgagaactttgggctctcaatgaaagcgccaaaatattgaccataaatttagccaactgacgcggagtctaactaggattggatttatcttatgactatcacgctagattgataataaatataaagacacagacattgatagaggttcgacccctttgttcaagtaatgacctactcccctttttgttgtattctctcttgagataataccaagcatattacagtctgaaaccttgtaatatttagctatggatatctatagtattacaatgagaatgtattttgaaggtgagaagtacgagaaaagagagaattcattgccttagtgctttagatatttttcatgaatcagaatgtcctcttcttcatgaagggttatgaacctttatatggtattaggttttacaaggtttcttatttgaaaatacataaaatatgggaaatattcctaaagaatagagtcgttacatttttgcgttgaatccctagaattgtgggcagtttgaactgttccaaagttgcaaaagtgctgaggatgatttggaaagcttttgagaaacacacaagtattggagcgtaccctatatgcttggctgaccaactttattgaaaggtttcccggtggatgaagcttgtccaccctggctggccagctatatgtttggccaggatctgtcagtgtttgtacatccttatctttacaggtgactttaatatcaggataaacttgcttgtgtccatcgtgcagacaagtgatcttacaggttggaaggttgaacgacattaccctggccggttagtgttgacctatcttcaatgtgtcttttggtttttgctacgtggaggtgccatgtcaggtggacaaaatttgagataacaaaattaatcatgtttttcgataaatcctttgattagcaaaggtgtgcacattaattaagaaattaatgtagcacgcttagactagtagggcattgtaatttggtattatagctgccagtaattctccaaagaccgtcaagatatgtacagtcattattagagataagctcaactcatggtttggcaagcttctacgtattttagtagttttatttgttacgcatggttagaaaagcatgatagaaagcattttagcagatccatagctgaatagaagtatgttaagatcccatgtaagcggtaagtagattacaaattagtttgctgcctaactgagcaaactcatgaatttacagacttgtcctatatatggatccctagtgaaatacaagatgttgggatgatgtaattgagactggtggcggttggagagattgggatcccccttattctcaaggctgagttaaaggccgagaaaagacttatggaggtggttatgaaaatacactacaggctctgctagatttggagcaaaggttcgtggaaatggaagctagaatacaatagctagaggaaaagattgagaggttgaggaaacatggatctcctgttgtgccttaaccccaagtaccagttattttagctcaagagttgccagtaaaataattaattactggtaaccaaatgggtacattctatgggagattttggatgcaaagaccattggttatcttggaagatcaagatatgatgaatgcttttaaaaatcaagagtgttacaaagtttgctcaagagtcccgagggactttagttgttggtgaggtcactgctccccttactttcaatcttaataaaggtggtgttggttccttggataatcagaagaggaaagctccatctacattaatgggatagagttagaaaaagaggtttcgtaggaaaacaggtgagggttgccttggacgtcactatacttatccagagtacccccgatgtaagaagcatcatccgggagagtgtaacaacatttttccaatgcagtctagtagggcagatcaagagggaatgcccacagctgaagaaggaagaactaaaataggaggtaaaacccattccagcttgggtgtttgccactacctaagccaatgctgaagcttgtccttcagtggtgtcatgttagcttttattcaactactctatttactctttgttatttgattctagagctacacattcatatgtgggagccagggtgattgataaattgattacgccttgaaatagttatgaaataaggtttgaaaccctgatacctagcgaataattacttatctccaaaaggtggattaagtatgtgccgattagagtggaggatagggagttgagtgctgatcttgtagaattgggtatagtagagttcgatgtcatattcagaaaggacttactatttaagtaagtcgttaatgttgactgcaagaggaagatggtaacttttcaacctgagagtgaagaactattcgtgggtgtgggatacgttttgaattcctaaattctatttatctcggtgttaaaagatagagacctattgtgggatagatgcataggactgttgggttttgtgccctannnnnnnnnnnnnnnnnnnnnnnnnnnnnnnnnnnntaataaagatcagaaatcacatttt

SEQ ID NO: 112791 - DNA, 11785 bp, Cannabis sativa
ttattttttgttgttgtttagatgttattttcatattacttttatgtaattttcttgttgtttttgtgttgtttctatcgaaaatcataaaaatgtaaaaaaaaatctgtaaacgtcaaaatataattttttttataaaaaatgatgtcttatgtaattatttatttaaatttcgccccaagtctctcaacatcttgagacggccctatcaacataccaattatatacgttgtgtaattgtatgtaaatatattttttataataaacaaattgtatgaacaaacaaaattatgtttttaaatatgtatattgtccctttcaaaaaaaaaatatgtatattgtaataaatttatataatgtctatgctattataaatttttctttttaatgcgttgtgatattgtacgggcaatttgattaaaaatgaacatcaacaaatttatttaatttcttatagccttatatttttgtcataaaagattactttcataaataattttttttagacaatctccaatgattatattaatatgattttgtcctgttattatactttcacgaattgtaatccgtggtgtatggcagccgttagatcaagccgtcagatgatggagttatttgatctaacagctgagattgatctaggggtaattagggttaaaaagtagaaacgtaccctcacactcatttaatgtaccctgagacccatctaatgtaccacagaatacattccgtgagagtacatcacggaacaaaatcatatccctattaatataatgtgaaatttataccaatttaatgttaaaagatttaatttttggtacaataactaaaatgattcacatcaaatacacaaaatattctaccaaataaatatattttacttaaaaattttcacattttatattatttacattaatagccaaaaatagttaatttatgaaataattagtaagaattatatcatgactactagtaagaatttagaatcttaaaataatttagtaaaataaatatttattaaaacaattaaacactaaatattttttcaaaaaaatcttattgaagttatatagttgatcctaatatacacgaccattttcaaaacaaacaaaaaatgattatgcaaaaaagagatcatcaataatattaagcatattaaatatcaatattctgaaagtacttaaagtttatataatcaatattttaatattttttaaagctaagatccacaagtgatcaatttgactattaaattattaattacttaaatgttgttgattttagttttataacttagtgttatgttatttttattttattagtattaatattttttttattgttattttgtatttgcacatatgttaatgttttaaatcaattattatttttgtgataaaatttaattaaaggacttaattgtaggattatatctgaaaataaaattaaataaaggttagaatgtaaaaaaaaaaaaaaaattatatactaaatcggtgtaaattcaaaatttaacattattaatgatgtagaattagaccataatttagtgtattattaaagtaaaatagtgtaaaaaattcacaccaatttaataaaatagtatacgattagatatgctcttagactgatcaattatcttcaatgactaattttccattaaaatcatttatcttcaatctaaagttgagtttcaaccatcttgtaaatctcttttttattttgcgtaacatctcatatttaacaaaagaaaaattctttaaattctcatatttacgaaaaatttccattcgccaagagggaatataagtgttatcaaaggctaattacattaaaatactgaacaatgtgtcattagtagttttacaactaaagtccaacggggaatttaatcaaaatctcatgaataatccacaagcatttgacacagatatttcgagtaaaccatttatctttttcttttttccttttttcgtatttaaagtatttcgtgatgagaaattcagattatacaaattgagtattaattcattgtcaaatctaaaacgctagaaataaatgaatttggaaataatttaaataacaaagatacaattaattggctaatgctacatttggcctacactgtctgaaacttcccttttcttttcaatcttcttcaccatttttcatctttttctgcagtagcaaatcaagtccttgaagaaccaaaagaatagatcatcggcaggcttcacgtaccataaaaaaaagaagagcttgcccagtgtacaaagagaagatgcatagttaaacacttcaaaagtaaacacttatttctcagtctgatctggggcgatttgaaccgcctttgggattgtacattggtaaaagccatcgcgacccgtgtttccttatcccgtaacaccgccaataaagtatgaataatgaaagtactacaccaagggggattgcccatctgttccgaacaacgaaaaaaagccaaatcaaaaacacagtaattgagtattaatggtgattgagtgtgataagatttatatctcatttggtaagtgccctacatgaacttctgattgaggatcaaagaaaggagagttcatttacctgtccaagtccagtactgggctgtaaacaagtgtttcccaagtggcaactatcacatgccaaaccgggttgtagtaaagagactcagctgtccagaacatccttgtgtatgtttctaagaaaatgaagagtatccatgccccaatttcaagtaaaataaactttatgatgaatctgcctaacaccaccatgacaagggagaaggtcaccaaccaattgaagagcctgttgttatattctttgataaatagagagcgtgatctccccaacatctgcagaaaattgtatgtatgataattcagttatctggctccagcataccaaactgacatatttcgacactgaatatgtaactagattaattaattttattatggcaataaagaaagtcaattggtaattgtaacttcttagaaaagaacagtttgcgaaattaaattgtcataggtcgtttttgtaagggtatgtctaaaatttttgcagttgcagactatgtcaaggcaacaaaattgtcaaaaatagagatgaagccaaacaatgaattatggcttcattctgctatccaaatgacaaacaagtatcaaaatagatttgaacttcaaattttaatagctaaaggaaatgtcaaactcaaacaaaaaagaacgaaaaaaattgaccaaccttcatcattcgatgctcatagcttgcttttgaaggtcctacacactcctgctcaaaactttgattgcatttcaggaaacctgcattgaatttcgccattgtaggaagtctgagaacctgaagatgatccatttcatcctcacacgtggtatacaatccctcacagagctttgacgatttattttcatttgctagaataacgttcttgtaagcctatataatttttctagaattagtaatcgtacttctagcataatgcaaaaccgtaatatgatatgagtacgaaatatgttggagtgaagaagtccaaatggagttcaacaaacacaattaagcaccataatcaatgtctacaggtttcaccactgacaaaacttctattttgttcatgaaataattgctcaataattttagatatattctcccagaagtgcccaataatcagatagaagaaagacactaaacagcactggaaacacccaagaattttagagcaggtacactgatcacgtacagtatataacctagtaccatctatttagttgtatatactatataacctagtacaacttccgattacgtatatataaatatatgtgtagttgaatgaataccttttctatttcctcatctagctccttaactgatttctttgcatggtgacgaccaaaatgctggtgctcaaaaagttgcattgcttcctctctggaattttgatgggcattttgcagagattcttcagagagaggtaaatgcaactttgccatcagatcactatacagcttcaaacatcgctcaagaatacccttattaaaaacctcaacaagagagccggttgatgggatctcccctttattcaaggcttcaaggatctgaataagaaaatattaaaatgcatagtattaccatcaaaaagcaatatatgtgtaaatttcaattcatgtacaagagatagcatccaacataacaaaatgaagtatactcttttgtattggtaatagaataacaaatcaaataataataataataatagtagtaataataaatttttttaaaaaaaataactatgacatattgaaggcaggaaatgaatggcataacaaataaatgtgataacacataatcacgtttcattttgattgtcgttgctaatattagaaaaacgtatcaataatgcccaaaagtttgataggatcacaaatgttaacgaaggggcttaaaactactactctttacaacatattattaatctccaatgacaggaactttttccctggttttcctgttttaattcgcatgagccagcttaagagatacctgctctagaaaagatacaaactcctttccattaagaggttttccccgcacaatctttggacgaataatgctgccaacaacatcttttaattgctctctcttcttgacataacttgggtcaagttcaccatcattcaaatcacatagttttgttcgctgaagatgaggctgtttatatgtacagaattcaaattcaccatagaatcagatcacataaacaaaatacaaaacatgaacaaataaatatacacacagcctctagtgtgcgtgaatacatgtcatacttatagaactaggaaactaatattgaatggacagcaaatattaaagtaaaacccgtacttgcggtaagctaaacgctgtgctgttatcacccatgatagccaaggaatctcgaatttgattaacctgataaaaacacaaagcaaatcaaagataagttccaaaagaaattttttaaattaataattgaaaaaaatgggaaaatcaagaaatcaattattagaggatataccagatcgatatttttgtcccctgcattttcaaaaaacatcaacagtaagagtttgcttttacaaaaacagctcaggttttagtagtataataataataaaaatgacccttgcctttcactgctgggcttgcaactttttcaaaacaaaaaaaaaacaaaaacaaaagagttcagccaatgagcagaaaaacctgaccttcactgttagggacacgatggagagcttcaaccaccatttggtgcacagatttcccttctgcaggacaacaagaaggtagaaaaatattacacaattcggttctgagctaaaggatctattggtaggttgtcacataaattacagatcaggttccttacaaaaaacatatcaaatgaaacttacggagaaaatcacgctggataagccacaaaagctttgcaggttcaaaagcaatatcttgcccctatttatgcatatcacacgacacgtatcatcagaaatagccaatagaaatcattagaatcatagaaaataaattgtatggtaggggggaggtaatatatacaaaaaggttttgtaaattaccttcactctgtttgccatgaaaaaaccaagccactaaaaaaattagttttgccaataaaaatatagacaataaccaaaacattgttaaatgttaaaacaattgctaagtggaaaaatacagtaactaagatgcctaataaaatattttgaaagaaagaaggaaagaaaaaagcacgaaccttccgtaaaattcttcggcaagctcaactgcaaatgatagtcgagagatgtcggcctcacgtatctacacaaatgacataaggaagttaatttggtcataggagccgcgagattaactagccttctaaaataataacatcaaacttattgccactaaccgtctcaggcaggttatagataagtacagaactcaagacagtagccagagcaaaaatcctgcagaagcagggaactcagtatgggagaaaaggaaaggcacaccaaagaaaaacagcacttaatttatttatttgtttaatttaaataagtactttattggcgtggaaattacctgtcgtcatatacatttgatttcccaacactctcaaaaccctctgtatcaaggaaaagcacggaagttttcactccatcgatcgtcatttctcgtggggttccccatacccatatccctgaaacagatattaagaaagaacaaaactgtcagatagcagccacataaatgaaagaagcaaactattagtacgcacatcagtgatttcaaggtaattaccctttgtttttgtgtcacgcatgtgtccaacaccaaagcctgaagaaaaagcatttggatattcaaggatactacatcatataaactaaccaaactatgcagaaagattaacgcaacaagacctgttcagaaacaatacaaaaataaataggactgcaccttcggaacaagaaagcgagagaagctgattaagcaaaaacgattttccagagcggtaaggtccaataacctgaagaacaagccaccaatgatatggaatcaagctaatgaaaagtataggaagctcataaacgtaaaatctgaccaaactcataaataagggtactcaaaacaattacttgcacctatttttttttcactgaaaatgaaaaacactattacatgtgtagattttctggttcagctccaaaaatccacacagatgatattttaaaacattaaagaataaaaagaatggtgaagaaatatttggaaagagaaaaaaaaaagacaagctcttttagcatgaaaacaagaaaaagaaagagcagatttcctatgtctgacatgacaactactttaatctttacatgctaaataggccatctcaagtgtattgaaggtttccctaaacaattgaacctcatgaagtccaaaaatatacctttatgttaaactttcaagcaatagcgtaattcaaaaatgaataaaatatattaattcttagtacaagctgctccataaaattatcttactgcaacagctgcaattggagttgttattctcttgatggcctccaaaccttcccttgaaagctgaagtttggtatgaccaggatcgggttcgacaattgggaacctgagcatgcagtgttgcaacaattgttagatatagcggcttgcaaatgttatttgcagaacaaaaaattatgtgtaaatctttctgaacaatttacctaaacaactcttctaaaatttaagcagtgaacaaaaatatattgcatgacaattatgtgccccataatgatatcaaactgagaagcacttgtaaaacaaacaatctcagaagataacacaattagttaataactccgttgcatcaatttaagttctcattagtgtaaacatattgtagaggttacaaaggggcagtaactgtcaagtttaatataaacaaagctaaatcaatttatgttcaaaatcattatttgtcgaacaagttacatagcaatcaaatcaagaacccatgttagaaactctccgatatgtggaaagcatgcattctaatattggcggtgccccttctattagcattataatcaaattagtaaatctaatatgatattagagcgagtatttccatgtttaactatccaaactagtccaataatttgagagaccaaactgaaaaaagcaactcttttagcatatcaaatcattttctgtaaccaaattacgaagcgaaattcttcactatgacaagaaacataacttaaaagattcacctttatcactaacagctaacagttaataagatcaaacttaacaatcacaaaactaaacaaatgaacattccaataattgtaaatagcttcattctagtcataggcaagattaaaaaaaatggaaacacacacacatcttcgaacaaaatacatactttcttaattttattaagaaaaagaaaaaaatgaacagtgggaaatgacttacgcctggttaaaattctcgaccgagaatgacccagatgctaaaaggaagcaggaaatagaaaaaaccatgaaccaagaagaaaactccattgctgaagattgcagagaccgcctatctcaccaatggggtcgagtcaaagaccggtgcacataagtgtacggggaaatcaaccataagaatgcaaggaagagaagcaagcgggtttggggaagagcgttgagatggaatgggatctgaaaaacgaaaggagaagggtgtacgttaagaatcgtgggagatcaacataacaagcggattgttttggtttttggttttggtttttgcatttttacagagaaaggctcaggatttggaatttgtaatgtaaagtagccgataaatgccctttcgattaaaataataaaataaataatgtattgaccattgagaattgactgagttttatctttttattttttttttttagctgtaattctacgttactatttagtatttacacgcacgttgggggaagttgtctgtctggtcgctaagagcacaactccattaaaatacctttatatgtaaaaatttagctaaaaatggtcaaatggatcatatgagttactgtaaatttatttatttattttttttttgttttgagaaaatactgtaaatttattttaaagaatggtattaaagttattttaaaaaattgtactatagcttctctaaatgtagctacaattattcattaagctatatttattttattattattttactttattatttctctctcataccatctctttctttattttattgattttttttcattatttttatataaatgaatattgaacataataatatttaaataatatggagataaaaataaaaaaattaatgtatgatgtaatgtaaaaatttgaagtaaaataagaaaaaaatagaattttggtaaggtattataaaggatagtttagagaaactattaggagtgctctaagattataatttaccatcaaacttttttctcgaacttctgaaattaaatatcaaaatattattttttaaaaaaaatttacaacaaaaacttttaaattttatatacttaaatattatattttttttttacaaattaaattattttacttcattctgttactactattctgttagctatgaaaaataaatgtgtgtaaagctcagactaaattccatttatttcttaaaaaaaaagtaaatcaaatatttatttatattttttttaacaataaactaaacttttattgaaattaattaaaatagtgtacaacgaaaagcaaagatgaaaaactatacatctaaactagttaattatccaccctaagtacgtgattaactaatttattgtaagataaatatgaataagggatacattaagaaaattagaaagcaaactagtaataacttctaatagagtccaaatcattagagaaagactatctcatagataaaacaaaaattcaaagttgcatagccaaatttaaaagaattaagtggaagtcccaggcccaaacgaccaatccaacgccaccatagagttaccgtttcggcgtagatagttgtggaatttctacaaaaccaacataatacataataaggtcgaaatttcataaagaaaaaaaaataaaaatgaagcataatataataaaataacaataagatcaccagaataaaatgaagatgaaaaaaatgaacataagaatctgagaccgaaggaatagcctcccatcgtccactactataagtaaaaaaattattgttgtaggtgactaaaaatatagtgtaacaatcaatcttccatatatatcactaaccaaaacataacataccagtcttgccttttggcatgtgtttgtaagtttctctcaaaagttttagtttgtcctttctagtttggctttttatggtccaatatctcaactcttttgtccaatggcttccagtagtcgtgtcgtgcatgatttggaggatcaatattcgaatatcgaacttggagatgaagggggaatggtagagtttgatagcgtggatgaggaagatttactggtggatgatcaatggtgcttggtgggtcattttttgaacgtgagagcgctggattttgaggcaatgaaacacactatggcagggccttggaagccaggaaaaaggttatttgttaaagagttggcttcgaatctcttcttatttcagttatactatgagactatgagattgatattaaaagtgttattaatggcagtccttggacgttcaatgagttgccattcttgtttggaagggtgccaaaaggtggtgatccaaaagcgatgagtttgaataagcttgatatgtgggtccaaattcacaatctttcgtctgggtttatgactgaacaagtggctaaggaggcggctaggaccatcgacgattttgtcgaaatagacccgaagaattataatgggttattgcgtgattatttgcgtgttcgtgtcaccatcaatattgatctcccgctaaaatagaggatgaggatgaagaagacgggtggtgaatggttttatgctaactttaaatatgagcatgttccgactttttatttcatatgtagtatcattggacattctgagaatttttgccacaaactttttgatacgctggctgaagagattgtaaaattgtatgggaattggatgcatggttagcctcggaagtagaattttttgatgctttctcagtacttgcatatgggtactgaagcaaatgagcattttttagcgagacaagacggtggtaaggaggacatcatggtggtcaacagttaccatttacagttagggaaagaattaatgtgctgagtgggagtatcaatcaatctcttaaaacgggtttcgtgagacccgattcagacctaattgggtcgggatgaaattttgagcaaaaatttgatgaaaattgtggaaaattaaagggttttattcaggtttcaatttctaagagatctagaatttaattttgagtatacatacataacttaggtagatctaatgaaatacatccaaaaactatgagctaaaataaatcggactatagtggtaattttgatctagtccaattcaaaaaataagttgtgtagaaatattgtggattacttagtaatgaggtttgcccaatcaattttgatcaataaacaatttaatgaaaaaccaaaatttgatttcataatgaaaattcataaaccctaaaagtttaattttaaattttttttccattcattcaataatttcatgtatataatatattaagataaagagaatttaatgaggaataaaactcctaaaattttgatattaaacaacaaaaaaatctaacatataattgcgaaatcaatatgtaattagaagttaatatataattagagataattaacctatatcaatcaattattacacaaattattgatcctaaattatatacaattggcgatttgatatcataaacttaagatcaatttttatataatatagaacacaatgattatatataataattaggtatgtgtacctaattaatccatagcaattaccataatttgataagggaattttgattttatatacttaaaaaattaaaaaaaatatattattaaaccaaaactctaaaccctaaaaaaactatgacattttttt

SEQ ID NO: 112792 - DNA, 3051 bp, Cannabis sativa
ccataactaacttgatgaaatgagaactaaatccgtgagattgaagaaccttctctagaaatttgccatctcattttgtttggtgtgcattaaagcaaaagttttctagtcaatcgaaggccagactacttcagctcaaaagtcagttcttaacaattcgaaaaggcaaccaatcactactacaaactacacttttggtgtcagttttaaattgatacttatacctatagtgtcggttcatagaaccgacatctattccacagtgacaaaaagttagagtttaggtgccggtaataaactgagactagtgagttttggtgtcattttaaaatcgacacttaaagtgttttcctatagtctcagtttataaccgagactaattagtataagtatctgacacaaaatttttgtttagaggttttaataatgcaattgaattttattttgttcattttataatttatttagcatcacagtagaaaaacgaaagctcccccaattctaaccaaaacaaccccaaatctcatcacaagctccaaaagacttataattaccttaataaaccattttcaattgacataaactcaaaacatacaatatttgcaaaattatcgttgttgagccaagtttgagttcttaaactcaaacttgctcaacaccacaatcaatcactcaaaacacttaaaaccagcttaaatcaacatttctaagctacagaaacatccaacattgaaaccctagcagaatagaacttaattcctaaattgcaagtttaaagctaacaaaacttcaacaaaacaaaagacaagattttctagggtttacctctaattgaaccaccacaaaaacttgatgaattcttagaaaaagatgatgttggttgaacttgctctggttcttgcttgaggccgaagaggtggagagaaagaagctactcttggtttctaattgtccatatcttccttagtttgatttacttagtaaaataataatttaattaattttaattcattactaaatggccagctgccactaatgggaatatccacctatccaaattgttaaatgaccaaaattcccttgccttaaacatctagtccaataaatggcttagggataaaatggttcaaaactaaaactgcgcctaatcccgatatttcaaatatcacttatgaatactcccccaagtaaaaagataagctaacccatgtgactaaatcggccatccgtcacattttttatcgacgccgagcgaaaattataaaaattataaattttgcatatgacataaataatacacttagagtttaataaaatctctgaaattgagaaattacaactctaatgcccatttatgaaaatgagacccacaataatataaaatcatgtataattattaaataccaacaataatgctaattgcctctactaatccataatctaattaggcggttattacaaattcaattacgatccacaagccttttccacttcatttatccttaactttggtgatgattctggatggtttgtggatactgatgccacaaatcatgtcactcaaggcaccaaaaacttagaatctactagtgcatactcacgttcaaaaggtcttgctattggagacggtaagaaattgctaatttctaatattcgttctactacattaccatctgtcgattcattaccctttaagttgaatttagttcttcatgttccttcaattaccaagaatccagttagtgtatctcaactaactaatgacaattatatgttttttgaatttcataaaacatgttgctttgtcaagcacaccgagagggtgttgctcaagggaacacttaaagatgggctctatatgctagaggagtattcaagatcttctccaagtgataccccaagacagtcaatggtctatgtttgtagtagtcaattcgataatgtcaatgtaacaagtgactataattgtaataactctaatatgaataaatctacaaatcttgacatatctttttactcccctgctgcctattaaaccagtcacaaaactcatatttttaacacttggcataacaagctagggcaccttcaaaacctgttcttagcagggttttaaacttagtaccccatactggatctattgacaaggtatccttttgcaaagcctgtaaaatgggtaaaagccacaaacaactatttcccaactcaaactcaagagcttgtcaaccacttgaactgatacacaccgatttgtggggaccctcacacattaaatacaaagatggctatagttattatgttcattttctcaatgactacagtctatttacttggagttatccattagttcttaaatcttaagcctttgccatgtttcttaagtttaaaagtatggtggaaaaatagttcaatctacctataaagagagttcgaacagattgcggtagtgagtatcgaccatttgccaagtttttgagtgaccaagaaatacatttttaacatccctgccccaaaacaagtgagcaaaatgaaaaggtagaacgcaaacacaggcacataattgaaatgggcctcactatccttgcacagtcatgggtttagacttcacttagtggtggcatgcttttcacacaattgtgttcttgatcaatagattaccaaccccaattttaaagcagcaatcaccatcagagtgcctacttggacatgttccatattacactatattaaaaccttttaggtgtgtttgttaccctcacttatggccttataataggcataaaaagggatcaattcagatcataataatgtatcttcttgggttagtactccttaacacataaaggttatctatgtgacaatgttgaacagctcccaactcaagatgaggttattattccaaaagaacaaattcaacaccctcaagaataagagccattaaggagatccacaagagagaaaagaattgctatttcatatgacgattttgtatttcttcaagaacatgaggatgaaattggaatgatgaaagatgatccaatcaattttcat

SEQ ID NO: 112793 - DNA, 2932 bp, Cannabis sativa
  modified_base (74)..(76): a, c, t, g, unknown or other
ttaaacaagtaatgaaattaaatatgtttctttattgataattgaatagaaaagattacattgaaatagagttnnntttagggcacaaagcccaacaatcaggccaccacttcttataaggaccaaatccagcaacttgaatttgatacatctactgtgaaggctgaagtgatttttatctccaggaagcagaaggagactcggaggagcaaaactactggatgcccgagtgttgacaaaggccaaagagctcaaaaataaacaaattgaagttaatgcgacagagctgaaggtgaagagaattaaggaagaatttgagaagcttgcagtcgatgttgagcctaggagaaaaagggtagtttctctagagattgacctggactcagagagggtttggaggaggcagcttccaaatatggagaagacatggactgctgaaaggtccaatgcttttgtggttgttagaaccgtaagcaggttagtgtctttgtacactcggtttgtcaaggaattccaacaagccaccattaggactaagaatagaatggagcaagccatggaaattgctctctttaggaagctgctgatgttgtagaagtgcatcgcatgcagagcgtaaagatgaccctcgtgaccacacttaattatctatggaaaaaggatcccattatcctgaaggttcttggtgagcaggaagaagcttatttggccaaggtgcgcgcaatggaagctgatacatgccctgtggccaagaattttgaaatagaagtcgttcactctcaaggaactaatgttgttgcctctggggatggagcttaccaaacctagtcttgagttcttctcttttaaccctttattttttttctttgggggctgctggcccccttttagttttaacaaagacaattattatgccttaaccgcgaggctagatgtaataactttaatttttgttttatgtattttttctgaactatctttattccaacttgcatctcaaatattgttgattacataatcgtctttcatgctacttcgaatgtctcgagtccttggttccaacgacctggactctaagagttagattttgatttggactgatctaagtcatgcacttccatgtgcctctcgcgtctgaaagggttggaagtaaatctactttttaatgttaatcattactttgccaaacatatatttgttagtattcagtgcaactctatatatacaaataccggtcttactgatatgttatctattaggcaatcataaaatatgcatgctaaacatgtaaacatgtacacaactattatactagtcttacctaaattctaaattaaagtgtgccagtcaacctgagtgaaaactgatgcttgacgatttaaaggcccctaagtcacgacatacataaactggtaagtgataagctaaattactttttggggacttaaactcaacattaaaaggttcactattgataaatagcgtgacaataccctaaatatcaagaaaataaaaaaaaatgagactttaggaaaaatatctcaaaaaatggcagaccgtttcttaaaaacggtagactgttttttttcctgatccctacctgctaaaaatcgtagatttgtttctagaaaaacggcgtgccgtttttaactacaaattctaaaagacctcatctctcacacaaaactaacctaaatcttccaataagctctagatcacttaattaagccataaataacacaatacaactaaaaatttcatcatcaagaatcaattataataatcaccattaagaacctaagtttaatcttaaaagcttaaactttatctttcacaacaacaaccaaaaaaaccagcataattagctaagaaacaatctcagagaacaaactcaaacattagtaacaccaacaacaacacaaacccaaaaacatgcatgaaattcctattttcttcttgaaaattcaaagagaaaaaggagagaagcttaccttgagctaactctctcttaatctatgaaaaacttagatcaaactctatgatttttagtttaaaattgaagataaatccccagctgcttgagattgtttgggccgaaccgagaggagaagggaagcaaaaggaatttttcaaatttttggtttatgggataattatgacataacaaattaaattcagcttatcaatatctaaaaatcccaccgaaaacaaattactgaacatgggtaaaaagactatcttgcccttaccttcacttttaagaaatctacaaccgaaggggtgaaacggtccaaaaccataaccccaaacaatatcgacataccaaatgtctaactaagttgtcttgctaaatctaagacactaaatcgtatctaagtgactctaatggccaaatcatcgcatttcactgttatcgggcataaaatacataaaatacataaaatttcatatataacataattaatacagttaggattcaaatataagcccgtagttgaaaaaaaataataatttaaagcctaatcttgacaataaaccctaatcatctgctaattcctaaaataaaactaagtggtcattacacttatcccccgattaaaaggatctttctataaaaatgtaacctgaacaactctggataccgagccttcatattagactctaactcccaggtggcttcctccaccatattatttctctagagtaccatgattaatgctattgatacgaaccacaacaacagttgtgatgaaactcgacactatatatggaagactctaagaattctcaaaatttgaaagtgaaacaacgacctcatgtttagttaagcatgaacattggtatgaaggaagatgccacaaacggtggtggaaatccgtttgataagtcaggttgaacgccacaaggaatactccttgataagttcgaatag

SEQ ID NO: 112794 - DNA, 3662 bp, Cannabis sativa
aaaatacaaactacaactgcactgcaaaaaaattcgaactgtattttttacgcgttgtggtgcggtgcgtgcgatttgtacagtgtgggcggtttaatgacctctaataattcacaaactattctaacaaatgatttcaaaatcgtacttgaacggagagctttttgtatgatatggtttttggtagatttgcttgttagggatttgtttgtgtatctgattttgatgaatttttttccattattattcatgattttgctcatacatgaggttaattatttatgggtttttattaggttttgttttattcaactatgatttattagacttatttttttgagtttcaaatcggattttgattgcaaaataatttggattttaattccatggagtttatgttttaggatttaattcatgggataggagatgaaaagaataattgtttatgcatttttttgtagatatgttagtttcttatatatatagtttctggtccggagctagctttgggattcaagttattaatgggtttgaaattctggcttgggaaaaatgaacactaatattatgtttggtaggatggagagttgaatatgaatagagagtataaaagaggaaaatgacagtagtaatctcttaattgtttggaaagagagatagagaggtgaaaggataaattactatatatttatgaaactactttattatctatatataaatattttgaaatgaattagaaaggagtaaaaatctttcatttgtggagagatacaaaatggtggcccatatggatttttaatcctttcacttctcttctccctcccacaatcttccgtgccaaacaaatagatttcgactctcccaccacctctctctctccttcctgctctatccactcatgtctccctcctttcaaacatactaagctattggcaaaacaaatgggaagtatatcaatatttttaaaagtggtgctgagtggcttgtgcgagtagctattggaattcaggattttagggtttagaatttcatttttcgagaaaagaagatcaagtgccaccgaagaaaagaaagtttgtttatttttaatttttttttcaagaattctaacatatttttttaattgagctataaattaagtaatttatttttaaaatattatttagaatcctaactggcacttaacagggttaggtagcatttaacaaccaaaaaaacatgctacaacaatatcatatcagaaggcttatattatttacttttttattagggtcatatttgtaattatcacaaatactacaggaatctcaccgcaaataacccaaacataaataatgtctccttgccacaaatttcccaacaaagaatgaacaaatatcattagcaaattccatcttaatatcaatagcaaatttataaattcaatcacaaatttataggaactctacagcgttgactgacccttctacatacaattattgcccagttaacttaaataaacagttctagtgataatgccaaaaagtggcgaaaaaagaaagtcatctaagagactaagacatctctcggaacctagcgagagctttcttgtgaatgagagttttgtaactatccccagcctgcacctcaaggctaggatccaacttcttctgcctactactcccaagtcctgctctactttccaccgcttgtgcctgcactggctctttcattccactcccatctttccctagcccctgtatataacatccgaagacaaaagaaatataccaaaactctgacatattagaaatgccaatacttagctagtggacagcacaaggttgaaaatctctattctcaaggaaccaacaggcaaacacgtacggaatgaaacttcataaattcaccaagggaaggcatggtatctaaaaattgagggagatcatgtacctttctcaaactcaaggagattaagtgaggtaaaagaaaacaaaaaacatcacccaatgtaaaggaacaaaaatatatttccattcattaacaacgacgttaaataatgtagccagttaaaaccaactattaaagctacaatcatttcattgaaacaaagacataaaacacagaaggatactgaaagcaaaaataaacaggtgtaagtgcagatgagcatacagctacacaaatgaaaccagcaagtcactcttaccagtccctcatgccatcccatgctgcggagcattcgattgcctacattactttcatcaattgctttttctgttgtgatcacctcatagctgcttacgcttgcatcaccagcaggacgtcctccaccaacaccaggaggaaaaggcattggatccaatgaacccttccttggaacaaaatctcgagcttgaaagttcaagattgtaaacacgtgatttctcacaaattaaaacagcattaagaaaacagatggacccattaacttggaaaccctagcttttcaaacaactaatgacacatcccaaactgcagaaccagtacagaacaagcaaaatttatatcacagaactaagcatttcagtttaataagcgaacccaagtaacagacaagcttgctattctaaatggtgaaaaaaatgaacaaatccacaaacaagatgttcaagaaaccttactcgcatcccctaaaccaaggtcggatgaattatctcctacagatagtgacgagccatagaggctcctcctctcagcagcacgatctctataagttgtctgaaactgttccttttgaccaggacctacaggaagaggcatttcagagaaccttctttttccactcccagcagcaacaggtggtgtataagaccccaatgcagatgcatctgttttaaaggatgtaacaacatgtggtatctcttgattagccaacagaactgatccatccacatttgcagtggaaaccatagaggtagtgactccagttgacaatccataagatgaaggttctgattttgtcactcctcttccagaaccccttatgacacccatcaaacttccacccaaactgttactcacaggtcttgaattctgggaagacaaaacaggagtaggaagtcctgaacttgtcgttacattctctttcacactcaacacgtcactcttaaacttgttctttgaggcctgaccaccataaagagctctatcttcagttgatacagttggctgaccgtcatccaaagccacacgagttgtttggccttcatgactcctctgtttccacattgacaatacattattcattttctttttatttgctagaatactgctttttgacgccaacttaatctcttttaacttttctttctcttttttttctgctgctattgctgcagttgcagcagcctggacaacatctggtaatgatgatcccttctctgatattgaggtagtagccggagcagaaatcactactttcctgtcattagaaccatctgatattttggaaagctcagattgactagccatcgttttgttgtcattttgatctgtgcaagggatgtactgttgtgcttggtcatcatacgaataccaaatcccattattactatcataataaagacctgtaaatagcacaatagaataagggaatgatgtaatatatatttctctgaaaaaaaaaagcattttaaaagaaa

SEQ ID NO: 112795 - DNA, 3406 bp, Cannabis sativa
  modified_base (3372)..(3380): a, c, t, g, unknown or other
tcgggttcgggttcgagtcctaggtccgtgtttgggttagggtcccagtcccggtctgggtctgggtcctgggtcccgggtctggggtctggggttcagggtccaggttcgagtctcgggtccgggtctatgtcccagtcccgattcgagtccttggtttggttctgggtctgggtccggattcgggtcccaagtctaggttcgggtttgggtccgagttcgggtatgggttcaggtttgggtcccatgtcctgggtccgggttcgggtcctgtctgggtctcgggtcagggtctgggtccgggtttgggtcccggtccaactccgagacctaggtttgggtttgggtctaggtttgggttcagggttcaggtccgggttcgggttcaggtttgcatcccaggtctgggtccaagtcagagattgagattgacctcgaatcctttgtaaatattataatacaagctaatacaaaccatttgttatgtattaaataatacaacatacattgttttaaaaattctagtcgtaataattaatacaatacattattttatctaaatatagtgttatttattatttaatacaatacgatccttatacggcgtactaaacgagccttaacagttttatttatatataatgaaatattaacttttttattgtagtatttttaattatttaacaatgaaaatagagttggatttttttagccaatggcaatggtttggtggcgaatatgatttgatcgcaactcaatgttgtttgctcagaagatttcaaggattcagatggtagaggtgctagctgggaatactttaatggagtttcaggatctaaatcagtgtggtatgagcagggtggaggtgtcgcgaggagcaagggggagagattgttgagatgggtttcgccaatgctagagttttttctgtaagcattgatgttgttgtggtgctgatcagggactttgtcgggcttggtggggtgatctgagatggtgaaggggtgctctaggcatgttgggcggtcggggagggtttcgggtggatgtggttgagttgatggctttgaggttgggccttttttgggattttctatttcaagggttgaagtttattcttcaattgtgtgtagttgggtcaataattcagattctaatattattttttgacttttttgataatgtaatttcaatagtagctatagttggtggtagctcttgttatgtcatttcacgttctatgaatagtgtagcccacactagtaaaatctgttactagtcatttaggtttcaaattgagagagttgcttgttttcaattcttatgtacttctataacaaataatttttaattaatgaacacctttcttttaaaaaaatagagttcaaattttgatgtatatattaattggacactgagttacattatgattactaattagaaaatgtactccaagtgtcatgaaatcacattatgcaatgacacaaaattagatcatctccaatggttatactaatttggtgtagaatctacatcaatttagtgtagaatcttttagttttgagatatttatggtcaaactcctctatatttgatttgttatacacataaccctcttttctagtactttggtgggaaaactaccttaaagatctattctatttgcaaatctacaactctgttcttttatctccattaactcattagataatttgattcaactcagcctaatttttcaagatggcaaattggcaaattatatgcccaggtagcaaataaatcttatttttgtgttttaaaataaaataaaaaccattaaaccaaaaaaaaaaaaattaaactaatttttttttcctctttctttcttcctgatgcttcttcttctcttccccttttcagccctaccagtgccataactcctccacacctgagctcatgacccaagcaatctagcctcaaagatccactatcctccacttagtcgtggcctagctgtgctccgcctccatcatacatccgttcatccaatttctaaggtcaaagatgttcgcttcgttcttcacttctcagttcttcttcttcttcatattttcttgttactcatcactgtctgagacctagatggagcttggagacaagttttttaggcggaggagttgtgacagtaagctttctcaattgctacaaaatcaacgaaggctaaaaactcaaattttagagcaacgatgggtcagttctgggatggtgcaatatggatatggatgccgtggtttttcagatcattggagagatttttatattttcttgaatgagtactatgttcatttattttttaggagattgctaaatttgaaatttgaatattgttttgatttagatgatgaaaaaaaagttacaagttttttttttcctctgtgttctgagataaaacatctgagataaacattatgacattggaaagtgagagtgaaggcaaaaaaaaaaaaaaagttgtagataaaataaatattttttttttgaatttgtatttagttttattgatatttggttttgatgaaatattatttatgatgtaaattgagattatgattttatgagtatattttgagattttgagaagaagaaagtagggatgaaaattatgcaagaaaaatggattttttttttcttcagttgaatagtttttattttgttatgattttcttgttaaaacactaaaataagatttatttgacatttggatatatatataaataatttataaatgacacgtgaatatttaaattgtcactttatattattatgttgagctggatcaaaacacgtaatgggttaataggatatatgaacaaaatagtggatttgcaaacagaatgaaacttaaggtagtttttccaacaaaataaaagaaaaatgggttaagtgtagaataaattaaacataaaggggtttaggttcaaatttctcttcagtttttagtgcaacaactctaatgattcacaccaaatattctactaaataaatatattttacttaaaagatctcgtattttatattatttatattaataatctaaaatagctaatctatgaaataattattaagaattatatcatgaatactagtaagaatttaaaatcttaaaagaattttaaaaaataaaatatttattgaattaattaaattatacacatttttaatattaaagttctatagttgatcctaatatacctgactattttcacaaaatgagcaaaaaataattatgtaaaaagagctcaccaataatatcaagcatctcaagaataataagattctcaatatactcaaagtccaatgaacctacaaaacccttcaaattgtatctgattnnnnnnnnntattgtagacattttcccatttccat

SEQ ID NO: 112796 - DNA, 3646 bp, Cannabis sativa
  modified_base (160)..(164): a, c, t, g, unknown or other
tttttcaaactttctaaaatggaggaaataatgcaaaggtggttctttttttcttactttatacccatgatagtggctttgttagatcaaagaagggcttgatcctacggacataatttaaagtggtagtggaaaagatggtcatttaattctgatgtannnnnaaactgcacaaccgccaaaatcagaggacatgcgtcttttcaaaaagtggagcatgatgaaaataccatttgtaatcattaaaaagctcttttatttaaaaagaacttgttagggggcaattattatactcaaaattcggtaagcacatcagaagaggacgtgtgtcgagcggggaagaacgaaaaactcaaacacgcaatcgtaagtacacttggcatggaacaactcgttagaagcacaatttgtagagtatgtttataacttggttggctaaacagtattatgcgagatagaaatgtacgaactactaatttatgtatcgacaagaaaccatgtgagtgcaagtgtgcatgacgaggcattaacctcgtcacgtggaagagatacggtaacgataaaaacacttagcgtatatgacatgatatacaaactaagtataaatagtttgggggtcaaggtgatggatagcgaggcatctatctcactgtaagatggcacacacacgagaaagatcatctcgacacccgaaactatagttatcaaaattaaaacaatatcaacctcgggaagttatatgacagacaccagctagccatcaaagttaactcgattccattgccagcaaggtatccccataagataaggtttaccttatatcttaaatatgcgttcatcttggtccaataaaagcgggatactcacagctgtgtgaattctaaataaaaatcgcatttacttagcgtgatttgtaatcaaatccaatgatttgagggaataattgttgtaaagattacaatcaacttttgtaatttactgcccactatgtaattataaatagtggcagaaaagatcaaaaaggagatgaaaaaactcgtacaagggaggctcgaaaaaataatcagatatctgaataagattgactcgtggactatgcagaattttaactacaaaaccacgtaaaaaaccctatcttcatatttttatttttacagcttttacattttctgtgtgaaatcactacagtgaggctcaaatttagttaacaaaaatctgcgttaacaaatgatacaagcttactctgaagtcgctggcctctgaaccattcctgacttgatgttgcataggctctccattttcggaaaatctgcttccaccagtgttgatggttttagcttgtgaagttcgttccatatttcccgtgatgctcatctccctttcaaggcttacttcgcgagtttgattgcaaaaattgggattgcacccttccagctgatccctttttttataggcttttggctgggtggtatgtgctctgcaaaattaataaatgggaggttccttcaccagaggaaatcctttacttttactgtgttaaggctaatcccatgaggactaataggtcaaagctggagttttttcgattggataaatgtcagggctcttacttccctgtttttcagatggaacatacccacgatctctaggaatattggttcttttcctccaggttccctactagtagggtgccatcccttgaattgagctaccaacttccaggtattttaacaattcattacaagtcttactcacttttggattctgccaatttttgtgtgtgaattaacgtttttcaattcgcagcaggacttcctcttcaaagcatcagaatggaagagatagccaggaaagagggccaatacaaggccttctctgatgagaaactgaaggttgaaagcttagtgacaactaagctgctctgcaagtcgggtttgatcaccaagtcccaaagcatcgacactataagccttcgtgggtagtgtcaacctcttcaagtggtgaaggaatccatctctgccgattcagctgttatattttccaatgcggccaaaaattagcatgtcttacgctgtgaatgggagttacatcaccctgaccctttggccaaggaagaagagatcttagagagattttccgtcgcctaccctgacatgggggctcaagggggcagcacattaggaagaggtaataggcccttcctcatcttctgtatccccagcctgagtcgcatgtcccagaggaactgggaaggatttgacaagtattttctaaccataaattgccgtaaattcaaaggagtatatagacaaagtagacctaatagttaggagcactagtagcatgagggctccttcggacatcgtcacagttaaccctttgacagttatgttgttgcctgaatttaaggagcatggtagcttcatgagtcataggagcattttagccgtttcctggggacaaccttatagcacctcactaaacggtcgtacccacgcacaagcttccacactagattcctttttttactattgctattgtttgttataattgcatgacttttgacagcttttgttctttgcttacattgctgccttgttatgtagataccccagaatctgagatgctgagatcgtcgaacaaccgaatagaggctgcgatggacgaggctaggaagtctcatgaaaaagggaagagggagaccaaaaccagggcttcccaaactcgtaaaccacctcccccaacgacttcctcgtcataaaatgtccaggaaattcctcctcaccctaagactgggcataccacactcaaccgttcaacatcgggtagtgggggaaggaggtcttaaaattctcagagacctagcgaagttcctactgcttcaggagaacctccctctcaagtagttccttatgcaggagaatcagtcccagatattgtaccagatatagggggtcctgacgacagtttggatggctctgtctttccttcaaagagaatcccagccaaattaaaatgcacggaataagggtatcctctcctgaccctatcacgaaaaaggccagacccactgtctagggactcaagacgactgaggcaccatcgtctgattagtcactgccacaacctcaacaacacccacaacaacaacaacaacaacaacaacaatagcaacaaaaataacaacaactaaaacaacaatgacaaccacaacaacaaaaacaactcttgccacactcatcatctgtgcaagcatcccagacccaccaacaacaatctttgtctcctcaccatttgcaaatagtggcctctcaaccaaccccacttccagcatagcctcaatctaggccaaccgatgctaatccgcctcagcccatcataagagttaaggctcctttactgggattctcttttcccgtgacgccacctgttggccctgaatgtcttatgaaggtagccatcttgaagaagagtcatgggagagaacaagttgtcctctaaaagagggctactgaccaaactctagttacaattttgccactttattccaccacttattcctctttcaataataccatattttctaattcaatactataaatgccaaaaaaatgatttatttaataattaattaattatcaaataa

SEQ ID NO: 112797 - DNA, 3123 bp, Cannabis sativa
tcaatagttcgaggggaatttttaacggccaaaaaagtttaaggggcacgatttagtacatgtcaaagttcaaggaaaaaattactaattaagcaaaagaataattataaattcacttaaaatgttatagtttggtttgaacaaggttagtggtggtacttcgagggacccaccgacggatttggtccatttgtagctctgtaatgtgtgatctcagttctgactcttacgttgactttcttctcaattctcaattctcaattctcacattgtaaattgtaatatataaatacttacacaccatcacatagtaactctcacacttctcttttcggtggctacttcttcataagcccaacatggagaatttccagaaaattaaagtgaccaatcccatcgttgaaatggatggtaaccctttctaattctccctctctaattttatttcatatatatctttacgtatcatttcaatctttctgcttcattcagcgtatttgtctcttatttagacttacgatttcttaaatttatgttggtttgatataaattcaataacttatctagtctcatatcaaagaaacaagctccaattcatgagaatcactgtatgggaatggagaaatacgattatataatcttcaaaattggatttttaacgatacccagattttgtttttcgcttggaaagggattttcgatgttgtattattgttagtataactgatatgactgtaaaattttataatgttttaattcaaaatatttttatagttcaaattttatggcctggtctaatcataggtttaattttttttttatttatcaactgtacatttataaatttgattttatttttatcaactgtacttgggtgatctccatggtgattgcagcattttgcataattaaataacataatataactttatatactgtagtttgcctaatgaattgctccataaatttcatgagagttaagtttgaaatgtttgtgcatttctgctccttttcttgtttccattacatttttgttaaagaagtatgtatttttcctcgtgtctaaacatggattcttctttttcttacctctatcaaacaggagatgaaatgacccgagttttttggaaatcaattaaagacaaggtatatctatttcttgtgatgatcttagttcttaattaatcgacatcctataatgttccacagcttggtgttctgcacatttgatattgttacagcttagtagtgattccctcttttcttgtttcatagcttatttctccttttgtggagttggatatcaagtactttgaccttggtctcccaaaccgagatgccaccaatgataaagtcacggtcgaaagtgctgaagctactcttaagtaagttctgtatcttagtcttctaggtttctatcttaatctcaaacattctgaataagtaaaatgtaatccaacctggtattaatattttgcttattatgctacgaaatcgttttgtcttgcttatgctctttctgtctggcgtaatttttaatcatttcatctgtgtaggtacaatgtagcaattaagtgtgcaactattactccaggtggctttcctaacctagctaggatcatgaatgtagattacttggcttaaaaactgtttgaaattcttgactaaaggtacgtaaatggcattttgatatgacagatgaaggacgtatgaaggagtttaacttgaaacaaatgtggagaagtccaaatgggacaatacgaaacattttaaatggtcactgaaattaccctgatgcctgattgttatatgtttcgcatgaattttctgggaattgaactgattgtgcctagtatgtgcatttgttgtgtacaacaggtactgtatttagagaaccaatcatctgcagaaacattcctcgccttgtctctggtatggtgatgtgtgttcttctcatttcagctcagttctcatcatacaacgagggctgatttctttttctctttattgtctgattctcaggatggaacaaaccaatttgcattggaagacatgcttttggtgatcagtacagggctactgatatcattattaaaggacctggaaaagtaaaattggtttatggtaatttccactttttattggacttgcagacttgtgtcaagataatatgctgctgtttttgttccggttcctaataatattatctatcatttgttactaattatcaattgctatcacaaaaattatagaacctagtaatggaaccgaagtgaagaaagagatggaagttttcaactttactggtgcaggaggtgtagcattagccatgtataataccgatgaggttcaaaccaactttttttcacttttacttcaagagggtgtgtccgtaaataatttacaagatttattaaattttaattattttcatgtttccaaatgataaacagtctatccatgcttttgctgaggcttcaatgaacactgcctaccaaaagaaatggcccctttaccttagcactaagaataccattcttaagaaatatgatggaaggtcagctatttgttactacaagtacactatgaatctatgatacattgtcaacctcttactcttttttgtctcccctacttttgtgaagatttaaggacattttccaggaagtatatgaaaatgactggagatccaagtttgaagctgcaggaatatggttatgtacccttgcaagcatcctggtggttgttttacttactttgttttcagtaatttcactgataatatgattggacagtgtaggtacgaacaccgtctcattgatgatatggttgcttatgctcttaaaagtgatggtggctatgtttgggcatgcaaaaattatgatggcgatgtacagagtgatttcttagctcaaggtctgtatttattgtggtagttctctggcttacaattatctttcaaagtttacttctgattcttttggaattgtattgagctaaggtagcatttggttgggaagaataaaaatataggaatgggaatgggaatgagaatggtaataggaatggaatggaatggaataaaatttaaaattcatcaaaaaaaaattataaaaaaattat

SEQ ID NO: 112798 - DNA, 3940 bp, Cannabis sativa
acaaagtaactaacataatcctaacaatgaataaaaaaatcacaacttagctaacttggtcattattgtaaattaaatacaaaaaatgtatattattgaaaaataccctattatttttatattgtttggatgctattttcctattattttatgtgattttcttattttcgtgttctcttataaaatatcataaaaatgcaaaataaaacatttgaatgtaaaagtgtacaaattttaccaaaatactactttgtgtaaattttccaaattttatagcatatttgaatcaaacatttttatattgcctgccaaataggaaagtagaacgttttccaagtgtgatcaccaatttaatttaacattgtaatagtgctatgaaagtgaacgtttatttctatgattaacagcattcgattttctattaatggttttaaggtacaaaactttgcacgagtgaccaataatgggtcaaacgtctctaatataacttacaactacaactgcctaaacgtttgttactaatataagttaattgccaggtctagtatagcttctacttggcgaatggctcgttgtttctcttgttgcttcattttgtttgctactgattcaggatcaagtccttgtgcagtttctgtttctctctgttcggttctcacctctcgtagcagtgcatccacctctctcacaaagtcgactctcagaagggcatcatcagaatcgagtggtggtcgtagaggcccttgatgctgattgaagagggcagaaacaaaattcaaaaaaacagatagttagctttcgatgtgactactttcaagatgagagctatgtttttcatttcttccacaaataggactgaatatatatatgttttagagcatgttgcgaacggggtaaataagcaaaacactaacagagttctgtagttttttgctttacttcataccgtatcgatgtcaaatcctgcaggaacaaggatgctaaatggatcctcttgtgggaaagtgtctgccatgagcttcttacattctttcaaccacacttcatcgtcaaacccatcatgcatatttaaaagatcgttgagcagtctcatggcaggagttgcctcccttttcaaaatttctgtctaaaataccaagtaacattcaaggttttaataccaagtaaaattcaaggtttttagttaaacagtaattagaagaaaacaaatcaaatagaaggatatagattcttaaaggaagagaaaaatgaaataaggaagtgtaaggctaaactctatctggtgcatgtcattactagtataaagagagcaaccactcctacctcaactcttctgtacagcagatcaagacttctaatagcatccttttcctcctgcaaaaagacactttaatgtgaataatccacacaagaaattactaatgagcagtgcatttctttatgattcttaacctgttaccttttccattcaaaatatttgaaatctccaattgtaaggtttaagataatacatctttagatttgttgtcaattttttcttttttaaaaggttttaaagatcttaaaattaaaaagtaaaataaaatacaactacaattggtacataacatctgaaaagcttattttattgagagaaatacacttcgacacacacttacatcacgtcgagcaagatcaaggcgattccatatgaccattagaacaagctcagtaagttctcctttctcagctgcctcctcgattttctgcagagattatgaagataaatgaccaacaataagagttaaagataactaattatttatcaaaacgataaatgttctataaatccaagcaggagatgcagagggtgttattaaactcatgctgcttcttttcagttgcaagattattcatagccagaagtgctactaatgctaaccctttattacttttgcttgttttagagctcgttaatagacttaaggaccagaatcagcttgaagcttctcgcaccaaaatattagttggaatgaggaaggggtttgacaaatactaacatatatccatcacagtgaaaacaagtcttaatgagtagccaattggacttttgtaacaaaagtgccaattgaatttaatttaaattgctcaaattgtccatcagcttactcttaaagatctggaaaagcaagatcatgagtagcacaaaggaattgaggaaactaataaagaatacatcactattttccaggcctacgttcaaagaaactatagtgtatcttatctccgtggcatattgtatttgattacctcttccacttcttcagcagctcgaattaagctagaaaccaatattcgagcattgcgtacatcttcttctggatacccctttaaccgcaagccaatttcacggtactcttcaactttcctttcttcttcttcctgttcctcttgacgttttcggtgcagttcctttgttttctccctctgtcgggcttgccattcctaaccaaacaagattaaactctaataatctaccatttggtacataggataatgaaacaaatcatatactaataaatgaacatacgcaacatagttaatagagctaacaacagaagacttatttttataataataaaacaaaatcacttcataccacaattaagtaccctatcaacatttttttttcatttcaaaatatataaatataaacaaattgatcaaactaaaatcttctttcaccattttaaagtttcagaaatagtttataaaagagactcacttacatcatcgtagtactccttgggaagcccttctaggagtggctcatccttgctcacacacctctttaaatctggcaattaaaatgcagaaagcaaatcatatataactacaaaaatatatctattatatgttatgtatgtagaaaatagagtaagctaagtcatgtaagtttaagctagctatgagtgacagcagggactaacctactcggggttgagagttgagcttaacagacgaaagggaaattgagagaggtagtcgtgtgacgatcggtgaacataccagcggtgagcaagtgagccagagcaacttgcactccatttttgtctgattttaggagaaaaatacatacaacaaaaaattaggaaaaagacttccttgtgtagaataatgaagttaaaacataaaaatttcagtataaaagcaaacaaaaacacatggcgtcttctagtagtatagtagcaattaagacccatatccaagttcgcaaacagtcgtacatgaccaatttgaattgactaatacaaaatgataaatgaacaaaagagagaagggtagtcgacgtcgacccaccaggaggcaatcggcgacggcgtggcagttggaggttagaggttggggaagagaagggcgaactgagtggagctgtgactattggtgaatacactggatggcatggagattggagaagagatggtggtactggtactgagactgatagaaagaaatttagattttaatggcacaagataaagaaaagtttatgttaaattagtggacaaatagattttggttgaacttacaagaatagcagtcttttcaaaggttgttttgtttagattaattagggtacaatgcatttatcaaaaaaaaataaattagggtccaatgccatatttgtttcaaaaataccacaaaaagaaatgttggttttctacatgattcttgaaagtgaaggaaaaacaaacactagggaatcttttgaataataaatggaagtttttttaagagaaggaaatatatgatagaaaaatatgttatttttccaaagaaaaacacttaagggtatgattttcttcttaagccaaggtgaacatcgatagtttatcttaagccaaggtgaacatcgatagtttaatgggaaattatactaaatggccccaaatcataggag

SEQ ID NO: 112799 - DNA, 5914 bp, Cannabis sativa
ctctctctctctctctctgtttgtgtgagtgtggtggacaaccggaccacactctaatctcgataattattcactccaataatgggtaagtttttttctaacaatttcttaaacattgggaattgtatgtagtttgttttcgttatatgtgtggtgcttatttgcactggtgttattttgctatttttttgtctgaaataccgagatttgattttctcgcagttgctggcttttttatggtttatcgatagtatatcgatatattttgactgataatcaagacaaggtcaggaagaccattatcaatagtatgttgatagtttctagatagtttatcgataatttgccaaaatcaagttttagcatgaattaccgattgtatatcgatagtatgtcgataattttttaaaactagtttttcacattaattgtcgatggtatattgatggtttgtcgattgaataccgataattttgtctaattttcaatttctcagcttcacgcttgtgtatcgacatgtttatcgattggatatcaaagggatgtcgattgtttatcgacatgtctttcccttaaatattgaaaaaaatgactgacacaagtaaaactttaaaatataatctttattcagcctaatttaatcataattgtattaatttcctttaaaacttaagatttcactgttcacattcaaaaatacattttttctaataccacttaatcatacatttaattaatattaattaattcaattaagtattataacataatacttccctatttattatttaaatagataatcttctaattattataccattcaatttattataaaaaccattcatattaatatcttcctatacaactaataaggcaataacctcaatacttaattagcatttacttcccatttatttcaatatcttcccaaaaataaaataaaacaaaattttctaaattcactattaatgtccccacttccaattaattacaaaatctccacatttataccaaaattaatattatgttatctataataaaactcatatttattgttatttgtaatttctaaaaattggaataaggagaattaactaataatcaccttccgatttgaatattatggtttaattgtttccttatttattgattatataactaatattagagccctcctaattattattgttactcaatttacttaattaattttcatattatatccttagagattgattactattaattttttaaaacttccccctacttacaaattgatagatctcaatccatcttaattaaagattagtcaaacaaatctattaccatttaaatctttaatcttcttaaataatacacaaatttctttaaatatttccttaaatcatgccaagtcaaccattttattataacacaatagtaaaatttgaactgcaaacacttattaactttaaattttataacatttttacaattcatgatatcttgaaattttaactaaattaacctaaataattaggggtcagtcatatattaagcgcgaaagccttaaaagacaccaaagctataaacaattgcacaactcatctatcaaattggtactttcatttctttaaccaaagacacatcacaactgcctcaagaaagctaataccactcaaccaaaagttctttaaacttcgctatctttacctgcttacccccttaaccaactacaagatgcgatattaagctagagttgtgaataaataccaatagttatatttaaatacactagctaatagttatatacgatatgtaattgtatttaaatacactaatagttatatttgagattttaattttattttttatttcaatagtgcatcttatttttaattaatagtttttattatattaaagaatttaattgtgtttcaaatacttttatctctatttctttaattagaataattctatttatgaatatgatgggtatgctattttatttgtttttgttatattatgttattttacggcataagttttgctttgttttatttggtgaaaatgtataaatatgaagaatttctataccacatcttgaattatttgtagcagaaaagtttttttttaaattttttttaattattattattgtggatattactttaatatatattactattttaatatgctgattcacttttatttattttataaggaggctcccagttacttaaatttactatgataatagtgttagatgatcgaattcgatctcaacaggagaatcggtataacatatagtttttctctactttttttttttttttcaagattgatagtttatatcaataaaaaaaaaaagattgacaattaaatttagtattagtttatttactaatttttgtaaggctttcttaatttatatttgtaattatgaattattagctgtgtatacacttagctatataatgaattagttcaaaagtattttccatcttttttttattgatgttctattcatatggttttttgaaatgtttgtatattattaaaaaaaaataaaaacaaagtgaaagttttaagaattatactataattttactcaaatatttgagagtggcttgaagtttgtgacaactttgacgaatgcttgcataagaaatcttcacatgcctccacttccaagttggcacaatacgtgtcaaataaatatatacgtggatgagtatgagcttaccacgtggatcatcatcatcaatatataatataggtcccaccgaaaatatctcatcagagttgtagaaccgcgcgccttggcttgcagccaaacctgtgggcttgtattatgtaagcccagcccagcccagcccatgcatcatcacggataagatcaaacgctgaacataccatgcaacttacttcgagtaataatgaagccgaaaaaaagagaaataaagggcacccagttggctagtactttgttatgtgttagtattgctatttgtctaattaagtataattaagtatcgaatcctatataatttaatataataatttttagagagtattgctaaccaatcgtaacatgatatttcgagaaggtgctaaacaccactagtgtcttataacaatgctccgaaaaaaaatacaaatcattattttaaaaagtaatattacatcactctatcatctcctacttttaatgttataattttggatgttgcacatattatttattattattttttctttgttatgagatattgcacatattattatttgtattatacatttaggtttcattataaatttaggaaaattttatagtaccaaatttattttttatttttattttattggtaaaaattccttttcagtatatagagaattttataatttaatttttatataaactatattatagttataccatacattatatttgctagcttttacaaaatttacaaatgtcaaaaatacaattcaaattaattagttagacgcaaataaaaaaaattaaaaaacattcaactaactattaaaatttatttttaacattgtgaaaattttaaatttttttaaagtctaataaaatacatcctataattataatatatgtctttatataaaaacatttttaccaataaaacaaaataaatgtctctactatagttgtatttaattcattatgtaaaaagacattataacaatttagttgatgaaacagtatattagttttggggaatttttctatataatattttttaatttttttttttttagatttacagttcggattgttataagagttattttaataaattttataatatagattttagttacaatttaaaattattctgtaggtatataaatttttataaaaaaatattttaaaatataaaaataaaaaacttaaaaataattttatagcatttcaaataataaaaataagtacataatacataattcagaaaaaaaaagtacataataaacaaatgagatttctcgaatatataaaataaaatacaaaaataaaaaagatacttgctaaagaaaatgaaacagtaacatatgaattatcaaaacaaaataaaaaataataaagaaactaaaggacaagaaaatgaaagatgaccaccaacttatatatatatatatatatataataatacacatccaaacatgtatctatagtatatataggtccaccgtcgtagaagcactactatatagctacatacttattacataataatttctcatcatcaaaagcagtttggaagaagaagagaatatatacacataaatatatatatacaagtgttcatacttatatcattaacttctgtggaataagtacttttgatcaaatgggttcactaatgtcaggttgggactcacctgttttcgcttctaaatcaggtacaaagttagatatttaataatttagtaattctgtttttccttccttttaagtatatatatcatgtattgtgtagttcttttagtttgaaagttaaaagtaatttaattaatggagagccacatgaatgttatggtctcattctcagaaacaaataagcgaaatcggaatcggtcactgactaaagaagatattgaagctttttggagaacaaagaataaaacagtagaagaacaccttaaagacctctcagaggccaaacaacatcgtcaggtattttcatttacatatttaattatctctgtatctgtttaattttataaataaataaataatatgtttctcatttattatctataatagaaaattgacaaatttgagaaagacgactactctggaaaaaagtctcaggtgaaatcaagctctttgtctctacacagcctaaaagtggatgtggatagtgagacaagcattgaaaatcatatcaagaaaaatggctggtaaattagaaatatttaattttatatccatctatctaatcctaaattaattacttaattattaatctttggatacatatatatatacataaggtggactagaagtaactgggcatttcttaatgaaccactggcatctgaagctgaaggacctcccaacacttacgtgtcacagttccacgtggctacctagtaaagacccttttccagttatggaatcgatttgcgatcgccacgaaagtagttaaatattaattgtaatatatttcacttaaatttcacgtactagtacgtagtactacacgttattacgtgttataatctataaactacttttaattatggttcgagttttaagttataatgtgggggttaaagcttaattattaatattatagaacataagatatattaagtgaagtgagtatgttgtcctgtacaaagagtaatgttgctttcttggttaaatttttaattaattaataatataaaaacatatatgtatgtataaccttatgcaacttgtctccaccaccatgtatatgtatgcagccacacacatgttaatagtaatataagctttgccaacttttagatagtataatgtaaatattattattaaaactttaattgaaagttaaaaaaacatattatctatagatggtgaaagttaattacttgactcatgatttagcatgtggttagttcgttcaaccaattaattcctatcacagctaaagtaaacagagtaaattgggatataattctcaattttttttttctttgggagataacttccaatactttcgttagcaattaaatggaaaaactctcaaaactcttgttctattagcatttaatattttttatttattttaattagcagttaaaaagattagttatctatatgcacatagtttacacgaatacagtgtgcacataatataatattattcatattactcgttcacgtaaataattatttaaaaaaattaaaaaa

SEQ ID NO: 112800 - DNA, 3427 bp, Cannabis sativa
  modified_base (1015)..(1025): a, c, t, g, unknown or other
acgggactactgactgtcacaggcagccggtattttggaaagcgcttccacaatattttagcctttttgtatttacctcttacacctttttgttttttgaagagttgtcatttagtgtagacatattatatagggcaaatactattttgaaccctgtgatttgcaaaagttaccaattggaccatttgtttcgataaatggcaaaatagaccatgtattttccaaaattgtacaaataggactctgaactgattttttatcaaaataaaacttattaataatctgatctaaagatgttatgataaaactggttacattttctgtatttgttcgtacgtattagaaattttcttaaagttgattatattcaggggcagagccaggatgagatgattgggggggccaaactatatattaaaagaagtattaaaaatttccaaataaataattaaattcataataactaaaactaaaatacaaatcatctctcttgcatatcacggaagacatctataagtgaatcaatactaaagctcacaaaaatggtggctggcgactggtgtgactatggctaagtttggtttgaaatttaaacgaaatagaaaaataatatacaagtagttttaaattttttaatcaacttttaatatgggcagtattactactactaaccatatatattattataattattaaaagaaaaagaaaaataatataacaaaaaggaacaaacttactttaaagtttgactttttcttagaaggggccacttataagagttaccaaaacaaaatacaattacctaaatagaaaattttagaaaacaacatcaatataattgggttttagggggccagggccacccttaagctctacctccctccgcccctgattatattaaaaaataaaattgctaaaaattgagatgagggtcctatttttactattttagaaaatataggatttattttgtcattaaacaaaatagagaatctaattagtaacttttgcaaannnnnnnnnnnaaaatagtatttaccttattatatataaagaatatattttcagatttaaaataaacctattcacaacatattaaataagaacatatgtgattgttattcttattaaaatatcattacaattacaattcattatcatcatcatcatcagttacatataaactattatcatcattatcattttctaattctaagcaattgtcgtcttggtcatttagactctcattatcgtcattgatattgaaatcatctaactgatgttgagattccgaattcacaccatggatgtttgcaactccagtgacatcgtgacagacatggggggtctttgccttcggttttttcggaccccttctgctacggctgtaacgcctatagttacaaatttctccaaagctaattaaagctaaaggaaaaaaaaaataatcgtagttaaaggtcgtttgtgtagtagtgatatgataacagttttgtgtctaccctccattaatttacgcttaattatttattggtagtgttggataatggtgataatatacaaagttcaattaatttgtgtttctttgtagcccaatcattcccgctgttaagggtttgccttttgttgaacagaatatatcagctttataccatatttatctgttcttttactgaacagagaatatcttctccattactcctcatgcacattaattagttaccgttgtatttgtatatatatttaatccatgagaattcttttgtaactgatagcgacccaaaggtacttttctttgttttttattatttacatatgtacatataacaagtacgatatgagtttttaatgatttaaaaaattcacttataaagtttaaaaagaatttttttttaaaaaaaatgaaagatttcctataaaattttctacaattttaattttaaagttaaatggttgaaaacatctatatatatgtgagattcccatatagtgcgatgctcttcaaaaaaacataaatgggaaagaatcgagaaacacatgtatagatgctcaaatagttgataaaagtgaaaaaaattcaagcattgctatattgggagcgagaggtgcttaataacttttgatattttgccatgtgatttctaaaagttattacattaaattttataagactcaatacttaattgaaccaatggcgatattcatacataaaaaaatgctaagcatgtactactgacacagtgtcgtcttaaatattttagaggctttgttcttattttaaaaattggcccctacaaaaaaatacaatttataaataatattttttaatattatcataggcttatatattttacaaaataccaaaaaactccaattaatttataaaaattgttattaattacaatacaacaaaaaaaaaataatagaaaaaaaaatgaaaagtttggaaaaaaataatataaagcaacaatgaatttttattttttacttaaaagcaataatagaaatgaaaatggattttaaaaatcgacataaaaataatcaatgatacgttgttagctctttaaaaacttgagttcattaaaaaaattgaagagcattaaaaaaaatatattaggtcctttatttttttttagccttttaatttttggggcctctgcaatagcctaacttgcaccaccctataagagccgtccctgaccactgatgccttttagcatttctgataaaatatatatagtagggacatataacttacacccctcattactgaaaatcagatcactatagagtaaaatcatgatgagaagtagtgatatttctgttgaaccttctcctaaactaatcctttacctttacctttacctcctcctctgcttgcaacttggttctgaattcaagtacactcaaacggcacatgctcgacgcccgtttccgaatgatcatgagggtacgtacgtacgtatatatctctattaatttatacaaagagatattaaatttgtatattttactttttctttttcgtgaaggttgtaatttattaaatttttatgagatttttttgcatatatataaaaccttaatattttttttttgctatataaacacttattaatattacatattcttgttttgtttttaagtataaaccttaatattaaattataaagggtaagtctaaggttatcatgttttgttatatatcctcgatcttatttgattttgcattgagaaaagttttttatatatttttttaataatcttgtactttataaatttttaaaaaattacaaatagatcttattgtgcacatatatagctaattagttgaaatttttgccatgcagtaaaggctttcataacagtagcatgttagatcaattaacaattaacccaagatctatttgtatataacatagaacac

SEQ ID NO: 112801 - DNA, 4681 bp, Cannabis sativa
  modified_base (1014)..(1014): a, c, t, g, unknown or other
cgacctgcggttttgtaatcatagttacaatcgtgtctgtctgtgtaccgatgttcagcgcagaaaagttcaccacaccgacaccgaaaaccagtcaaaccgactttcctccgacaaccggagcatcgatttacaactcgctttgcagaaaccggttcgtctgatctggagctatccgccgtcgttttacgactatattcagctgtaaaacaatcagatctctctgaaaaccgagtaattttctcagctgaaaatttcaaattcaccgtcgatgcagaaacagaagacgtcgtcgttacagtagccgatgaagaagaagacgatgaggttgacgcgttaaaacacttctgacacatattgtttgtagccggatttcctgtaacgccgcagttgttgacgcagagagttatggtttcgtgaaccttgaactccgtctcttccttctccgttctctgagccatatcttttgattctgaatccgatttttctcaaacttctcacaaaattcttctcagatcaaaagaaaaaaacttggagattgaaagaaagaagagaaaagagagagagagaaggaattgaaaggaggaaagagagagaggcgtgggttttgggcgtatgagagagagagagaaatggggatttgaagaggttgagttgagaggtcggtaattggcaatggaatatgggcctcatagagacgcgtatccaacatatttttgtttcctacttttaccaaattacccttcctactttttttttcctttcttaattattattaattaaatattaattaatttctttgtcaaaaaaagaaaaaatatataatttattattttttttcttaagaatttaaatttaatttgtttaggaagaaaaaatataatatagatttaggggtgaatttttttggctaattagatttttaccctttaaattttaacgtgtactgtatcatattttttgaacttttctggtcgttaaaatttttttctgaagtattgagattgttagatntaaggacttttatctaatttcatccaattttattatttcagtgattatttatgtactaaactatgctctccagactttgatatctaccaaatcatctccctcgaactttgacatgtactaaatcatgccccttaactttcatccatattaaatttttttactaaaattggacagaagtccttaaatctaataatttcaatagtgtatatatcaaagtttggggagcaaaaatcttaattaaccattttttttttcaatttaaagtagaggtaattctaggatagatttctatttataagagttatttattttttttatgattgtgtattttcttattattaaataaatattaattttaattctttgttaaaaaacatataaatttaaattttttaaaagaaaaagtataagatttggtattttattaactttttagcttaatatttttttataattgtatatattttaattttttttacttttactcaattattcttcttacttttttaaaaaatatattattaattttgatatttacaagagattttagtttaattttttatagttattttaaaaaaaattaaataatttatcgtattaaaaataaaattaaaatattttattctacatataattattttagtaattatttaaatattatttttaatattataaattatttaaaattttcaaaaaatttacagaatatctttaaaaaacttaaaaaaatttatcaaaatagattcgaagtgaacttgataaagtttagatttttattaaattttatatttttatatataatatgatcttctagagtggatatgacgtggcaatcgtcattattgaggtgggaaaagatagaataaatgggaccggattaattgaggtggccatgagaatgaaacttaacttagccgtctaattaattcaattaaaattaaaattaaaattaaaaatctcttggttttgacaatgtcgtaaaagtcaaaccacctcttaattctcttcttttattctaattatgtaattatgacaccattagattagttaagtggataatacaatatattaattacaggtttatgtaataaccaatacaacatcctctctctctccaatcttatttgttttattaactaaaataatacaaatttaaatatactaaaattcatacactttaaaatacttatccctaattcacatgtaaatctatttatataatattaatcaatatatattttcagtttaaatttcaataaatcactatatttagaataatttgtatcataaatatttaaatttagtaaattgtcacaagtaattcttaattggtcaaatcattaaatttttattttaaaaaaaaattattataatataccaataaaaaaatgtcaagtagataatagcatcatatttaatggtaaaatatctataaaatttcaaaattcgtaaaaaattaaatttaaatattatttgacgcaaatgaattatataattatatataaaaaattaaatatataagtgagataatcaatttaagtaactatttatcaaattttgatatataatataaaattagaaattttcatttttttccgagacattggatacttttatatagaccgaaaagaaaattaaatcaaattaaataaattgtgtaattcactaattattggtgcatatataacgaatatttaatactaataattacaaataaaataagatgtagccaaaaactcaaacatcatgacaaataaatttattccttaaattatattaattaggtgggataaagaaaggaaaagaaaaaaaaaataatagaattattataatttttaaaattttagtgaaaataaaaataaaaatagtgcaattgaatcaatcacatcatgataacgtgggtagagggacatgattaaattttattataaagaaaaataaataataataataataaaaaaataataatcaacgcggcggtgggtaaggtagagagagagagaaagaaggggcaaaatggtaaattaacctgagccaacaaaagaaaaggggaagaactagttgagggttgtgacgtgagatgaggcagggcttttttggccgccccatctgaccaccgttgtagtaaaattacgaatttaccccacaacttgtttatttttaaatatttttgtttttaatgtttctttttcagcctcaccgtattgaacacgtgtacgtcacacgcgtcttcccatgcagctgactcctgtctcctttcgtttctaatctctaatctaattttaattactaacaacttaattgttaattaataaagtaatttatagtataaatatttaaatttattttaaattataattaaatatttttccttcaaaaaaataattaaatatttaaatttaatttttaacaataataatattaaattacaacttaaattaaattaacacataacaatcttagtttaagtcatgtattttttttaaaaaataaatataccaataaaaaaataagatatgaataatgacttcatatttaacggctaattacctataaaatttctaaaatataacttagatattattaccgtcaaaaaattaaatttatgaatttatttgtaatcgagagttaaatttatatatttacgacgtaaattattctaactaatattaaaggagtctgaattacaatttcttaattaattttttcagtattcgttatagttataatattaattttgtaattttttctaaaaaaataaatttaatatacatgttaaaaaaaaatcaaatttatttttcacacttttaaattattttagaaaaaattataatttatatgaataatattataagtataataaatattactataaaataattctaacatatattgttctcttcttaatgttaattaataattaattattattggtttacgtgactcaatttgccaatttcgaaaccaaataacaaatggggaaaaatcatcctctttcaagtttcaactttagtttacctctcaccacttgccccaagttgataatgttttaccaaataaaaattatatgttgtttattatcatgcttcatttgtttgttgtatatataatataattatagtatagcctgacaattttgttacatgcttatctacattattattgtctctttctatttctttttttatttttaaatttcattacatagtgtgtatatatttgttaatgaaataaggaaatatattttgaaaaaaaaaaaaatggattctctccataataaataaggaataacaaaaagtatgtgcccaaacttttacgtgcttatgatagaaaatttcaataataatttgatatttacaaaaataataaaattaattacatctttaccaatttttctaataatacttatcttaaagtatatgaaaattgatttttaatatttcttcaacattatcatcaaataatatttattacatttttttattatttaatattttatttatgtacgaataattttcataacatgtataactaactcacttaccactaggactcacactaaatacttatttttaatagggaattttgattttatatacttacaaaattaaaaaaatttattattataccaaaaatttaaactctaaaaaaattatacttttttttc

SEQ ID NO: 112802 - DNA, 7472 bp, Cannabis sativa
atatacatatttatatatgttctgaacataatagaatttatacattaatataataatgaaataaatcatgtgaactatgcaacatagaatgtgctttttgatctaatattaattagaaaacctgatttattgaattgggtttcatttagggcacaaaatccaatatagacctagtaaagcgttgggtgaattttctcatttgtatttgatgcaaatatgtaggaaatgtaactcgaccaactttttatgtggtggccgaccactgccactccattatggcagtggtctctaattttggggagcactgccatttccttatggcagtggtcgaccaagtagtttttttaccacttggtggcttttttttacttagttttgacatattattgatgaaaatgtattgttggcaaagaatcttacttccctccctcttagccgacctttgccactccacaatggcagtggtctccaacactagggagcactaccattcccttatggcagaggtcacctaaggtgattcctaggtaggaaatgatttttctcacttttttttattccttcgtgtcgagggaaccagttcatttccttccatggtttgcaaggagtgacctctaccactctactatggcagtggtctccaaaactggagagcactgccattttcttgtggcactggtcacttattcctcttttcttgtggttttagtgctatttttactttatgcataaacccaagttattttcatgtccaaacaagtcaataacttattggtttccttggcggattgagttctctagggtgaaaacgctcgagcgggtccatgaaccctagtttaagcacacttgggtgtgtgagtccaagcaccaaatagttggttgacatttttgagccctctagaagtgccatggggccctcaagaaggatgtcttgatttatttgacatttatgagtcttggtcaaagtcgcaaggttgacttttttcaattttttaaaaatcgtgtataacaattttttttaaaataaaagtattttttataagaatctaatttttttagcgaataagaaataatttttatttttcaaattttattttgtaaaataactttttataatttttttaataattaaattaggtgtaccattataaatgcgatatgtgtttaaaattgtacacataagcagctatgttggcagttaaaagaagtaaatggatgacaccttaaatttgctaacggttcaatagtttggcaggtttcaccgtcaaaatttgagcttggaaggttaaatgcaagtaaaatgttagtttggagtgttcaactgcaaaataaactctattttttatttaataaaaatggtctacaagaccctgtttatgagacattgcaactgcaataatgattgatattctggctttgtttagtttgatggtgaatatggagtcttctagtgaatatgactaataagttggaggttaaggttgaggaggaatgggaggagaataagaaagcagcaaatgagtttggtgaacaaactctcttgcgcagggtggtagcaaaacacaaaatgaatgagaaattaattcagagtatatttaaaaaaaaatgttgaagacggtagtgaactagaaggctaaagttattgatgagaaggggggtaaagatgttttcaagataaattttaattctcgaagtgatgccaaatgagtgctagacaaacaaccattatttttcaattggggaatactcacaatggaagagtggccattgacagagaattggaaagatgcaaagttagaaaaattattttattgggtacgaatcagaggctttccattagagtcttttatgctgaacaatgttaaactaattagagcgatgactggagaggttgcagaggataggtggagtaactcgcaacaaatcctacttagcagttatgttcgtattcgtattggttttacaataaaggaaagcatttttgtgggatgattcattccgtcaggggagagaaaagtgtggatacaattcaaatttgatcgcattccactactttgttaccgatgcaaaatctggggtcatgaacaaagtgactgtgaacgggaagaagtcatggaggtggatgaaatggggagacgagttccaaactatgagaattggctaaaggatgatgaagatgaagagagaaaaagaaagggaaagagaatttctaactattttattccaatagagtgactcctatttattaaaaaatagctaaaagaatacaaaagtaaattaataaaataaggaaaaattacgacaaaagttcttaaaaagtttactttgatgcagataagttctcaatctcaaaaaatagcgacaataatagtccctaagatcgagactcttgtaagtctgttggtcatctttctaacaaatcttttatttttggcctccttaaaatgtcatgtgttgatattaaattacgacataagtctctaaaaagtttattttgatgcagataagtctctaatcttgaaaaattgtgacaacaacccccaactcaaggatcactttagtccatagttacctaatttacactacagaaaaacttattttaagtgacaataaaacttgtgactaaaagtgaaaaagttgagactaaaagtcacatttagtcacaataaaattatgttatggctaaaaagttgtgactaaaaatagcttttttttttttttgtagtgttaactactccatttgttgttccaaagaatctggtgtgttataaataaataaataattttaaaaactaattaattaacaattttttttttatctttcttcttcttctagttcattcccagcctaacatctcaagctctgatctgttttattaaaactctccaatttgtattagtaagaggggttgctctaaaaaaatctaagtaaagtttgagcaaaagaagccaagataaaaaaaatgatcaccaaaacccaccatccaccggagatggggactggcggaatagattcagggagaaggtcggagcaaggtgcagctatttaagattttttttgcttaattacttttgtaggttttctgcatgagatcgtgggatgggacaaggaagaaagtggagatgaagggatgatacttgtcggcggcaagcctccaccacacagaagggtgggtgacgaattgtagaagctttttttttttatatatatatatatataatgttttttaatctttaataaaagaaaataaaaaaaaataaaaaagttttacataatttttttattatttaaataatttttatgttctgaactaataaactttttgacacgtgaaaattttaagaactacaaatagagctgttaaattgggtacctacaaactaacgagaatatcaagcttagggactataaccaatttttttttttagaataggacttatctgcatcaaagtaaattttttggggacttataccgcaatttaatatcaacacgtgatattttaaggtgaattaatggatctgttaaaaagaggccggaccaacggacttacaagaattttgagcttaaggactattatcgctatttttcaatattgaagacttatctgcatcaaaataaaatttttgaaaattttactgcaattttctcataaaataaaaggagatacaatgatattgatctgagtgatttagacatgttataatattcataatatatacttacacatttttttattttacccatttaaaatctttattaattttcaataaagtttttcattataaaaaaatattaatttgataccttttaatataataatatttaaggtagataaaagcataagtacctaaagtacttttaagtttttaagtgacataaatctaatgtttatttttagcgacataaatattcaataattataaaactgtaatttttctctaattttatcagtacagactctattattgtctcaaacaaggtacatataagacccagattctaaatcattggatctagacagaatcatgtagtatcaattatttcgaaatatttttttttaaataaattcaaaatgaaatctgtactaacgaaactaaaggaaaattacaattttacaagagcattgctattgggcaccagtgtgcctaacacccttagttaagacgagacgtcttgtgattggctagcgatactccctaaaaggtattatattaaactatatgagaccacatacttaattagaccaatagcgatattgacacataagaaggtgtttagcaccactcatgctttttaacatttctcattttacaaatattagatacctatgctagttattacaaacttaaaattttgttacttataccactatttatcttaatatttatagcttaaaataattgaaagagagttgtagcaataatttacttaaagttcagctatacacaccataaacagattcacattacattcccaataaaaaccttttacacaactagtgccgccggctaagcaaaaggactacaacacttacgaaaatgacttcaaagcgacatccattcatattcatccaaaattaatgccacgtgatatcctaaatcagaattctatagcacaaaggaaaaaaagaaaatgaaagaaaaaaacatgcacaaacacacacacatatttatatatatatatatatataacttcataaccatccctgtagtgaagctagaactagaagtggaaatcagtacatgctactggaagaaaatgagtcagacaaaagaaacttgatttcgtcatcttcttcttcctccaaatcagtagtactacaataatccatcgtcgtcgtggtcgtcgtaatcatctttctctttttatagttgtttttgaaacaagcttgtcttagcctctttgtgccttcattaagctcaacatcgggaacttcctccactaacttcttctctctctccaacaactctatgtactttttataccttgaatcgttttcttcattattactttctccattcctcaaatcctaatttatcatgcatcattagtcataaaatcttgaacttcatatatcataattatataattattaataatgaactgaaaataaacatatatatatatatatatatgcatggcagcatgggaatatttatacatatgggggcatggtacctgaacattttttatgagggtttggaggctcataagctttctatgaggccaacgtctaatacccaattctctacaccttttcttgagaagagtcaatcctacgttaagctctttagctgcttgggttataggcatgtaataatactttgacaatacttccttagataacctttttgaactgctcttctcttctgatattaccaatactgatgatgatctatacggcctcttattattcaccttcctctcttcctttattattatgtcctttccttttccatcatgattatctccatagttactttcacgacgatcaatattatcattgcacattaatgataatggcttctcaccaacccgatgatgatcactagtagtaatattgggttgatcatacccaagaagcccaaactcatcccatactccgaacccaataattccattattatcgttatataaaaactcatctgcaacgagtcacaaccacaaaaaatgagtaaaaatatttattattatttaagaaaagatctttgtgtatattaatggtagaaagttttgccatcaccttggatgggatcaaatccgactactgttgtgggataatattccattaaaggaatgggatcataaagatagctttgatcttgtaaatattgataatgatcatcttgttgccgataattatattcccaactactataaaagtatgaatctgatccactgaaataatgttaaaaacaacaaatatttacgattaatttttaaacatcatatgttcaaccaaaaagtttcaagctaatcagtataaaattaattatttatttattttaagcacagtaacaataataataacagtacatacccgaataaattatgaagatcatcagaagagtagaggtattccgttgaaaatggaaatggattttcgtcaatggaaagcatttcatagttagaccagtagacactccccattatatattagagcactctctagcactctctttatatattagaccaagtcaaggtaaattggataatgaacaattatatataagtacttatatatttgaggaagaaaaagagtctcttcaatatactatatatatgtatatatctattatgctatattatatatgtagataaattaatatgaactgtggtaagtaaaaaaaatatattttgggagaatgtgcgccgtcagaatcccatgcatggctgaataaggataatttattgtacttgtgagagttacaaaaaaattaaattaacaatttagtattattattattattccaataaaattctaagaaaagagagctgccaaaaacggagcgagaatgtgggaatttaattgcttgttctctcttaaatcatttgatttaaaaaaataaagttagaaataattggaacaataaagaaactcaggaggcgaggaagtcatttagatatatatatatacatatatatataatatatataattcttagcacatcaaaataaaaacaaatgatgacaaaatatgcatcatcataaattagttcatcatcatctaaccttttttattatagctttaattaattttatagcctataggagaggctgtacaagtctgcatggctgccatgtgtaatattatcttgcaattagctcaagcattatcatcattttagctcactttttcttttttacacataattatttttttgagaaattacacataattattacactacaatatacgtgataaagacaaaagattacaacaatgactcatttttctttgattaaaatatcaggaaaaaaaaagtggagatgagtgagtggtgagtgaatgtgggatcagtatataaaatttataaatcaataactgtatatattaattatataataaaaatcagtaaatgattttatgcatgatcaaatggttttatttttatgtttatgcatgtaacgtttcaatcaatatttaacttaattataggggcgggggttaaactaataatcatttttcatttaattgaacttagtgatccacctaaaaaaaaaagtttagtgctgacttagagcatttttaatggtaatattttaataaatgtttgatgaggtgaaaagctacaagaataatataccattagacataaaaaaaaaaaaaaaaatactatttttaaaatttgtattaatgccacaaaatgacattaatcttatatttattttttttacaataaaaaaattaaaagtgtaatatctattctatataaagtgtgcctatataactgaaattcttggtttatg

SEQ ID NO: 112803 - DNA, 2085 bp, Cannabis sativa
tatgtgaatcatatcacaaagatatgtatcattcgagcttcaagagaggaataccaaaaagtttggtccgcaatcaccatggtgaggagtattggaaatgtgccagttgtaattaacttattggacctgactggtaagtgaaatatcatttggtaacatactcaagatttgcatcttgttggtgttaattgtattgctatataaataaatacttgaattcacttttatactttcttatcatttgttatggtttatgtggtgtaggaagcattaaggcatgtaaaaatgctgcactgaagtgtgaagaatcaaaatttgagcagtacaaacttgtggctggtgcttctctatcagctgttgttagcaagcagatgcaagactttattgagaaaataaaaatgttggagcattagaagttgttcatcttagcttggcaaaatgcttggtgtggcttgtatacatttactatgattacaaacatgtctcttttaggttgtgcctcaaaattcaaggacttattggcaacacttcatgtcaatgttgtctaaggcttgtaacttaaaggttctaacatctagttgatataggtaaaatggcagctttgcaaagaattgagtctccatatccttgttttctaaagtaaccggggatgggtaagtcgagtatagtcatcaatcctcaccgttatgctttcgtcagtgaggaatatacctctattggggacttacctgatgtggaatttctttttctattatagaattcaatgatagggcctaatgtaaggcttggttgggtaggcttataaaagtttattttgggttttaaaagcttagaagtcattttattttttaagggataattagataaagcatcatcattttttgtaaaaaaaaaaaaattacatatttaagtttaaagaattttttttacatttttacagttttctataaaagcaatacgaaaacaacaagaaaattatataaaagtaacatgaaaataatatttaaataacaacaaaaaataatatacaaataataaaaaattatcaacaaattaataagaaaacaacataaaaaaccgtattttctgtaaataaatttaaaaaaattataaaattatttaaaattccgtgaaatcgtatttttgtaaatttttttgttgtttttaagtatttgtgaaataatcccttattttaaatcttgattggattaactttgcacttggttatttagtcttaaaggtactttaagaagaagctaatcattggtttatttggctaagtttttatagttagaagtataagataaatataagttatttatttttgccgttggtataattattatataaagattttttttaataaaaataatttttaaagtatttggatatcattttaaaagaaaaattgtgagtaaaagatgaattatataaattattttaaatttaaaaataacttctcaaaagttattttaggagaagttgcaaatcctcacttctcccaaaatgatttttcttttttaattctaaaagctaaaaaagagcgtagagaagcttagccaaaccggtgtagctttccatatagtggtgcacatcgagcaagtttgttagatttaattttgtagtttttcctattttagactaaaataacctaaagtaaacatttctactatactatctcaaagacaaataaacaatttatactatttactagtgtcaaaaaatactatttacaatgttttttattacaaaaatatgtgagggagatgaatcccaggtgcagaaagagagagtgagacacacgtgaataatacggcaagtgagactcacacgtgagtagatggtaaagctaactcagtggctgccatgtggtaattttgatgaaattagcttgggctgctttttctcaatgcaacaattatgcaacacaaaaacgacttaataatcaaacttttaaaaaattatcaaacaataacaatattttaaaaatttcgtgtggcggtaaaattgtaaactttgactcaaaatccagtatttttgtaaaaatcctaaaaaaaaaaaaactaattagcaacacaaaaacga

SEQ ID NO: 112804 - DNA, 3111 bp, Cannabis sativa
tctctctctctctctctccctgtttccttatttttgttctaaaaaaatattaaaattagccgaatcaattgttggaactaccatgtccaccatcttgttaaggtacttttaatgttatatatatttatatcagtattttttttatttatatgtgtattgatgtatatgtatgtttatgtgtatttgtgtgtatgtatatgtttgtatgtatatgtgtatatatatttatgtgtaccaatatatatatatgcgtgtatataatatatatatgtatgttcatggttatgtgtatatatgtaataatttaattatttttagtaattttatatatgtatttgcatatgtatttgcatatgtatattagtgtatatatatatatatatctatgtatgtatttttgggtatgtgtatgtatatatttgtaaattagtgtattaaattatagttactaatttttaattttaataattttcttctttgtaaataagtttttgatgtcgttttaccagttgtgccgattaattatcgctcctcgttctatttgaaggttagtatgatttaataatatgttactttaattttaggaaatgaatatgcatattagaagagtttgaatattttatatattcatttgtaatgaagtaggttctataaattaatttactgcagggtggcaaatattaatacttatactgttttgatattgtgtttatgatttttttttttgtagatattgaaaatttaggaataatcaattttaaggtattatgctatcaaattttaaggagcataacatcttaaatttgattattatttttcaaaaatatatattattcattaagttttcataagaaataataaaagttagaatatcacactaacaatagttgtaaaatttcacaaatatttattggtagaaataatatagaaaataataagttaaataaaaaatgtataattaaaattaaaaataaattaaaattagtttaagaaatagctaaatttgatataattaaaaatgtaaaatattaaaataatttattttagtattaattgatttaagaaaaatttgttacataagtaataatttacagatattgctatctatgtctccatatgtaggacatgtggtatgaacagagagggacaactttagacagtcactagccaagtcctcctcattaagctaaaacatggagaagctttgcagatccgagaatagatcaagaccaaaggatacacggagatttttatcttactgtgccatccgggatatggaaggcttactatctctctggatccagagatgaccaggttcaaggtgtacctaagtgatacctggaagattaattgaaaagcttatcatgaacactaaccgcctaaaaaaagtcagatgtttaccatgaagagacccccagatcgttcagcgacgactatacctattctgacacaagagcaaatcttgtgccctgtgtcagaccatggtagggcacacatcccacacgtctttttgcctgaaggttagtccaagcatttactttgtaaggtgaaaccttttagcgacatgcatctagtgcacacaatggtccctacagtacagctacctttttacatgagcaaaaaccttctttggggcccaataatcaactcttttcatgtatttttatcccaatagttgggtgattgcagaaaatctagacgtctcatccgcatattcatacctgccctttagtctataaatactattctatttcctgacgaagaggggatcaaaaaaccaaatagctgaaactctaccaaatttactcccagctttctttttcttcaagaaaaactaagagggcagagttagggtttcttgcaaaacactattgtaataacattatacaagcctctcaaggccaatagacttactcgtggactaagactcattcacggctaaaccacgtaaaaacccttttcttctttactattgcattttattatttcttaagctctttattattagtttctaaaagtctcggtaaacaaataataatataaactaacacaaaatgattaatcagtaattagcaattaataagaaatataatttaatttattatataattaacttagtttagagattaattaaaaaaatttgaatttgaattgaaaataattgtaaaattttaacaaattagtaaatttaaaattaaaaattatattttcattttaacaaattggaaactttaaaataaaaaaaataattgttaattttaacaaattgaaaactttaaaatgaaaaacaaattgttaattttaacaagttagtaaatttaaaataaatatatagttgagaaataagtaaataatatttttacttagtaataattagtttacaaatcttaataattagagaaataattatttgaaattaattaagtttaatataaattttaattttaacactattcataattttgaaagggaaatttcactttttataattaataaaacacctcatatcgattttgactccccttactaatttgtaccaattaattcctttgattacacgaacttcccattttacccttttgtttttaatttaattttccctaaaattgcgagaactcattttttggagtattctgtgtgttcgtatttttcttgacaatttctcgatatattctcgataggttctcgatgcacgaaaagacctttctcgacgggttgtcgataagttcttgaaaggttcttgactcaaatatcccaaggtcagggaagacctttctcgaaggcttttcgataggttatcgaaaggttctccgctcggatgtcctaaggtcaaggaagacctttctcgaaggcttttggataggctctcgacagtttgtcgaaatggcaaatgattttgtattttcaatcatgattgagatgcgttttagcaaaaaaaaaaaaggtcattcttggcatgttatctttgcattctcgattatttgtcaatcgttttttgatggtgtgtattgttgtgttttcaaactttcttgtcccatgttattcatgatttctcgacatgttatcgactgtttctcgatgattgactgattattattttccacgattatt

SEQ ID NO: 112805 - DNA, 4616 bp, Cannabis sativa
ttgatattttttggttttttaattttttttctagtgtaactctatttagttataaccacccaattagaatataatttacttgatcccaagtatattcttaaatagaagtttatcaggtgtaattggaagagcacgcacagttcaccaaatcaattttctatattattattgttgtcaagttagtgtactaaaaagaaatacaatatagttataaatgcacgtgatcctattcctattcctaatcctactcaaaggccataattcaattgattcgagcttcagtgctcaagaaagttgaatcacgagagacgatgtggagtaatatttggtgctctaactctaaagctttgacttgctcaatcaattaatctttgataatgatgcatcaacttaacttaattatgttataataattaacttatactatcattaatgattatgaattatgatgtttttttaattaggtgaatgaatcaatcaatattcactcaacgccaaaccatgcttttgtttttagtttttcccttactactccattaatgagaattgattaagctacaaagtcattaattattaatatatatatatgcttctatcatgtgtaataacaacggcatttagattatcataaactatttattattgctcttacctagcctctcgataatacaaactaattatcatttaatccaaactattactatccttattaatcgggtcccactttgttattattttatttataggaaatgcttaacactgattttaaattttttaaaaaaacaattgattgtacaaaatatttgttagatttttatttgaattatgacatatgtagtattatacttttgtatattttaatttgttaaaatagtcactaaactattctcaatattataaagtggtcattttattaaattttgtcaaaatgatgatgtaaatattatagccacatcaacaccttgtaactaattcaaaaaaattaaaaaatttaatttaattttacttaatttttaaatcaaatttttaaatcataatttgatttttagtttaataattttttaaaaatacatatttttcaattttttttatttttaattacacaagtaacattgatttggcaatgtcatgaacaatatatccaaatcatcattttgtttgtcatgtgtcacaaaacttgacaaaaaaattaatttacaaacatgtgaatagtttagaaactatttataacctgctgaaaaatttagggtacaataatatatattatagttctagaacaaaaatgttaaatagccaaataataaagttccaacatgagacgaggagggcatgatcccacaaatttgcatgcaaatttttggaaaactgaagttattacatccctttgctaattcaaatggaataatttgtgcagattttttattttttataatgatctttataaataatttaaaatctcaattaaaaaaggagagagaaaggaagtgacatatattactttcttactgttaagcgttccacaccaaaaaaactcctgactaagcaactgaatttcagagagaaatgactggagactaagacaaataatttacattggctttttatctaaagtaaaatcttatagtactttcaatcttccaaaaagaaagaacaaaaatgaaagaagcaaccacaaacaacaatacaatggattgtcattatacccaaaaaaaaaaaaatatatatattgttatgaaagaaaagatctagtcaactttttttttctttatttaaagttaataaagaaaaatccaccttctttgatgaagataataccttattcttttttgttttaaatttacctatacttctttcaaatctgcactacctttgatgaagatttcgatgaaagcttggatatcctaaattattgaaccatcatctttgttaaagatctttaaagtgattcattatatacaaatgtaatgaagtgtagtgcctagctaataataattagcatatattgggtcactgtaataaatactattattgtgattgtgcttatgagttaattatgtccttttctcatctttatctttaaatttaatacatatttagcactaaacatattcataaatagtaataatattttagacaaattaaggatgatgtcattggactagtcaatgaccattatcattaactatatacccgtattatataactatttttataagaaatagctagggatatttaattttgaaatatcatctatgagttggtgtattagtataactaattgaacatatatataaactaaaataggactattttactaaagagttacgtggctttttttgacttgaaaactaacccgtaccttaggttttgcttcaattgattgccttaattaattttatcccccatttcaagtaatccatatgggaattatgttcctttcgaggggtatacaccttcaatgactcctaaacaataaaaattcaattaaaataaagtaattttttagaagataaaataaaatagtttatatacgattataataggtaactactatatatatatatatccatgattaaatttattaattacataatgataaaattatcagaataaaagtaatcccaattgatgagttaaaataactatatagctaaaatgtaaaaggtgaagtaaatttgtactgtattataaatggtaattagataattttatttttttaattatttaattaataaatttatagctatcgaaagtgttgtattttttctctagccaagtccaccaatttttcttgagcttaggtgtggcttagtaaggattgtgttttgccacttcaattcaattttcttttactataattagtcttatttctgttacacgtagttttaagtattttagtcttatctatgtgatatagttttatgtattttagtcttgtctttatgacattattttgttttgctttgtttcgctattaattcttcttttgttatttgatatctcgccatcaaatcattgttattggttgtgaataacaagttctctgtgagggttgttagtggtacaattatgtaccttatacaatagttgagtgctcaagttacaaggttgaataaacttcctgcaacgctttctactgttgtatcttctgagcggtgaataaaatagaatatatgtgttcttaaggttaattgtgatgttgcaatatttttcatctaattttattttagttattttgtcaaacgatctgggagttagacgactgattatttgactcgtttttctaattctaatcctagttgtatctccaacaggaagatgtcctgattggattacaggttgttaacgcgatttttttgttaacttaatctaagaagattattaattcaagaataaattcaagataaaaagagacaaaaataataaatgaacaccatatatttttacgtggttttgtagtaaaatttacatactccacgagtcaatattatttctgaattttggttgtgtttacaatttggcaaagtttctgtaaatcaaaattgcctcctccactttcctttgagtgaacccctatacataagaataggatgatggttacttaatcttatcttggtaaaaagttacaaatgatgagtggttagttcccatgtttcacgtataactgaatatttggataagtataaataattatttatatttaaaatacaaagacatggtctttgacttggtcagaacatgttatttgtgagtaggtgcataacgagtgtaatacgagaaggtacattgttgagcatgtattataaagagatacattgctcattgtgtattacaaggagatacattgatgagcatgtattgcgaggagatgcattggtgattatgtaatacgaggagatgcattgttgactgtgtagtatgaggagatgtattgttgactgtgtaatacgaggagatatattgttgactgtgtattacgagaagatatattgatgagcatgtattacgaggagatacactgatgattgtgtaatatgaggagatgcattatatactgtgtaatatgaggagatgtattggtgactgtgaaatacgaggagcggcattagtgactgtgtaatatgaggagatgcaagattcttgtattacgaccagctacaagatccttgtattacgaccagctacaagctcctttgtattatgaccagctataagatcctttgtattacgataatccacaaggtccttgtattacgaccaactataagttccttgtattacgactaactacaagtttcttattgcgagataataaatgtttatcgaaataatatcccaacaatattgagatatctcagttcatgaaacttgtaatccttatttagatgaagttacttcacaggttgaatcctaaaattttaaaaaaatttcacctgtcccacaatgtgtttattgcgagaattttaagccatgtgccatataatttgacttttttattgaatagtttaaatataataattattattgggtgattctacaatgcacccccttaaaagggatgtactaatgcacccttaacttgtttcggcatcctgaagaattttttagtctaattt

SEQ ID NO: 112806 - DNA, 4160 bp, Cannabis sativa
  modified_base (779)..(782): a, c, t, g, unknown or other
  modified_base (2609)..(2609): a, c, t, g, unknown or other
  modified_base (4017)..(4018): a, c, t, g, unknown or other
atgaactcggtaggaattaaaattgccaacataatgtctcatgttgctttgcaaagttgtggttacgagagaatgccatgtcaactttgagatgtgtacaatagggttgtcggtgccaagcaagaagaaaagatagagatggactcagaaggggcattgggatttcttgattgtctctcggagaagtatccaaatctcttcattgtctatcaggtggacgtgtagactatgtggctttcggggatgtactagggtttgatacaacttacatgaaaaatgaatacaataagcctctcactgttctcattagtgtcaactaccattttaacacatgcattttgggtttgctctactcctccacgagaagcttgcatcctattcttggctacttaaaaaatttcttgaatgccatggacataagaagccaaatgttgtagttattgaccaggatgtgtccatgaaacaagccatcatggaacacatgccagatgttacacaccatttatgctcttggcatctcaatacaaatgctttcaaaaaggttaaagatacgatcttcttaaaaaatttaaagatatgatgtacaactactacacggaggaagaatttgaagcaaaatggttagatgtcatcgataggcttcaactaacatataatgaatggtgccaaacaacatttgataaaagaaaacagtgggcagaaacttatttaaggggttcattcgtcataggaatcagaactacacaacgttacaaatcgatcaactccgctctaaaaannnntttagagaagaattattgcttgcgtgaatttgtcacaacaaaagatatgacagtctcaaagctaagacacaatgagactgcaaatgacttcaaaagcaaatgcactcgacctcacccactgaatcctacgtgcttgaccacatactataaccaatgtgttgaattctacacaagaactatgtaccacaaggttgctgagcagcttgatttggagaataattattttgtcttaggtcaagaggacgaaggagagtggcagacattcaatattagaaagttttagcatccggaagtacagtaccaagttcattactctgaaggccaacgagcactacaatgtagctgcatgctatatgaaagtcaggggtacccttgtagatatttatgggatacaatgaaaagattaaacattagaagaattcctaatactcttttcatgaagcaatggagcaaaattgcagagataaatctccacctacattttaaccagccagtaccacaacaacaacacatttatgagatgcttaggtttggctccctcacctcactaacttataacttcaaaattagagaattcgtacaaccatgcaaaggaagagattgaacgactaacactaatgtttaaggaagaatttaagttgagctccgatccggaaggagagacgccacaacgtggaagatatcataacaaccctaacattattaaagacccaaaagttgtgagaaccaaaggtacaagaaatacaagggaaggaccaaacgaggagaaatacccaagaaactcaagacattgttgcatttgtcgctcatcaacctatgattatcgtcagtgcccaaaccgtcaacagagtaatggatctcaggggccacaatctaccaacaatcaagcaagatctgactcattcaatgaccacaccaattcgtatttcctgaaactgcctgcctcaacacaagagtcatactacagtaaatcatattactagctatttttccattaatgtcttaacttttatgacactaatcactgcttcaaaaatcttaaaattattattgatgaacaactaaattattttagataaaaaaaatcaatcttagaaggtgaaaaaaaatatttctatgataatttttaatctaaaacctaattaaaataaaataaatataccaatataaaacaacacataatttcataagttttaagaaatttttcttactaatgtactacgaaacataaaggcacgtactaggtacgtgatattttgtacactagttttactaaacaccatacaaaaactataaatgtacttggtacgtgatataatgtactccactaccatcgcacaaatacataaaagatatgaaaaaataaaaagacaaaaataacctcagtctgataacatggacccaccgtctacaatacttttgtactattaactatcacaaatagtattttttttaaacaaaaatcacaaatagtatcttgattataccttttgtacttttttttattttttagttaaaaaataaaattgacaaccgatgaagaaacctacaacaatcggttgtaataaataaaaaaaattacaaaaaataataaaaaggttaaaagtatgtaagacccaccattccatataacgaattacattctgtaattttttaaattggacataaaagtagctgcatatatacttaaattggacataaaagtatgttatgaatattgtaacatgaggagtactaaagagactctcttttgcactctcaccatagttgaatgacaaatgtcaaatgtttagattgacttgtttgtacctattaattaaccataancttaccatcttattacaattataccattttaataaaattaatacaataattactattccactaatttctaattttatataggaaagaaaagttatcttttaatcttctcatcttcatagatattttctagtataaaaatagcaaactcttcttcaatgatataaaatagataatcactattcatttttatcttttttcaatacatgtattacctcttaaatattatttaatgctaatttctttttataatttttcagttcaagctccgtagataagtattcccccctaattttaaaaaagtaagtattatttatgttatatattatataagttgacatatatatatatatattttgaaaaaatacgtattaaaacatatttttacttaatactcacaatgtatttgaatcatagatgaaagatgatatatatttaaatatcttattcaatataataaataatggtacgatgaattttatatattttttctaaaattactcttttgtcacaggtattgaatcatttatgtatactaacaattgactaccttcaaatagacaagaataattagtaagtatttctctatcacttcaggatacttatgtcttatctatttatcttttgataattttcttattattttgaataaatttaaattggcaaataatgtataaatgttattttgactcctattttattccgtatacaaacatatattgtgctcattatttatgtttaacaagaataatttagctacatagtgtattaatttcattaagatggtataattgtaataagatggtaagattataattaattaataggtacaaataaatcaatctaaaaatttaatttttgtcattcaaagaaagtgcaagagagagtacaaaacagagtctcattaacactcctcattttattatgttcttcttgtattattttataattaagttatagtttatcttgatttctttaattgttataaaatctttaacattaatagtgtattttccttataaaaattgtggtattagattatggttacatgcctatacaacaataacattgctattagcactctgcacgaaaattataggctgacctcaaagttaggtggtagatacagttggtttccaaatctcttaaaataaaataaataaaaaagagggtcccatataggcatatcctctttccacataaatcttgttttgacaatattagcaaccataacaattataattaaaaataatgaaataaagaggggaaaaaaaacatcataaattcttggtgctcgattgttttcagagaaacattgcatgtgggtatgaggtcaatttcatcatgaactcaaaattgtgttgtgttctcttttcgagagctacgcgtgcatgtttggcatcataactannaaactgttttttgtttttaaaaatcgaaaattgtttttaaaaacaatttggcttgtttggccttactttttaaaacagtttttagaaaacaaagttacaaaaaacaagaattttgaagacaacaaaatgttgttttctgttt

SEQ ID NO: 112807 - DNA, 5150 bp, Cannabis sativa
aagggtaaaatgggaagttctgtaatcaatggaattaatttgtaaaaattagtggagggtctaaattttgatattgggggttttattaagggcacaaaaaatgaaatttccctatatagatccaattttaagaacattgtgcaaatttcctttttttaataatcttgtatagttgtattcctaatcctatctcaaatgaactcaaatatcgtacaaatgttctcactaacaatattcacaaaccaaactcaagccaaatattcaatcaccttccttcacttataggacggtgaacgttatttggttgagccacgccacttgctggccgcggtggcattgcatcggccaccatgctcgtgcttgcagacgagtcataaaagctagaatcagtcccttgtgtaatctggctcattagagtactgacatcattgaatttccaatcagctaagtaaccaggccttgaaatttcactactcacatcactatctcctgatatcattgccaccactcttgacatagatggacgcattgttggtgaggtttgagtgcataagaaagccactccaatgattctcttcacttcttcctcgtcgaattctgatagttctgaatccaccagttcgagttcacgcccttgttcatgtaaattccaagcctggtgagcaagaaacaatgataaaaacatgtgtcaaaagatcaaaatctattacgaaaaactataaagaatagctcataataatttgattttcagtacccattcaagaaggtacattctttcttcatctaaagtagagtcagaatttggtcttccactaacaagctctagagccacaactccaaaggcaaagatatcggttttctctgttaagtgaccgcgcatggcatattctggtgcaagataaccgctgcaatttcatccaaaagatttcagttaaaaaccattagcaacaaaacaaggctatgttgttgtcaagaagattttacttacattgttccagcaactcgtgtacttatatgagtctgtttatcatcataaagtttagccaaaccgaaatctgatattttggggatgagatcagagtcaagaagaatattgcttgacttgacatctctgtgtacaattctaatccgagattcttcatgaagataagttagacctcttgctacccccatgcaaatgtcaaaacgcgttgaccaatccagcttcaaactatgcttccctgatacatgacagacacactctaaacattttgttttaaaatttatacaaaacaaacaacacttttgttgtttacataccaaataatgcttgatcaagactcttgttttctaagtactcataaacaagaagtcttttatctccctcaatacaacatccatgcaatttgacaaggttacgatgttgcacagcagatattgtggcgatttcagcaacgaactggcttttcccttgatgagatgtcacagacagttgcttcacagcgacaactctcccgtcttcaagacttccctgttgagttataaagaaaatcatataatgagttttgtgtcatcaaaaaatgattaagaaattagttaatgaaactaacattattacataccttgtagacaggtccaaatcctccttctcccaatttattagaagaattgaaatcattggtagctgtctttagttcactgaagctgaatgtgaatggcttaacatccattcgcaagaactctgcacaacaattaatgttgggaatttatttatttcgatcacaattgtatatataaaatgtgtgttgagtcatcatcatatgaatgagtcaaatttatgtagtctatatttagaacatgattgttatgattttaatatgtgaatactataagaacaatttctaatttgatgaggggtcaaattaaaaaatagtcaataagtattactaactggtttgtaagttagtaatataacaggttaagatctccaatttgcagtatcgtaccattctatattcttgaatccccatcattaagagactaaagctctaaaggatttttgactgcaaatttggaagatcatacttttgtataatcgattctatggactccgatacgcttctgctaatctttagctatttattatttaattctcataaattaattagagctaaattcagacttacagtatttcaacaaataacattcaataatgaagtagttttctcaagaaagtcagaggatcaagatcaagaaatgttaccttcattcatttgagctcttcttcttcgttgagcaatgtagagagccgctaacacacacaaaacaattaaagcagcaaacccgacaacaactcccacaatcagaccagtgtggttctttttagtgcttggaggtttgttactgacagtaggtacaaaatctgtatcaaaacaacaaatgttcaaacaaatgagacttacatttccattaaaaatagtacttaaaaatatcaacaacatataatatacttacttggggtggcactgattgctgaaatggaaggcccataagtaccttgagcaggtatacaacaagttccttttccagcccaaaacagatggacttcaatgaagttctgcgaaacattggcagtaaattctctcactacagctctgttagaaacaccaccagcctccttctttatgtcaaaatcttttaagactaaatttccctgaaatatacacaaatttcacttagctaaacatgctttctaaatgtatatacatagaaattgtaggtgaacaatacctgaatataaatatcaaatacacgcctgccaacacttttccagctgcgagaactcagtatggcgatttctgcaaactggagtttgacagtgtaattaccattctcaagcccgagaccatagtatctcaatgatgaagcagatagccttactgtctggaatagttctgaatctaaagtatttgtgaattgagatgatgtaaagcttttataggtagcattgttgtttccagcaaaaactccaacattgctcactgcccatctgttgctgctggtgacaaaatgtgtagctggacctaaagcctcctcatcaatttcatacaaaattctatcagaagatgtgatttgaggacccccagagttaatcccaaagtcagaatctgcacaccaatgtaatgctcttttaaaaaacaaagttatcaagctattcgaatcgattgtagtaatcaatcaaaatgtacttacagattggacggcctagaccacagggaaaattcttttgaagacagttcaatcctaaaagaagaggactgaaagggaacaaagaaagaagttatataatattgaaaactaaattcaaagaaacaaattaaaactgagaaaaattacctgttgtttgagctattcattgtaaagttgttgccaaccaagttactgccaaagtgaaaaacaaagacatttttttctttagacacaagtgtgttaacccgaaataggcatacattgaaaaacgcgaaaagttaagacatacatgtgtagattttgttgattgttgacccaagaaggaatgcttcccattagattattgtatgagagatcactgaaagaatagcattaccatgaatgttgctaaacatttaaccaactatactaaaatatcatatatatatatttacttacatattgagaagagatgtacttctttgctgaggcagggttccatttaggctattatttccaagtaatctgattaaggatgtacaagaagcataagtatattcttaaggcattatgtttaaaattacaatggaagatagaagatgtattacaggtaagagagtgagctaatgttgaaaagagagtttggaattggcccagttaacttgttaaagctcaaatctctgcaaacaaaaagtgggaacttcatgagtgaacatgaaaagttaataatgaaagtaaggtggttttgagatccttaagtaacttacagttgttgtaactgttggagttgcccgatattcgatggaattgtaccggtgatgttgttattcctaagtactctgcaagttgtattcaatgtttgtcagattatattgaaaaccagaaaaacaaagggtgtaaaggtgttgaaactgtgttacttacaagttacttagagacttcagattattgataaatgcaagagaagagcttacattagatatttcacttaaccgcctacatataattcactctcaagattgttagttttacaacatttggatatagatatgaaagtgatcagactattaagtttggtggtactcacaagtctgttagagaagttagatttgcgaacgaagatggtataggtccttgaaaagagtttccttgaagcctcctaaagaaacataagcaaagaactaacaatagttagtattttgatatattcacataaatgaaacaaaaaatggtgaccttgacttacaagacagtaagacttgtccaatttcctatgaattcaggtatctttcctgtgaattcattgtctgatgcccacctgcagaaagtcaaagatttttcattattagaaaaaaaatctccatttataacagtctgtgtattgaatcatgaggtagaagaaacagtttacaatgtttccatgctttgaagtttcgcaaatgttgaaggaatctcgccactaactccagcactatcaatgtaactgtcaaagaaaaacaaagaaaatcagaacaatgtacaagtgcaatctttagtagtaaggcaatgtaacaaacttacagttgttgtaatttatttaaatttcctaactcagatggcagaggaccagagaagttgtttgatgaaaaagacctgtatacaaagttcaaaactttaatgtcataaacaaaacaatgaaacaaagggttccatggaaattcaaatgccttcaacttacaacattaatagctcagtaagttgtcccaattcttttggcacttgccctgataatgcatttatgcctaagctcctggtaatagccaaaagaagtgtttaaataaagaaataacataatatataaaagagtaattaggaattttgtccctgaactttgacatgtaccagattgtgccccctgaatttttaaggtcgttaaaaataccccctgaacaattgagattgtt

SEQ ID NO: 112808 - DNA, 4812 bp, Cannabis sativa
aaaaagaaagaaagaaagaaaagctgaaaattttcttccttgttgcatgtaatcaatatatatcactatttcattttagacatgcctactagtctactactactatagcactacactgctatagttataaaccgtttaacaaaaatcatgcatggtagctaaagttggtaagaattatcacaaacagtttggtctatcaaacaatctaccatctcaattcagcatcttccttttaacccataatttctctccaacattttccaaattcctagacaacattcccatacttattaaaaccaccctaaaatttgtactttcttcaatatcatcaaagataccaaaaacttggagaggcactaaaaacctctgctttgctaaaatttcagtgaccaaagttaacaatgaagattttatcattagctttggctataatggtggtcacaatctttggtaccaccattaatgtgagccattgcaaagaggtccagttcatatttggtgattccctgtctgatgttgggaacaacaagcaactaagtagaagccttgcccaggcaaacttgccttggtatggtattgattttggtaatggtcttcctaatgggaggttctgtaatggccgtactgttgctgatataattggtaggtaaaccatttaaatacaattttccagaacaaagccagaatatgtttgatattttgaaagttcggatgatttttttttttttttttttttttccatatttcatatatatttatatattttgtgtcaggtgacaaaatgggtctgcctaggccaccagcatttctagatccatctttaactgaagatattatgctagaaaaaggagtgaattatgcctctggaggtggtgggattttgaatgcaactggtacctactttgtaagttattattattcttttatatcataaaacacataatcttttatatatagtttatttatttgcttattgttttcataatatattaaggagcgaagattaaaattttttctatatatatttatatacttaatgttgcagattcaaaggttttcactttacaaacaaattgaactgtttgaagggacacaaaagcttataagaagcaaaattgggaaggaggcagctgaaaaattcttccaaaactcacgttatgtggtggctttaggcagcaatgatttcattaacaattacctaatgcctgtttacagtgattcatggacttataatgatgtcacttttgttgaccacttgatggaaactcttaaagatcaactaaaggtttatttcaatcaacattaatatttaaggatgaggctcatcattagtttgataagcatatatatgatttcagtagtgttatttttgtagattttgcataaattaggagcgaggaagttgatggtatttgggctaggcccaatgggctgtattcccctccaaagggtgcttagtacctcaggttcaggtggctgccaagaaagatcaaacaaactagcacttagcttcaacaaagaagcaagcaaattgttaaaagaattatcaagcacccttcctaatgccaattatcaatttggtgatgcttatgatgttgttaacgatgtcataactaatccttctaaatatggtaagtaactaattaactcctaaatgtaacatattaataatccttctaaaaaagaacttgagttattattctacattaattaattgctcatgatcaaaacttgtagaactagtaaaataaaaatgttaccatatagtgttagagtctcattttcttttttgggttttgtttaggattctcgaactcagaatcgccatgctgttcattcgggagaattaggccatctcttacatgtgttcctgcatcatcattgtgcaaggatagaagcaagtatgtgttttgggatgagtaccatccatcagatgctgctaatcagataattgctaatgagatcattaagaaacttgggtttatgcatgatcaaaatcaaccaattgaaccatctccagcacctgcttttggtccatcgtcacaggatgaagaagatgaacaataaaaataataatcaacttattttcgataaattatgtcgaagtctctaatgcgaacttgtttttattattattaatttgatatctatataaacttaaattttgtatgggaataaaagttttctttcttttatttttaattatctgatgagttgagttacaaaaattaatgcgtcaaatgtatttttaattggttaattagaactgtttgctgaagttaagaacaatgatttatcttaatattgtgtatgggaaatgttaaaggtgcttatggtgcctagtacttgtgagatctaatatcgttattggtccagcttattaacatcatatcgtgtcccgcttattttagtttgataaatatgttaaaaaatcgctaatcaattatatagtaatacttcatcgtggttctaggaacaatgggtgtggctcataacaatattcattctatatatatatatttgattagattgactttctacagccaaaataaatctccactctaacattgttcccaacaccttactaaactagataaagaaaactatgtataattttcggttgattaaaacttaggaataaaaaaaatagattttaagagaaattactataaatatacactactataaaatatgatttttctgtcagtcaacacgacagtcaaagcccaaaaccgacataaaaagactacattaaaatttttgtcaatttagaactgacgacattttgcattggactaatgttattccaatttctacataacgtaatttgatatctatctgggtgacacgttgaaaagaccctataccctggacaggcaatttctcctacaatgtttcctacaaagagatttggtacttaaatcatagaagaagctggaaatatctgaggttagtgtacaataacatctgaccagcttccattgcgcagaaagctcacatacatacgcggacaaaataatataaattaaatactttcagagatatatcctatatatctgcaagtttgtaagtcacgataatatctctaaattcatgggatagattcgcggtaacaaagaagagaggaaacctaccaagtttcccattttgttgtatttatttaaagaacataaacaagttttctattttaattcttattagttttgagaaacacatctaatgtaattcttccctataaacagtgaagtcatttcactattcagggatacaagaaaaatcagagaaaaaaggatcataaattcaagagagaaatatttagaaatcattgtaagagctttcgagagagattaagaacttcttgcatttcttctcacaagtgaatacaagtaaaaggggcgtaggatattaccatcatcatggggtcgatcctctataacaactacaatgttctctttgctttatttttatcattcttgctatttaattatttctaatcactttaattgaatcattgttattggctaaaagggaggtcaatattttagtactttcattgagagcagataaacacaatctttgtttgagtcttgtcaagacacacaaagatggctatatccacgaggagaggaaatcaaaacaatacgactgatctgatggtaacagatcctgatgtgcaaactcttagaaatcgaagatatccactcaggatggatcccgaccatactttttactcgacctccaataggtcctcaatcaatagggctaggagtgacgacccctctggcaaagttcactccaggcatgcaagaaactgagaccactagtactcctgctgagaaaactacccttggtactaaaaatccatctattggaaatcctcaaaggacaattggtgacgacactaaactgcaaaatttacaagccaaactagggcagttgaaagagcataccaacactcttcaccatgattagcaagatacgcaagcagctgtaaatttttcttttgagaagcaaagacgccaattccaagagtggatggatcaacagatggaaatcatgaaagcccagcgagagtcgactgacaacttgttaggttatttttagtactaattttagattaattttagtatatttttaatttagttttacttgtatttggagcaaatttacgcttgttatcttttatttttgtagatttataattgatgaagatttgaataatatcaacgaaaaaagatgagaataaatgataaaagatctcgtaaaatatcaatgtgaaaaatcaaaatcctgcttagaagaaaagatattacgcgtcgcacacgtgggagaaattgcacacgggccgcaacccaagaatgggcataccgcggcccgcatatgggaaatcaagtccctacacgtgaaatgctcacacgggctgtgacccatgaaagagggcgctgcggcccgcccctctactgcagcaaaaatattatctttttcctcacgtgggcctggtgtggcttcctaattcaaagctgaataggattttcagcatgtgcgtttttctatcttttttgtccttcaatggctatataaggagtgaacttcagtttttttcgggaagcaatttgggaggaaataaataataaaatacggagtacaaattttagagatcaactgcaatactggaggcattcttcggagggttttgagcattcctttcttctcaattttctttttttttctttagttaacatgtgtgatttttcttccatgaacatgattagctaaacacttaattagggtttagatggatattgttgacat

SEQ ID NO: 112809 - DNA, 8694 bp, Cannabis sativa
gggacccgatacttaattgcaccaatagcgatattgacacgtatgagggtggtaggcaccaatggtgccctttagcatttctctaattgatatgtttttcagtaattgactgttatttgacatatcttgtgtcattttattatgattggttttattagaatatcacaactagagggtattagtcactagtgttataattacacatccatattacttatttagtgtgaactacatcttctatcaaaataaaataaaataaaaataaaagggactacatctaaaattatctatacatttaatataaatcataaattattgaatcaaagatgactttttggttaagaatgaaaaaggtctctctactcttagaagaaaaaacattattacttcttaacttattaaaattatagttagagggttatttttattgtaaaatttttatatatataattggcttgaccgtttggccatattattcgatccaagagatcagacaaacctttgtttgacagaggaaaggatgttgaagtgtgtttcgactgcggattcttgttgaatccccggacgatcttccaagtagactatataaaagctctgcatgcaaaaataatataaaattatatatattattattgattgtatgtaatgagaaactaattaaattaataaagataaaagatatatactatatgatgatgatgatcactaaccttttcccctaatccctttacactactaacaaccccatgacttgtaaagatgatatgaagaagaacaagaagagggagacatagattcttgctccttttcatcattactattgttattattagttgcttaaacgtgggatttggggttgtatacgttattaggcacaaggcttcccttttatagaggcactcaaagattagtacaagagaaactaaaaacaatttatataacagaatttagtataaaaataaaaacaaaaggataaaataagagaaaaaggcttatatgacttctcatgttatggctgaggtgttttcagttgagaaatcttaaaaggaagacaacagaaattctggtctggctttctataaggctccctatctagacgttattattattattattattgtcattttctctggccaataagattgcttcttttggagaagcttgttggaaaaactgttagagattattatatgaaaaataaaatctatatatatatatatatataatcgatttgctaataataaatcgagtgtatagtatatgcggattgagtaattaattgagcttcacttctctctattctttttagatgagcaatcctattgagcatcagtggtgcctagcacttttaagacgtgtcaatttgcgattagctaacgatattccttaaaaattattataaaattatatgagacctgatacttagttgaccaatagctatattgatacgtagaagggtgctaggcaccactgatgacttttacatttatctttttagatagaatttactcttagtacaaaatgagtgaagagctcggaaagcaattatctagtatttataagtgatatattccattaatatttatatcatattaattgttaaaatattttgacaattaagaaaatataaaatcaatttacaattttatgcacaatattatatagtcttgtttcacttagtttctataagtattaatttttttttatttttagaattaaaaaaaaaaattcttatactagtgtttggataagaaatgaaaaatcattttttaatttaaaagtcctaaaagaaaataagatttgttaaaatgatcgaattttgagaaattattttttatattaaaataatttacacaattcttattttactcacaattttattttaaatatatctaaatattttaaaaagtattttttattcaaaaaaatcttcatataataattatttaaatagtaaaaaataaatcaaatttatacttatatacttttatctataaacaaaagtaaaaacttaatcaaactaaaatttgatcatttttttatttattgaatttgtaaactttataacaaaatatatataataaaataaaaattgcaggcctattacccaacatgtgggtcatatttatctatatgtacaatatgtacttagtgttttttacgcaatttctttattatatgtatagataatagataatggattttatagaatcagttcctcgttggttaaggatagtttcatatatagtcaaatactttacctttaatactaatttagcaatgacacatataaattttttgctgaattttagaaatgatatattattactttgatatctctctatttgtacatagtaaccaccaattaaaataagattgtgatactttggaataattacatgattaattaactacctagaaattaaagccagtgctatctagtaatattgtaaaaaaagagaaaaatagaaaaatgaaaaagaggaaagggattgcttaacaatagtactctatcccttgacctccaattcaagcaaaatgacacaggaattctttggtaaatgagaggatagcttaaagtttctcaacaaggattgtttagctagaaattaatttttatataattgagtttgcttaccttataaatttttaacctcatggtctagaaagataagaaaagtaccccaacttgactaattttataattaccacttggtttacttaattactatttatttttcttcacaaacgtagatagaaggacagaggtgggttagcttagctttatatataccgtatgtacataaaagagattatttatatgtcactattgtaacatactttaaatattagtagaagttaaagagggataacctctaaccacaaaaactcactgtctaactaattaaaaaatatgcaaatgtgatcttcaaagaaaaatttacatatattgaacaactttatcaatttgatctatttccactttatcaatttaaattattattatcatttaaatttagacagaaatacacctattcgtgctattaatttttctaatgagcatgcactcttcaataaattaatgttacgaaattgctatgcaagactatattttagttttaaaaaattataccttaaaagttgaaatttggtgaatattgtttaattatattattgtcattaattatttaatttattatttaatcatgttttatattaatttacattgtgctaattaaatataacatatttcattttttatgtcatatttaacatcaaaataatataataaaaaatgcaggtaaaaaaggttgtaatttttatttttaaaaaataataaaaaaaaaaattgaaggttgcaatttatattaaaattaaattggggattttcttaaatataagaaaaaaaaatattttaaattttcgtgtttttcttgaaaaattgtatcaatcttttgggctagttagaaatgggtcgtgggtgtttatgatttacagtcattacgaagtggctccgccggaaactcgcagagacttaaaccctagttatcagctaaaaccctcaaatgttcctcgctaagctctcccgccaaaatcgatctccactcgcgcttgcattcacgttctctacgcgccacctctcctcctccaatctctacgatcgatactccttcagacccccaccctctctcgttccagaaccccagaacattgagccccaccctgactccaggaccaataatctcaagaaaaagaagaaaccccagtaccggccaccctcctcgctcgaccgtactggctccaaacccattcattcagagcttccgttcgatttcaggtatagttacacggaaaccagcccaacggtgcggcctatcggcctaagggaaccgaagtattcgccgtttgggccgggtaggattgaccgcgaatggaccggggtttgtgctccggcgttagacccaaaggtccggtccgttgagggagtggaggaggaggacccgaatttggagaagaagaggaagttgacgagagggagaattcagggtgagccgctcactggggcagagaggaaaattttggtcgagaactgtcagaggcacaagaccagccgtcaagttaatctgggtatgatcccttttggaatttgttttatacatcgcagagtataatgtgaaactttcttgtcctttttcagttttagatgtgagtacttggtttctaacaatttccattagagaacaacattttgaagcttacattgagttcggttgtggcttgaattttattgctatggtattgtagtgtgtaacctgccattttgtttttattttcatcaagtctttaataggcatagcaagagatggcgacatctgtatggattgttaaatatagcttcttgcttttgatgttactcacatggtgaaaaaggaacgattcttagtgttttttattctcatgtttgagctaaagtttgaagacccttgtattggcattacttattaataccacgtcttaatatttcattgtaattttcagctattctgcagttaatgtggctcctatattgagtttgcatatagtggtgaaaagattgtatgtttctcttttcctcttcttatttatgtttttgtctcaattgttagctttgtgctatttttgtaggaagagatggtctaacacacaatatgctgaatgacattcataatcattggaaacatgctgaagcagtgaggataaaatgtctaggcgttccaactgttgacatgaaaaatgtgtgcacccagcttgaggtaccttagttacctaccttttattatatcatcattcctgctacttaaagtaccttggaagtagttttattcaaatccccattttcctttaccaacttcgtaagcttttggtgtgtactgctgtcatacctcccatttaagtttgccattagcattagtttttaatgtttttccttttccttctcaaacaattctacttgcgagctgagtggaaattgtttaaggctatattgctactcacattcagaagccgttacagattatctgattcactgcatgttagcacctgcaagcatatattttgtcaattttatttgtattccttgttccttgtaaaagcttcaaataacattttcatgtttttgttacaggacaaaacttttggaaaaattatccacaaacagggtggtcttcttatgttgtataggggcaggaactataatcctaaaaagagacctgtaattccattaatgatgtggagacctcatgagcccatatatccaaggctgatcaaaactacaattgatggcttaagcatagaggaaacaaaggaaatgagaaagagaggattagctgttcctgttctaacaaaacttggtattttatttttctgttttgtggttttcagtttttggtactatatgtttttgccgtgaccaacagaactaattaaatgcagccaaaaacggttattatggcagtctggtaccaatggtcagagatgcttttctctttgctgatttggttcggatcgattgccaaggtcttgagaaaagtgattacaaaaaaataggctgcaaactaagggtaaatagcatcttttaattaacatagcttttgcataaagacttgcatgttatctttacatatccttatacgatctcagcccttgtttgtttctatcatttatacagaagtctatgtaggattaagataaaacaaggtgatttaagtcccagttcccgttatgtttagggaatactgaattgcagattccactcatatgtgtgtttgtcagttatctttcttttcttctaattcttatttaatttgtaacattgatgctgtaatttgttcagttaatttccactgatgcgtctttccttgccattgttccagtttccacatatttctaactatacccagatgccataactttggtttctagttttcatctcaattctgctgttaaagatttgtaataaggaagttatattgttatagataggcatgatggggttttcattttagttaaaacctggtctaaactttttatttaattaatttagtcatttacattattgatttagtttggtgttgccacaggatctggtgccatgtataccagtaacatttgataaggagcagattgtggtttggaggggaaaggactataagcctgcagaggatggatacttcgcagctacagatcagaattcagtagatgactcaaatatgatttctgctgccgacaaacatgaaagcgatgtagaagacaatgacagccagtcaagctgattataagttgttcctttcttgctgaatttttgataattgcatttccaggagtttctgccctaaaaagaagagaatatgtgtgctttctggaagtttggcaacacaaaatatccacagaatatctttgcggatggagatcattaccagaaaacgatccaatataagaatagcaagaagagtttcacatagtaaaaggcaaagccaattagtgtatagatagattcttttggcagatgatagaattgccagcaattgtacatggtgtgataacttcattagtttacaccaatttgtaagagttggtctcatctttttagctttaaccttcaaccagatgaaaaggggtttgttgctttggtgcactgggcctatagcccattcccatccaggttccagtattgagtcccattcgggcaaagcatttgtagggccatttatgaagagaataataaacaaacacctaaattatacaaaactaccattagattcaagttacgttaatatgttgtgacaacttgctctatgtcaaactgactgaattagatagggatagatctaacattaaaaaaaagaagggactgtgtcttctcatgtgatgtgaataccatgtgattgaggtcaacatgtgacagatatcacctaaccctaatctcactgtaatatgctaataataaaaagaaactacaaaagataaaataaaccaccaatatcatcatcattagctggttaaacactctattgtaattttatttaatgacaataaaagctgtcatatgtcaaatttgaattatatggatctagccaaaattgcctaaaatataataaaactaaaaaaaaaatgaagaagaagaattcccccaagcttttgttagaatcttagccatctaatattttattaaagaatcttaacaatcttaattaatattacatatgatagcagagaccagccagatttcaaaatgctatatgtttttcaaattaaggagggactgaaatattgtttatcttaatttagaagattttttcttgaaagaaataataacataaaattaatagttgacaaggtttatgcctcctgagcgcatgtggctacgtcgtgagatgagatgatgaaaattatagtgtggagtacatgtctcacggctcacgctttattatttttagggaaatttgtggcaaaaatacttattttatttactttgttgcaaataaatactcaaattctaaaaattgcggcattaatactcaaatctcacttttttattattccgtaagtactcattccgtttctgttagttttagtaaacacatgaagcatctagattaattactattttttcatgtattaattatgaaaacctattttcaatcaaatttaatttataaaaaataatcaaaacaaaactaaataaacctaaacttttattcagtaaagagtaaaataattctaaaattaaataagccaaaatctgaatccgaaaaattacgatatcgtctcccccctccaatctactcaccccatgaatctaaccccaccatcccataaatcaatcccatctacccataaacagcaatgaggatgccctgaaatcgaaccccaaaccccaaaaaaattgaaacatattatctttacttttctttttcctgatcaattttctaagcaatatgggcttttgattttaatagttgttcaatttcttttgattcatatccactaatatcaggccttgttctttgtgatttattttattttattttcatatagcattaacaattgttttgacacatgtttctttttgcatctttagatgaggttcttcactctgaatcctatatctttttctatgaaagactttgagcagcgatttcattttttgccctcgatgtaaatgataaatccacttttaagctgctcatcaatgttgtcgggggtaggggattcagtttctgggtttgggctcgattagggtgctatttttatgaatgaatggtttctttctagttcggtttctagatttagagagggggaagacattgtggttatgggaaaatggggatttagatttgggttgatttaaattttagtttttctattttggttaatttttttttattaaaagtttgttaattaatatgaaaagaaatggttattaatcaagatatacaacacacatttttacttaaactaacataaacggaatgggtacctaacagaataagagaaagtgagatttgagtattaaagccgcaattttttgaatttgagtatttattagcaacaaaatagacaaaatgagtatttatgccgcaaatttcccttatttttattaaaggaaaaacaaaggctattttcaaaaatatgggaaaaattattaaggttatg

SEQ ID NO: 112810 - DNA, 3342 bp, Cannabis sativa
aaaaaaaaaaaaaaaaaatactgacgatgtatgagtaaaaaaaaggaaataattatgcagacatgtatgatgattatactatataatgcatgcaatgatacatgaaaattacactggcacatacatagaaaaaacacagttaatgttacatgttccagctactaccaataaaggtccaaatcataactaaatgcaattaatcaactcaaccgtttaagccactgataaccccaaactagattattaacatacatttaaagaaatgtataatgattagcaaaaggatttatcatatttgctgagttttatcataggaaaagagaattctatattctttagttctttaaaaaaaaagtatggctctttattaattatgaaggcatcaaattgcacatcacatattattagaattgaatcatgcccaaaatatcccaagaccaatattcacacaccagtaaatcatatcctaattatttcatctccgaacatatatgagataaacaaacttaactcaccctaacttgcgttaaaacagagttgacacagacaagagattgcatggacttatctatttagaaagttatttcacaaggggcatgaaaggttctaccacggcatatggcttcaaggttctctcctgcatatgaacacagcgcggaaacctccacaccggtggcatataaaggcacggagtgtgtcaagaatccacctgcagccaccacccaacgggaatgaagccggagaacaagaagcctagcactgtccggagtgtcaaaactcgagccatttgcatttttcacaggcgcaaattcttcatcacggagtacctcgaaaagggcagtagagggagcatatgggaatgcatcaaagatgaactgctctagtttataaccagtggtgtgaccatgaattgaagggactttcttctcagccagatgataaatactgtccttctcaaggccattcgccacttggtggaggaaatcaagagtaaacatgtgtaaacaaacgttgctccaacaaaaacgaaggcgccctgtttcttggttgatagcagaagccaaattagaatccaattcactgtattcaaccacagttagaggccctcctttacctctacgtacaaagacaccgactttctcttgtgggtaagccttacgtacaacttttgcagctgctgccacacctttctcaatgaaatagcccaagaaagttgggtcagctacgcgaaccagcgcattatcgacaccatagcaatccaagtacttgactcctttggtggacatgtcttccattaagttagacgatttaagagctgagtatactcctccattcccatctggggcctccgctactttgtacggactctccattataaacctaccatcttttgaaatacaaggaatagtgccttgttgaaagaaggtaacttgttctggttcaagcccaaaatacttatgaaactcgaaaaactttcgtgtgtcctcatctgtgaatggacttgtcataatataccaatgtattatcactgaattaccagttgttgaggaagccgaatcatttttggattgttcagctaatctctggacacgtagaatcctctcagcttgaagctgaaacagagattttccagaaggaaggccaatgttgaagcaaccttttggatcagaactcccaagcctagttccctgcccacctgacaataacaaaacagccaatttcccttctgagattgctttcaaacccatcttccaccatcttgctttgtcctcaggccgccgctcctccaccgacgaaacgctaccctcaggtaccggctcaatcgccgccgtcggtaagctatgagattgaagcgagcaccgtatgatccgatcaatcctagaaagatctagactttccatgtctttaacaaggagaagacgttcttcaggggaaagctcatcccagagtgcaaatgcatcttcctggccatagtccttgagtctctctagaagagcctgaggtggttgctgtgacaatggcgaagcctccgccattgattcactcatcttaattttcttcctctctcgaaatttctaaatcttttgtttctctctgtaggagagtgatatcaaatgagaaagtttatcacagctcatataaagactccaacaacagacagtagttgatgagatgaagacatagaatcaaactagagtaactgcctgttccacttgaacttacctaaatgcccttcctttactattttaaattactttaatttgctcttctttggttgttcaattctaatttcaattcaatcacccatccttgaaagctcaatctcaccaaaattattttctgcataaagaaaaaaagtacttacaagatgtcaaattttcttagcatgagaacagaatttagacacttttcccacccaaaagaagaagaagaaaaaaaaaaaaacaattaaactaattgataatgaactcgtgcctaatcttctttatttagggaaaaggtatttttgtacacttttaatcaatgatggtaattaagctatcattactcgttatttattttacaataatagcaacggatgattaaatttagagaagctgtaactctttctagacataatctaggttcgaccatacgagttattgaccatatatagggaagggttttattttaaaagtaatattaaagttctaggcaaggttgaatttttagagttgacgaacctgtgaaacatggtgatcgacaagagtgggagagggagaggagacttaaagttccaccggctcaacaaaaaaaaaatgtcaatatagaaactgagtaagtaggctaagcacaaagactttgtatatgaaaggaaaagcagactcgtgtaatacgcttcggacatattcaatctcttcctctatgtaaagtgttaattctccttttttttttctttttctcgtcgtccaggcccattttctatgtatggactcaaagccaagaatactgtccaagtcagttagaatgggcattcatagttgtttccttaatttcaccttattcatttctttttttttttagatattttttttttcttatttaaagaacttaaacactttcatcttgagaaatactgaaaggaagtgtcactttctcacatcactattaatgtaattaaatataaatctcatataatttaatttaataattattgtaaaatatcgttaattaattataaagcgttacttttaagtggtgctaagtgtcacgggctcacctttttaggcagcggaatacccgtgcggcaccttgacttctctaagccaaggtcagccttccaaccatccgagtaacaatggg

SEQ ID NO: 112811 - DNA, 1836 bp, Cannabis sativa
  modified_base (1779)..(1795): a, c, t, g, unknown or other
aatttaatttaaaatttatttattgaaaattaaaactaagtaattttattaaacaaaaaaataaacaaataaacttaaatattataaataatataattaaatttattataaagtataattaattaattaaattaatagtctaacttaaatttaaattaaaatttctatacaataataactatttaattattttttttgatatttttaaattcaatttaaatattaaaaaataataattaattaatttatttaaaagtattaattttaattgttaattttaaaaatatataaaaaaaaaactgttgaataacaatttcctttaaatagtaacatttaatataaaataagatataagtactaaaaatatatatttcatcatattatttagaaaatatatactaagtggcattttaaaaggtgacatatggttcttggtacatttcaatattagatcttacacaaattaatgtaataaacaatataaaaaaccactaactaattaattactaagtaacatgttatccaataataacaatgttgatattattaacatagataattacttattaagagagagaggacacatgaaaataattaaacatcttaagaaaaaacaaaaaacaaaatgtactagctactactactactacattaataataataataatatataaatataaatacatttatatttatatttactagtagtagtagtaattatatattaagaccagacccaccagcccaacaaaggctgatcaccatcatcaacctggttgttgtgttggtgatcagggaagacatcatcagaaaagtaagttgggccaccatgttgatcatgatcatgattgtgatcataatgggtggcctcatcttcttcatcggtggccaaagacatagacattgtattattacatggtggtgttgagtattggagatcagaattaggagtggttgtagtggtggtggtggtggttgtgtggtggaagtagcaagagtcgccactgtcgagaaggtgtggactttggtcatgatcatccaccaccccacttccgctaccactgccaccaccgccaccaccaccaccgctaccggtgctcaccctatcctcaaccttcatcacactcatcattatctcttcttcatctcccaacttattattttccaccccaactcctcctccggcgatctccgccgcctccttcccttttagtttctccatcaatgaagccacctaatattaatatcgaatttcacacattttaatttaataaattatataagaacctaatatttcaattcaataaataaagagtgttttttttttgggaatgatgaaatgatgatgataataaagaaaggtatattcgtaaggagagtttttaaagtgtttttttttttttttcaaaaaagaaaatgaaggtggggttaagaacccatgttattatatgtatatatatgtgtcttttgcttataagatttaaccctagttataaattaatatagaaattaaggaccacaagcaacattatgaatcaaaaatggttaattaaatcaagtataccaactagcctatatatgtcctatggtatataaattaaagtttgaatgagacattaaaaatcataattaaaaaattaataccgtcagcaatatattctcaaataacttgtagttctaatttcatcatcattagatctaatgacaatgcatttggatcttattcacacataaatccactaactaattaattgaaaaacatttaggtggcgtttggtnnnnnnnnnnnnnnnnnttttttatttttaaaagtagaaaagtgaaaatatttttcaa

SEQ ID NO: 112812 - DNA, 5621 bp, Cannabis sativa
agcaggacaaagagacaacgaactagccaaccaagggggatctagccggaccacccctagccggccagcctccagcaaagggaaggccggccaacctccagcaaagggaaggccggccaacctctcttgtggcatgaacttttttttcagcctggacaacactttcagttacaaattgagcttccacaacccacgaaaataggagattaacttcagttatttacctattcttgagggctaattaacatattattttcttattaatttaatgtgtaaaaaataggtgatatatcctcattttaaaagatataaagctattatctcttgtatgatctctcttatataaagagcattgaactaaacttaaaatctctaagttataggctctaagttctaagtcaccatgcacaacgcaccacttgacgaggagtctaaatacttaagcaggacaaagagacaacgaactggccaaccaagaaggtctggtcagaccacccctggccggccctattgccagcataggtcgtccagcctccagcaaagggaaggtcggccaacctctcttctggtagacactttttgtgtctctgcagctttcagcttggacaatacttccagttacaaattgggtttcaatatcccatgaaaataggagattaacttcggttatttatctattcttgagggctaattaacatattattttcttattaatttactgtgtaacaaataggtgatatctctgcattttaagggatataaacatactatctcttgtatgctctctcctatataaagagcactaaattaaacctaaaatctctaagttctaggttctataagccttaagctctgaagctctcactcttaagtcatagagttcaagcactcaaaaccctagctcaccctctctcctacatgccattaccagtgtagtagagattaagtctccctcatctctcttcctttagatttgcctcttattctcattattgtaatattaagagagccactctagaatccccaacactagtgatttgagtggtattatctctaatatcaatacaaccgaaaggggagtaagtcattactcgttaactaagagggtcgaacctcaaaaaagatattgtgtcctttttgcttgcttgctctatttgtgtacacgtggttattcaatcataaatatgactccgttgtcggttggctaaatttgagatcaacacactgtaagcaatctgagacaatgatcaaacattccttcagaaaggaacactgcttctgctgcttgaaaaacatctaactaagcttgattaaccaatattctatcagcttttaagaaaattctatcatcactttattgcttattagaccacgtaaaaaaattaccactaaatttaacattctccaaaccacaatgtgctacacagttaacaaaatcatttgaggagttaaatttaactttaactcctattctctcatctttacttaggatatcattaaaatctccgaggaccatccacaatctgaatctgtcaaggcacacaaatccttctacaattctcttctttcttcctctttatcacatgtcacattgaacttccttctgttatcaacaatagccacccttagatgaattaactgactcgtacatctcaaaatgttgacattaaatattaatggattctatttttcttcctccatgcgaagcactattacttgtaaaagaccagcccaagaacatcctcacatacaaggcaccaatgttttgggccttcactcttatctcgaggagactaaccaaactcctcctttgtttcataatcaaagacttgactacatcttgtttatccctttggttgattctttggatgttccaacacaaaattttatccattgggaaaaggggtactccccctcctgtttttccccactgtttgaaaccctttcatttctgttcaagacattaataatctcctctactagcacctagaaagcattttctacaactatagagaggtgaacttcttttcctttgaacctttggaaacttgttggaagccttctttgtcaatctttgtctcttgttcctctttagcaccttcgggtttcttctgttaagctttagcaacccgttcttatttcctcccctatttctttcgacaatccttagttgcatgacctattcctttacaatgaccacataaaaccgacttcattcataataaacctcaaaagttacatttaaattaagttcatcttcaaactttatcatatcagggaaattctaatttattgtcacttctattagaactcgggggaaactcaacttatcccataaaatcgtggcttcgtccaccgtaacaagcttacaattttgacctattatcttaaaaagagacttctcaccctaatacttcaactctaaatcagttaactgaacccaaatcggtacagatttaatatctttgcgcttgaaattggtgtgaaaatcccatttcttcatgataatatgtcgtttattgaagaatatgtatcctccatgtagcacttcatctctatcttctactaaattggaacgaatgagaaaaaccccatatgatagcattccaactttatcaattttatccttccatttcctcctaacaaaactctcaagaactgatagaggtggattcacaccaagtacataacaaaccaaagaagaacgtcagtacgcaacttcatcttcgatatcatccactgtaattttaacttttgctttcttttcaaattcaacaaattttgcatctaagttctgaataacactaccagatctcaaaatagggagagttactttcttacctttagaaattccaattgaagcttggtaagtagcttccctaaaatgtctcgcttccagcaaatgcaaaaatttcttctgaatctctactcgtttatgagagattctaataagatctggtgtagtgattggaccacgatggccatatttctctatttgttgctcttgattcgtatcaattttttctttcttgtcagttaattctatcggttccactcccagaacttcttccattaaattcatcttcctcacatcagaagtagaactcagaccgtgattttttttttcttgactgaagctttgggccttccctgtatcttggctctcgtcttcaccatagcaccaactaagcagctaagaaaaagctagagagaataaaaattcattttccttatcaattttaaacgtcttttttgttactttgtattttttagttttattttctaattatttttactttattgtataaagtgtattatgcaacagtgtaattaatgtaactagtttcgtgcttgcattatttcaatttatcatgcaagtttatggtttcttatgtaatatagtagataatgtgatttgatatatccctatagtatgatgatataaataaataaatatatacctatatatatatattagaaatgatagatttacgataatttatagtatgatgatatttttcatatgatgatgatgttttaaaaagtaacaatttgtcagttatttcttaaatttttactattttatctgatttgattgtgaatttatatatataatcatgaaatgatgatgatatgtattgacataatgcatgaccttttaatccgtgtaggtttcttggtgatagggatgacctgaattttacttttgttgtgttgaatctttttgaagacttagaatactttttttttgcaggtgatcgattattcttttgatatactggtggaggtgagattgatcagtggagattgtggtggaggtgagatcgatcgctaaagatattggaggtgagatcgattggtgagctcaattaatgggagatgaagtcacacgattggagagagagatgaaatcgtagacagaaaaaatcgtataaagatgttttagcggaatcgaatttgatttttagtgttctttagatatatcatgtcccatatttgttaaattttttattttgaatgtcatattttatcctattaagttttgttgtaaactaggtttcattttctcatgtaaatagactttataacttgaataagttgatgaatactttttttccgtacttgttaatcaaaaatactttcatataatattttattaaaatatactcacttttgtaagtgaattgtttaatatactctcattttctatttaaatctagcacataattcatattaagttaagggtataatagggacattatctataaaagtgattatatcttacaaaatattaaaataaaagtaaaaattaaaataaataaaataaaatgaatttacaatgtgattattagtaacaaaatttgatttaagtatatttatgaataaaatttcccaaaattcttacatcatcttgccggatatgtataatgggctgaatttaaggcccagcccaggaaagtttactatataaaggccacgaaacaagcagctgtgatactgatacattgcatataattcattttcttcttctttacaaatataaaaatataattaaaaaaaaaagttaataatacgagcaaatcatttaagtgaaagtcatacatacgtgtgaataatttctttttggactttccttcatattctgaatagaaaaaaaaattcataaaccatacattgaattataaattcactttatatatccaaaaatacataaaatatttttggtttctaacgtaaaataaaacatagcatgttgtgaagagaaagaagcatgttcgattggatgaattgggatctacttgtggatttatatgattgactctcttttacttttattatttttattttataaattaattaaagatcagtattagtaaagggccaaaaatgaaactctcctataatttcaatattattattatttttttttcaaaacgacaaattcactatttagtgcacatgtaataataccatacttggagaatcatagggtccactctccacattcccttgtctatcttacattttgtgtaaatttacataaaattacaaatatattcatttcaatgtttataaacagtttctttgataaataactcagttttggtgatataataataattgtaccatgtttcaactatattcaactctggtcatgccatcatataagactacatatataactttgtactatatatataacgtcataaatgttacaagtgtctaataatgtccaatgttatgtgatattgaagagtgttggaagaaaaatttcatacccaaaacaaaacaaaagactaccaaaaagaaaaagaggaggggaagtgattatcatgccaaaaaaaaaaaatgcattatgatttagtttttgttcttttaagtcttattttattctggaataatttatattactattaattaattaatttttaaaaaatattatatatattgatgacacggtatatttatcataatgaaatgagattatcctaaactacgactacatccgcctcatataaatacatttatatagactagtaaaaagttacgtgcgagacacgcatactaaattttatgctaatttttttctatgttagttgaaagtgatacaattaaaaatt

SEQ ID NO: 112813 - DNA, 3447 bp, Cannabis sativa
atttaactaataatctcacttattggcaaaaagatcgattttccccttagtttaattcttaagtaactaaaggcttatgagtaaaatggtcgtataggcagtataggcaaaatagtctcacttattttgcctattttgcaatgatcgtataggcagtgattatataaaccgacgagaatactttaaatagctatttaaaaacatcgagaaaaattatttttgtagtagtgtttcttgattattctacacaaaatctgaattaagtcaacctttatctactaaatgaaataattaatttaactaataatctcacttattaaaagatcgattttccccttagcttaattcttaagtaactaaaggcttatgagtaaaatggtcataacccaattatccctcacaacttcaagatcccaactaatcaaaaaccttctgtgatgcatttagaatatcaaagcgtattattgtgatattattggccaatttgttaaatttccactgttgtggaataaaataatatgaaaatatcacatttgatatattatatattacatatttatagcatctaaaatttaataaaatttctgtaattcaaaaattatataataaatactttttttctgaaagacacaaatacttatttttaataatagaatttattttataataatgcacatattctcaaaattactaattaattattaataatctcattttcatgtctaatcatgttgatagttattaagtagtatttgattttcttctcttgtattaacacaagtaaccctaaatttttttactactggatatctacgatttgacttctttcgcttaaatgccggagaatattattgtacttgtgaatgttaacgtttcaatgtatatattatagaaggtgaaattcaaaaagtgataaataattgagaggtagaccaagtcaccatatatttgtttggttgcgtactatttcctgaaacataagacatgagctggatcaagctagctaggtgagatgaaatgccagctggacagatcaaagataggcttactttggtccttgcagtcaaagccccccaaccaacaaccttgaaaagcagtcctaggccactactaccatatctaatgttattatatatagttgagattgaggataaaggtgggtggagtggaagcttgctagcaaggtggcacattcgtcaccgtacgtacggtttgcgcgttgcaatgcaccgaccctagcaactacatactacgtactgtccccatttgaccattcatccattactactactactgctccgctgcctctctctgatccagtctctccctcactcactcactcacccactcctgcccttttattactatttttttttttatgaactgcccttttaatactattactattagacgaccatatctctcaaaaattatgttatatttggcatatatatatacatatatatatatatcaatttatagtattatctatcaatctatagtaataaaacatgatgtgaaattcaatatagtaattttattatgtataataataaaaaaatataaatagtacataattcaatatagtaattttattttaactaataaaatattataaaattaaataaaaataatacatatttactatatttacacaatatttactacgttcaaaataatattactatgtctaaatgaaaaatatgctccaataatatatcataaggtgatatagatttcgcacatagtaagtatatgtacagaatctatatcaccttatgatatattattggagcatgtttttttactaaggctaatatttttgttttagatcatttatttatatttcgattctcgaagatgctcttactttactatcgatgaaagagaaaaacagaccagcttagttaggcctttttctcaaaatgatattggtatgatattcatcctatatgtttgggttatttccaaataatatacaacatgggaaaatattttgcacaataccattacatccaatgtaggtccattaatactaagaattaatgttcttttaggaccatgtgactagtgtttttatagctaaactaatcattgtaataattggcaaatatttggttcgggtttaatttattggaaattttaaatttgttataaaacaattatgaatacactaaaaaaattaatgaagagacaatgcaaaaaaaaaaaaaaaacatttcaattcatttattccagggtgatctcttacttgtacaaaagtgagcaaaatattaaaaactaaataaatgaaataatggtaattccaatcaaagactattaggatatttggcttcttgggggatttttgaaaatctctatatatagtattgataatactttttttttttgtttttttttttttttggatatgatgttcataataattgtctcattaaaaattctatcagaaaacccggtgaaacaaatcgttaagaaaaaaagagtgtagtgtatattaactctttttttctttggcgttcctagagatctttcagttgatgtattttaattatatatatcgtcttttcaaatgtttacgttaagtctttaattgagtattacaatgtattgtcttaatagaaaactccatgtaattttgaattgtgtaataatccccatgtttgtcaaatacgatgtgttaatgatcttagctacaaatctatgttgtgaatttcaatgatctcaacatgatttaaaagttatatcgttaaaatgttatcacaaaaatttattaggacaaaacctgaactaacgaaaaaagattcatcaatacatatatatcgcacgatctatatacaagttgtctcactaaaaactttgttagaaaattttagtgagacaaatctaaactcaagaaaaaagagtgcgacatatacatatcttccattcatgcacatatccataattatttttgcgataatatctcataagattattatcatgatattgtaataactattaaaatatcatcatatattatttatgtttatatatttatgataactcttgtaatatatgtgtggacttctaaattaagaatgagacatgagcttacaggttcttagtacatcatgtatccaacttatttgataattcatgtgtgtgtataacatcattcacaacccaaattttgaaaatttaagtagatatgaatataatacattaatgatgaaaatataaatttttatttgcgataataataatactcaagccatatcattatttcttttttgttatatgatcttatttttaacatcaaattatcacatttatatataaatatatatatatccataattgattatgcatgtttagtgttagagattttataacaatggaagaaaattaagatttattacaactctattgtaaaataatacaaggactaaaataagagattgatta

SEQ ID NO: 112814 - DNA, 7096 bp, Cannabis sativa
cacttaaattttagcaacattttagcaacccgaactttagcaacccgaacttagcaacccgaactttagcaacccgaactttagatcccgaactttagattggaactttagattgggtaactttagattgggttagaaaatatataggataaaccgcccaaaccgaccgatgtacagccctactaccctaacagtacccatcccaccgaccactatcaataatatctaattctgacctatgaactttcttctcaagagtgttacttaaaaggaagcaatgaatgaaatacagaacaatcaatttcaaaccaagaaattcgtcattgccccacctaggatccaaaaatacatcttcaatagacttatggtcaatgaatttagttccaagaaagcaaatatcgaccaactggtttgattcttggctaaataacattttattgcaatcaccaaagcattccaaattagatttcaaatagaattcctatgcactaaattgaatacaacgaccaacaacctttgtccaaaattctttcggattgggttgattaacctccctcaataaaagcttatgcacaatttgaggatggaatttatactccaaaatgtccaaaaaatgactaaattgtgtatctcgaaatatcttcaacaaattatcaaaaatagtgttctttatgttaagaacaacagaataagtgcatgtagtaacacacttggatctataataatctcgatgactaaatttgtaaacctaatcttgcatacaaaaaaggagaaattttataacatgaaactataatcatgaatctataaacagttatagtttcaaaactgtaaaaaacaattacaaaacaactataaaaaaaatagtcacacataaaaaaaactaaaaaaaaaatacatacacataaacagagatgaaaataaaacttaatataaataacaaaacatataaaaacattaaaagtagaaaaatcaaaaaaagaagtagacgcccccacaaatatattgtccattttagctcgttcaagttcaagttctagtgtagttcttacatttagtccttgatgttatagatatatggattccacaatgaacataagctgaaaatgtatgaaatgatgtgaagaatctaaaagggaatatgatcaagaagaaacaataatgtgtaaaaaaaattatagttttaaaactataaaaaaaaaactacaaaacaactataaatatatacacacaaaacaaatctacaaaacaaagtcaaacccataaacacatatgaaaataaacctaatataaataacaaaatatataagaacattaaaatcagaaaaaaaaaaataataaccaaaacataaactaatttaagaagaacagaatgatcacaaccaataacaataaaaaaaaggataatacaacaaaaatcaaaataactaaaaaattctagaccctaaaatgaaatcaaaacaatctacacaaaccaaaaaataaaattaaactaataaaaaagcaaagttggggaaaaactaaaacgaaactaaaaaaaaacgaaaattttctgaggaagagaaaccttatatttcttcttcgcaggtccacgatcccgttttaatacaggcagagcaaagtcgtagtcatcatcttctacaactgggtgttttcctttggacttattggctacagatttaacacccatttttaaattttttttgggcaatggagaagaggacgataatgaatgagtaatagtcatgaatatatataactttgaaccaaaaaaaaaaaataaaggacattcggttatggcaaatcggttaagggaaattagaaaagaaaatggcagaacaatctttgggtgaatgagttttgattgtgggtaggaagaaaatcagttatggaaaaattttaaaaaataaaactgaaatgaaaatgaaaaaaaaaggaataaaagagaggaaaagattggattggtaggtgtcaatcatgtctagtgtctattgacagtaagtgtaagtggtaaaatcgtaaacaaaataacttaaagtgtgaaaaagttacccagtctaggagtatatgtgtaataaaaagactattttgtatttttttatataaaaatttctatttgaaatggactttgaatttatttttttgtgaaatagaattattattttttttaacaagaaacaaatagaatttgcttttatgatgaaaagttgcattttattaataaataattgttacaggagaactcaaaaaccatggacaagaaacagtccaaaaactataacttaattgactcgtaagagacttagttagtgtatgagctacaccatctgcattagcattaggcaaatagcataagtgcatggacttgatcctattattaatttgtaggaatccaatcatgtccttggatgaagttttggactgaatacgtattaatatgttcaactggaattcggctactccacggtactctttgtgacaagtttgaccctggtccagtgttttcaaattcgccataaaatagtgtttccaaaccaacattattgtcccattccagccatccttcaggagtgatcaatgcttccatgttacatcccatgaaaattgttcttgaatactctttccatggccttcctaagaagtttttgtgcactttagggttgctcttatacaactccatgtattctttagttccattgattgagcaattttggaaaacaaagccagtaaattgtgcagggtccttccttccatgtgctgtcactgcgttcttctcgcctttctctggatcggcttgtctcggtgcgattaggatttcggaatcctggaaaaatgaagctgagtttccaaatatgaaatctacgttgccttggatgcgacatgatttgtagaattggcgaagtgagtgtgcgtagagagtgtcttggttgcctaagaattcacaattctcaatcacggaatgatcactgtctgatctgaatgctacagcttggtgtgcatcaggcccccctttgttttggaaggttatgcctttggccatgaacccatcaccaagaactcctattttaaacaaaacagatatatatatcaaaagtcatgtcaagattcatttacactaatcaaaattttactcacgacccttacctattacattaaatttgacaattatgagatacgtattatttatcatttgagtggtaggtaggattgttaaaattaggatacggcaactcaccaacatgttcttatctttttgaataaaagaaattaagataagtaataataataactgatttattaaataggaattaaataactcaccaactgttgcactatcatacgtggtaactccctgcatgccaaaattcagtgacccagtaataacagttttgccaatcccgtctcctagaaacacaacatttttcttctcaagtgggaccctcaccgtctcctcataaaccccagccattatgcggatcacaaaccttttattgccttcactgggcgcagcattaacggcctcctgcaccgtcttgtaacacccgttcctcccgtctttacacacagtcacatccaccgtcaacttcgacgggaacccgccccgggacccaatctctgatccaccgtcggatcccttctcccaaaatccatcacgctctgtcttaggtggggcccacgtggacatgtcgtctccgaaattgtcgtaagatgccatcatgctcagagcattgcttgattgttcggtcaatgagttaagaaacgacattgtctggttcaccaattgggtgtcgttggtgtacttaagcgcagaccagcagtcgtactggtacagcagcgctgcgctcatccacgcccgtgcatccttggtttttccactaggcactgcggcattggccattgatgtacggtagtcagagtaacgtaagaactctaggcagttcttggaggcccttgtacggttgaagctatcagatgatgacttggcgatatgctcgatcattgaattggcaatgtggagattgtccgatgagacctttatcgccgcctggataacctcaactggagtggccttgggtccaaggccgccaagcttggtcagcgtggtctggcatgtttgtggaaaacgggtggccttacaggcttgctggatgaggggggaaggagtagcacctggtgatggggctggcgttggagtttgcaaaggcggttcattgttggcggatgagtaggataaaaagagaatagagaggaatatgcggttgaaagaagacatgatgatgaatgtggtcattgacacaattacttctctatatatatatgtatacctgaaagaatacaatggtggagaataatatacgaccaaattttatctggttttgtttctaagaattatttttagaaatttgtccgagtatgactgagaaggaaatacatagatttttttctttttttcattctcaaaagaaattgtcatatattttttttttttttactttttttagaaaatctaaatatgaggtaaataattgcaacaataatattttctacaagtattttattagcatagactgatagaatctatatctatatttatctaattatgtaattaaagctaaatctatacaggttgagctggaatcttcaactttttgcattctatatatttagtttggtatgattttatcaaaaataaaaatatatagaatgcaaaaatttgaagattccacctcaacatgtttagatgtagctttatgtaattagaccagagaattaaatagcgtcgcgggtaatataattgttatgaaaaaaaataattagtgcctattattttcacacaagtttgtagctaaattgtaaattttgcttcaaatttactttttattttttaaaatatataattataaaaatattttaaaaatctgacactttttaatttttaaagcgttgtcaaaggctttttcgagatatatgctaaagagtatcaatggtgtatcaggttatttttaatttaatataataacttttaaaaaatattgtaaatcaatcacaaaacgacatgtttagaggtgcaatagcaatgttcatttattttttgaaaataatttctttatcgacgatttaagatatacgttgacaaaaaaaaatatttgcggatgcattaaagtactagcaaaaacctacctccactcttatcttgtgtccactaatccaaatttacagtggttgtaaacaagaaaaaaatagagaaaaacttgtaaatgaaaagtcattaccaagtatcttatgaaaatagaacttcagaaattttaaaataataataaaaaaaatacatatttacatttgtaatatataatttttttttataaatttcaatcacattaataatattaatctaattaccaaaaccttattgaaactaaattctcaaactactttcactcatatataatttgagtaagtttgaaaatttgtgattagtattaatttttttactttttatacttaatattaatctttgtttaaggtaaaaataccaaattataatgcagcaataaagaaaatgtagtttggtattcttaatgaacttgctacatattatatagtttactagtttaatgaacaaacaaatcgtgcattactatttaggatttttttgtgataaatgttatttgtataaaaaaaaattaggcctatctcggggggcccagcccccggttgttgctctatcttggcggtcattgtccgccgtgaatttgagtgtcgagattgagtatgagtctagctcagcaggctaggccagccgagataggtgagcaatgtcggcgggcctagcccttcgagataggtgagcaatctcgacgagcctagccctccgagatatgtgaacaatctcggtgggctaggcccttcgagataggtcattttttttaaaaaaaaaatgtatattatttttagagataaaaattctcatgctcctaatattattcatgtgtataataaccaaattttataccacaaatatcaaacaaaaataatttatgtacagatagtacataattaataataaaaatctttcagaacaaatagacaataataaacgtaacaaacacaacttggtcactttataaatatggcaactaatgatatctcctctcatgaaagtaacaaccaactattgtttattcttagtcctcattttcaagtagtggcttatcccttaagtgcaatattttcaagagtgtcaacaacttgcatgaaagaaaattattaaagcaacatatattgatatgcagaacacaaaaacaatgttgtaaactcaaaaaattatgttgctattaaacaaaatagtagtaaatatcactgctttattaactaatataatgaagaccaatgatatgctttacaacaaagatgaactattaagtttttttccaatgctatttaggaagctaagcatttaacataagtgtatattttaacttttatacaacatgttgttaaggcttgatgaccaattattattacctatgattattaacttcatatagaatagaatgacaatccaataactataaaatagctaagatgacatctgatgttcatatatatcaaaggtgaaaaaagaatgcaaataaattgtaattttgagagattaggtttattttgaagttaaaatcaattcccacccctaacattcaaagtacacatcattacacagaagttccttttaaatttccacacatcatacatgggcaagatatcatagtaggatcctcttcattttgcatggaaaaattcatgaaatagttaactccatcttcatactcttttgacaatctattctttttcgtccaatctctatccatattaatctataattacctaaaataatttaatgctattacaagttaaaaattacatcaaagcaatttttaaacaagttaaattattttagtgcttataaatcttcattgttattaaaaattgggcaaagtttcctctgtttctataatattttcaaattttataagtacatattgttggattaaaaatcatatgtgggcacatatgtataatgtatatgctattataaagt

SEQ ID NO: 112815 - DNA, 2991 bp, Cannabis sativa
acgtcagtataaattcagtacactgataaatcatgggacttagtactttgaagcatataatcacaattactttccactatgatgatatcactataattgtaaataattatatgtttaagatataatagaatttatatattaaacatataattatgtgaaccatgctacacaaaatgaattatgatcttttattaattagtaaatctgattatattgaagtgagttttatttagggcataaaatcccaacaactggaaaggagcccaagatattctgtagtcgtgggagcacttacatgtcacaactctgacacgatcctaaaaattttagggaaatatcccctccacctactcacagaaaggctcttgacaaaaaggttgtaacctttttgaggattgtaccactactttgacatgaggattgtagcactactctaacgtgcctttttccgatactatccaacaatagcgtggcacacgacctatcactgtcaacagtactgcaaaccgtacgacaattgcttttaagaattatgcctcaccaactaggcccaataagtcaaaataatgctgaaataatgtttttccccattagtgggctagatttcacacaaaaatccctagttaggctcagatccgtccagctcatatagcatggatgcctataaataaggcattatcttctccatgcaaggggttacaatttaacacaaaaatgcccaaagttaagaaggcctctgagtcttcacttttttgtatgttaatcacaggtgtcttgctgaggatagatttttggaaagaattgcaggcaggacgacctaattcgctagtggaattctttgccatggctgaacgcataagaggatgagaactcattagtgaaacttgaaagaaataaggataagcgtgagtcccctataataagattgcggtcctagagctcacaaccaaataattctagaggatgaagtcccagaagatgcagtctaaccaggcaacatagcttaaaactcaccaaatcaccaacaaagaaggatacatccccgaagaggaagggatgcccatgttttgtcaattatacagagctttctgtccctcacaatcatatttatgtgattgaggaacacaatagtgttttctaaaaaccaccaccaattcaaggaaatcgcgacaaaagggatcccatgaaattcaatatataccacaaagatattgaccatactacccttgaatgctggttccttcaagatgaaattgaggaattgatcagacaaggaaagttttgtcaatataagaaaaatggagaagccaatccccgagcagatggggtaaataatttaggggatgcaagtagttctagagcccctcgcaaaccatcattagaggaccacacgttggtggagactataggaaagcgtagaagcattacacgaaggaggctaaggaaaaacccctgacaaatgtgaataatttaagtgaaagaccagagaaattatttaaaaaggaatgcaatgacatcacattcatgaaaagtgatgcaagatgggtgcaccacccacacaccgatgctttggtattggttgccaacattggtggtgacaatgtacatcgtgtacttatcgacaatggaagttttattaacctcttgaatttgtaagcctttaagtagattgggttacatgaaaaagatttgaggccagtaacatcaagtatttacagtttcactggagatacaattgaattgaaagggatgattaagctacccataaaactaggaacgacacctatcgccgccaagtgcatggcagacttcacagtaattaatcaacattctgcatataatgcgataataggtcaccctattttgaaggagatgaagatagtcaccttgatttatcacatcactatgaaattcccaacacccgtaggtgtaggatcagtacgaggagtgcaagctaatttgagggaatgttaacactgcgttaaagatcgcaaaaaagaaaaagtcagtgaatgtaacttatttgcttgaggcccctccacctcgacatgagtcattcagaaatgaagaggtgccacatgtggagaaacccgatttggacgcaagagttctctctataccagcactgtgcaagccgtagaggaaacagttaaggtaccaattgattcatctgataactataaagtattaaaaattagttcttaactaactttttagcaacaagaaaggcttgtaacatttctcaagaaaaatctggatgtttttgtatggaagcattcaatcatggtcagaatttcacctaaggtcatgtgtcattgcttgaacattgaccctgatgtgcgaggagtacgacaaaagtgttgtaaaatggacctcgcaaggtactaagcacttaaggaagaaatagaccgcctactggcactcgacttcataaaggagtcattttacccaaactggttagccaatcctaatttattaccaaagccaaatgtcttgtggcgcacatacatccactttacagatttaaataaagcctatcccaaagaaagctttccgctacctagcattgaccaacttattgatgccaccaaaggtcatgagctcctcaacttcatggatgcgtactcgaggtataatcaaatcccaatgtaagaaccagaccaggagcacacctcctttatcactgatcgaggtttgtactattataaagtaattccatttggactaataaatgcaagtacgacataccaaagattggttaacatgatgtttgcagatttgttaggaaagatgatggaagtgtatgttaacaatatgctcataaactctcaacatgcggaaggccacatcacccacttaaactcaatgtttaaaattctatgccactataagatgcgacttaatcccttaaagtgcgtctttggtgtagggtcaggaaagttgttgggttttatgccctatataaaactccatttcaatgtaatctatttt

SEQ ID NO: 112816 - DNA, 2439 bp, Cannabis sativa
acctgtgactaagcgcccatacacctatcaacaagtcataaaccatgtcaaatatgtataattgagtctcaaacattcttgaccatagtaagattaaccataatacctcagtactctagtcctactagtgttggtaccatcaatctatactataagtacaactagctataataccacatgcactcaatactctttgtactagtgttggtagcactagtttataattttggaggtataaccaaccataataccatatgcactcagtactctagcgtactaatgttggtagtattggttcatactttctgaattgccaaacacatatattcacgatatcaagatgcaatcatatatacaccaactatcattcgaattgatatgtcatacatctggcaaacataaacctaaatatgtacatatgtatgcgtgttatactagtcatacctcaattttgatttcaagtgtgtcggtcaacctgagtggaaatagctactggtaatcggaggccttaagtgatatttccaaaaaaaacctataagtgttgccctaacaatttcggggactaaaattcaaaactaaaagttttcctattgatagatagcatggaaataccctaattattgagaaaacactcaatcaaggtcccaggaaagtcttaaaatggacccctaaattctgcctaaatcagacggtttgaaactccactgcctgattttaaaacttgcctaacgcattcaattctaagtcaaaccttactaaattttgtagggtacctaaaaacattaaaaaaaattcatgaagaaacctcaataaaattctcaacacaaatcaaatacaatggccgtcctaaaactgactaaatcggattgcttgaaacctccctgtctgagtttggaaataccaaaactcatccattcatgatccaaatattaccaaattttgtagagaaccaaaagacatcataatgaacatatttcatgaagaaaccttaacccaattcgcaacagaattcaagttatcacaaccaagtcaattttgagttctttgaactcaaacttgcataacatttgctacaaccacccaaaaatacttcaaaccacttctaaacggtcctaaataaaattaataatattttcctaacctttctaaacttctccaacatgttctactacaaacagccattgaaaactaacgaaaactccagaaaatcaataaatctcaagttaggttttaccttataagtttggagcagctaggggctaaactccttgatcaaattcagcaagaaaggtgcttgaaaatggtagaaaattctggtttttagccatggttcagaagccatgaaggagagggagaaggagaaggtgatttggtattttttttataactttcctttggcttttgacttttactttaagcttaggtttcctttttattttatttttcttttttgctttcttcataagcagcttgtcaccagtaaaggatgagtcactgtcctaaaatgattcataaaaagatgactaatcacttagggcaaagactaaagtgtccttacttcccctctaagttatatctcgtaacccttggggtaaaatggttcaattctgttatttcgttaaaccccaatattcttatatatccaataatattgcctcgtacaatacttgatacaaatttatatccatgtgactaaaattatcattcgatccatttctacctgttacctggtataaaaatataaaaatataaaaatttacatatagcatgcatattccacataattcaataaaatttctggaattgataaataataatcataacacctatttttatgaaaatagagtctatagagaaaggagaagctaaggtcaaatttatcccatcctcccctcaacttttaccagcagacgttaaaaatactgcttctctacctcttctatagagaaaggagaagctaaggtcaaatttatatttctatcacaagcagacggagtgctataattaattcatcaatcttttttgttgatggtaacactaacattaatgtaaataattaagagcaaattgatataaaaattaaacaatcattaataacaatttataaaataaatatttaaaattagttaatgatagtattataattaaaaataatgtactaaactatctcaactagtaaaatataattattggtgtggcaacatataaatttaacataattttcacacaccattatatgaatatatttatatatatacacgaagatgttagcattctggttagattgaagttagtggtggtggaagatgaaatgacatactttagtggttgacattgaaaaaccgtgtttttgcaaatgtcagttgtatataggaaaatataaaaactgtaagcatttgcagcagcagaaaataattctgctacagcaaaaatgaacag

SEQ ID NO: 112817 - DNA, 1995 bp, Cannabis sativa
ttttttatttttttatgtttttgcactaatagaaagtatggaaaatttaaaaggggtatttttgggttttaaataaagtagtcaatggtgatatgtattagtttagggataaaatattaaatataggtaagaatatagaatcaaatttccctttacatctctcctctcccacggaagatgtcttacctaaccatttaatatgttttataaaatcaatcccttgcttcatcactccatctatatatagactttcactaacagtagtaaacacacaaaagttaaactaaagcaagagaaagtcaaagtaaagcgataatagtcatggctgccgtcaaagttcacggtgctccactctccaccgccttccaacgagctgtggtttgcctctacgagaaggaggtcgatttcgaagttgttcccgtcgacatgcgagctggagcccataaacaagagcctttcatttctctcaacgtaagttaaaaagaaaacaagctcaagttgattttacatttggtcaacacctatgtctgaatttctagtcttaatttgttattgtttcagccatttggtcaagttccagcttttgaagatggagatttacagctattcggtaaaatgatttttccatcttttttttttttttacactgagaagtagctaattttattgaataaacccattttgataccagaatcgagggcgattacgaagtacatagcagaggaatatgcagaaaagggaacacaattgataccctttgagacaaagaagaaggcaattgcatcggtttggatggaggtggaagctcatcaatttgacccagtggcatcgaaattggggtgggagataatattcaaacccatgtttgggatgacgactgaccaagcagcggtggaagaaaacgaggctaaattagcaaaggttctggatgtgtatgagaatcgactctctaaatccaagtacatgggtggtgattgcatcaccttggctgatcttcatcaccttcctaacttgcagtgtttgctgggaacaaatgtgaagagtcagtttgagagtcggccccatgtcaaggcttgggtggctgatataacttcaaggccaacttgggctaaggttcttgccatgctcaaaccttaagctagctaggcttgtggatttggtcaatgaataaaagtgttgtggggaaattattatgtagttgagtgggtgcttgttttactatttactttagtttttgttatgatgatgtttgatttgatcatatgtagtatgtatgtactttcttaaacttcaatttggttgttgaagaggtttatgcttatgttgcccccacttttttcctttaatgataataatgttctcttttctggattttttcccttcttttccaaccttaaatttattgcccaattaaaagaaaacttctctaccccaattattatgagaagatttgtttgttaaaaaaaatgcaaaataaatatctaaatcttcaaaataagattgcttctcaaaatataaaaatgtgcttaagatgggaataatgtggaacttagtccaccaaatataggatatgaagaattcaatcaagctctttttaatttttcatttttagaatggaactttcactgatgcttaatcatccaaataacaatcaagtttacatgtgttgaaaattggaatatacaaacatcagaatttaccaacaagagcaggccgagcaggtgagctaaaatacatttttagctaaatatatgcctaaactatgtttattggctcgagataacatacataggggctctccctccataactctatccctcctttgttctcgcattctcaatctcctctccattcatggtagatctccaacttctctgaagctcttggtatcttattcaaaaacattgtcgagcccctgaacttcaatgtctctttatgctcaaaggcagtggcggacccaggatttaattggagggtgagcgtaaatttttttca

SEQ ID NO: 112818 - DNA, 2610 bp, Cannabis sativa
  modified_base (2568)..(2585): a, c, t, g, unknown or other
ttatctattttatattattcatatattaattttataatatgttaacccacgtccaatgcgtataattaagtcttgaatgttcttaactatagtacgattgactataatatcaacctatactcaatactctagcagtactaatgtgatagcatcaatcaatactctaagtacaactagccataataccacatgcactcagtactctaagcgtactagtgttggtagcactagtgtactccttgaaagcacaactaatcataataccatatgccctcagtactctaggcgtactagtgttggtagcattagtttgtaattcttaaaaaattgcaaaacatatatttgtcgatatcctggtgcaactctatgtacacaaattttgctcatactgatatgttatctaattgacaaacataaaacatgtacgctaaacagtgcatttgttatactaatcttacctcaatatataatcaggtgtgtcagtcaacctgagtggaaaagccgctagataatcaaagatcctaagtcaattaatgaacaattggtaagtgtctcactaagacactttcaaagacttaaaattcatattttgaagtttctcaatcgataaataatgtggcaataccataaatattgaaaaaacatgaaaattgggatacccaaaaatcaccccaaatgggtaaccagatccctaaacggtaacccgtttacccaagccctggtagaagaaacaatgaaccgtttctctataaacggtgtaccatttctatgtagagctcaaaaactcaatctttttttatctcatttctaccccaaacttactcaaaattttcagaatcctataatcatgttctaaacatattccaacacttaaacacattgaaaacctcctgaaataaaatccaccattggagactaaggtttgagtttctaaactcaaaacttggttccaatagctacaaaagctacaacagccttaattcaaccataatctgatttaaaaataatcagaaaaataattttaaaatccatgcacaagctacaaaaccctattttccaaattcacaaaaaaacaagatacttcctttagaaattgaaagaagaagaagaggctcacgcataccttgaattaaagttctaactgataacccttgctgaaacaacttgaattttgtctgaacaattggtttgtccttgggtgagctagggccgaaagtaaaagggtttggagagagaatgatgttttgttatttctcttgaataatctaatgttttctagctttagaatctaagtatatctctaatattccacataaatcaatagtaatccactacaatcaatcaatcaattaaaatttatttagaaaattaccataatgtccttactgtaccaataacacaatctccatagctaggggtaaaatagtcataaccaaataccttgcataaccccgatattctagatgtcaataaatcttgccccgttaaatctaaaatattaaactgtatcaaagctgtgacaatgtttctggccaaaatattgaatttccactgttatcgtgcataaaatatgaaaatgtcaaattctatatataacgcgtatggcacacttagaattcaataaaatctccgtaattgagaacttatatcactaatgtatatttctgactatagaacttatttcatactaatgcacatataaaaagtgtacactatacccttaatatacaacattatacattccaaaaataaaagtataaaactaccaagccttgtaacctatcataattaaatcaatcaaaaagaaaaagagctcttccgaagatatatacttaagccgacctacctatatcttagctctcacaatatagtacatgtacctaatgattaatagatataatagtaagatacaactaataatttcatgccaaagagtattctacgttattactaattacattaagattaagagattaagcaaatctgaacaagtggcatggccgtagctttggtgttctcatcatcatcaagcaatttttgagagccaatatggtgcgtggttggggtagcactagcactggattattaaagggtccaaatccagccgaaatttccgatattaatcgtcaaagctcgaattaataataataataacaataacagcaaagtgcgtttgggtgggtggtggaattgctggccttgccactgccgtatccctccacaggtacatatatatataccttaatttttaacaaatatatattatagaaacataattaatatataatatattatatatatttaaattaatcagattagggattggatcattagtggttgagcaagcagaatcacttggaactggtggaattgcactgtgtctttacaagaatgggtggcgggtgttggatatatatgcaatattggagtttgggtctcatatcagattccaatttatatattcagcttcaagggtacctacctaccttaatatatttatatatctattctatataaagtgtgcctatataaccgaattcttagtttatgagaaattcgtgtgagacnnnnnnnnnnnnnnnnnnataaaatgatttattattaaaaata

SEQ ID NO: 112819 - DNA, 3205 bp, Cannabis sativa
  modified_base (27)..(32): a, c, t, g, unknown or other
  modified_base (3010)..(3016): a, c, t, g, unknown or other
aattttccataattaaacataattaannnnnnatttccaaattaaactaagcggtcgttacattaattgccgtgacatttctgaccactccgttgagttcccaagaccgccaatctcgaatgcattttattctaaaaatggtatccacgataccctcatagtctgataaaatctccgtaattaataaattacgctttgtttatccacttactcatattttcctaattaactcgtaattagtttaagtagggttataatcctatgctaattcccacttaatcacatatttaataaaatatgtccaattaaaatatcattatattttttgagatattacagggaagatgatgaagaatatgatggagaaggatacgtcttttctttgaggaagagggctggctttgagttgggtggagatagcaagagattgagggctgaagctaaggataaacttcaacatcttgttgcttccaagaagtaaagttaaaagtcctatggatgaagggatgttgatgctcatggaagtgaaaggtcaactaggaagaacacacgttctagcaaagccatcatcagcacttaacctttgtttgctctacctgttcatccagttccaagttcttccactcaattacctagggataagataagtttgcctcaacttcccccttatgacatttcttttccaatctgcccttcttcgttgcctgaggaggttcgtgcccaactggagtttgctaaaaaacttttccacaagagaattaactcttaatatgaagagatgaggaaaaaggaggtctagatcttgactaggtaaggcactaaatttcctgatgttggaaagtttaatgaaccactccctggatcttcatcgccaagagattgctgagaggctccaacctagagtagactcagacctagctctgtttgcagcaaacttattggacctaaatgttgttacatgtagcatattatgttctgataagtttgccataatggagagtatggatctagtcttcgtggctgatagtctcaagaatgaagtggctacagtaagttcattgactctttattgaattacatctctttttccattttttaaatatacctaatctcatttacgttatttttcaagcaagtttgacagcaaagagatgctcttccttggttaacaagctggcataatgtgaccaagatgtacaataaagggaagaagctatcaatgctatacatgatgtgaaatctcggtctaaggccgtgatcaaacagagggttgaggcttctctaaatgattctgtgtccaggtaaaaaaattacgccaaggaggagagggagcatgctgaaagatataaggaatcttataatcaagttaattcttgcatttccattctagaggacaaggtatttgaagccaaggagaagattaaggatctggaacaatagttgacctccgcttcccgagattataacatccaggcagaggtcatcaataagaagattgtagcagttgccaactttgagaggaaattgaagcattaccaagatctcctgtaacaagtaaaaacttttgaacatacggccttgaaaaagcttaagacctgtgagactgacttctcaaatatccttaaggaggttaagaaggctttggatgagtcttaaaaaacttgtccaagaggaaatacagaaggccaagcatgcctaagaagaagtggacaaggccagagctacttatgcaaaggctgaaacctatgcttagagtttagaggagaagtgtgccaccatggaaggggaacatcatgaagagttgaagaaagctctagtagtgaccttgttccaattatggaaaataaacaaggaagtactgaggtacttagatgatgatgacaaagcagagcttcttccccagatcttggaacttaatgctgctgagcaggctaagaaggtggttatcccgaagctattccatcaaatgtagggggtcactgaagtaccttctcttccatctttagagattactccaactaatgacgttccatcttcaggccaagttcaaattactgatgttccaactattgaggcttcggatgaaaacccatcagatctagtttaacaaccgaaggatcaaaccaaattataatccatatttatgaatgaattttaaaacttttttattaatgtggagaaattatttacgcctttaccgcaaggaagtatgtaattatttttggcatttttataatttgcatactttatattcactagaaactttgaagtatacccaatgaatcttgattttgataagtttagtcttgtttccagttccctgaggttctagttccaaaggcctggacctttatacttttcattaaatgcttagactttgttattcttttcaacaaaccaatcatcaatttggccaagtctttagatggaattaaagaataaaggaaaggtatgaccttcaaaaggcgacgtatcattaaagagtcgctaaacactacaactccaaggttaaagataggaaatttaagcctggacatatggtgttacgacgagtattcctaaacacaaaagaggcatcaacaagagtatataggcttaaatgggaaggaacacatgtcgtcattgaagcactagaactcaaaacttacaagttggcatgctatgactataacttgaatcaataccaatactaaggtactggaatggggtgtgttatcccaatttttgcactctgacgtggcattacatgatggtgagacgtgtaatcaacttcgagtatctgctcggagagtacagtctgaataggatgcctcataggcatgcctgaagcaaagcaatcagaaatccgcgcagagcgaccaacacttagtgaagtcaacctttgcatcgtgagccatcaaagaaatccctataacttggggattagattgcagagatatggcaagctgtccaaattccatgatcagtgtattatgtatttatcatacaatctttctgcttatatccattnnnnnnngaagggaaatacttcctctccaagttcatagccctatgaatagtgatgaatactcactgggcaaagggtcgaaagatttttacctaagagatactacctaagaattcacattcagagatattgttgtaagatctataagaaaaggaacctttctccttattcttgagtcaatacaaataacgaggatta

SEQ ID NO: 112820 - DNA, 2827 bp, Cannabis sativa
  modified_base (66)..(69): a, c, t, g, unknown or other
attggaataaacaactcagaaattctcattcaatttcttttgctctcttcatcttcttcttctttnnnntcatctactttatattattttataacaacaatatatattggctaatattgtcattcaatagtaattcaatgacggttatatatttaatgtaaccattgtgaaatttctatatatatataaatatatatgggctatttataaaaatattgggaaaaaataaaaatcttaatatatatggcatgcattttctttttctaagggtaaccgttgtaggttagagaaaagaacgtcgagagacaaagtaaagaaattctttctatccaaaaaagtctactgtctattctaagggcatgctaaatcaatctatggattgcaacattaacgttgcaactgacatgagaaatagatgtcccccagaagctagacaatgaaattttaatatcagaaaagaaatctctaaatgtgtgtctatcctactaaaaaatctacaaataaagaaaatattagtatcaaaataagaagaataataaaactaaaattatctaatgtgataattataacttatcttttgagatcaacggttcaagctccttgaatactttaataatcaagtgagaaaagcaacaatcacatctataaaaatatataaaatttaattaatgtaacactctacttaatgataatattcattaaaaaaggaatttaaattcctgtgctagaaaagcactccaaattataattgttattaagcaaaataacttatcttagaagtctcacagtcacttctaccacacattatactaatttaagaaaatgagttgtaataaaacttttttccttaaaatccatgatccttgaaaaaccaagtgagtgagaaaatacacttaaaacttatttttgatatttctggagctgacgttgaggatgtcattgctatcttacacccttcttaggaagaatctaagaaaaccttaaacaaaccaccatacaagagaaatcactatatacggtacgaacaagcatacaccaagcacaaaaactagtcaaaacaccaaatatggtacaaaacaagtaacaacaaccacataaacaaaccaatgcacacaaaaaggactacttattaattacgtataacactaagatagtatttatgtagtaactaaagtgtttttataaaactgtaagaattttaaaaaacacttcagtttaattgtactaaatatgacagttttttaagaattttttttaaaacgagaaatttgacaattcatgcttaaaaattgttcatggtcttgtagtatgccacattaaaatgcataggaatttagtactctaaaattaattaaatcccaaaataccctcctcatatcttccctctttctcttggccctcgctccctctctctctaactctcaccaaacccaactgatacccacgaccacagaaccagaccgaactagacccagaccaaaccggcgaccaccgcaccacctccggcgaaacccactccgaagacgaaacgtaggacaaaactgaggagaatatcgcaaagctacaaagagaaatcatgaaacccaaagccccaaaatctgagttctcaactcgcttgttttctgcattttttttctagtttttgacgatgtcgcgaaacatcgctaaatatcgtgaaacattgcgaaatcatgatacatcgctaaatgtctccaattcacaatatcgtgaaacacatcgctaatattatcgctaaatatcgcaaatcatcgctaaacttcatccctaacctcagatttattctatcattgcatatacatcgctaagtatcgtaaaatatcgtaaaaaaaatggtaaaccagaagaaagaaatgccaaaaacaagagaggctgtgagagaagaagatggtgaggccttgcgaccagggttctgggtttgtgtgttcacggtaagggttctggatcggggttaatgttggagagtgagagaaagaagtttttttgaaatgtaagagtatttttgggaggaaaaaatattaaaagtatatatatatactatttcgaattttgtggtatattaacacaacatattttacatttaaaacatactaaaccaaatttctcttttaaaactatgggataaatcattataaagaatgaggaataccataaaaaaaaaattaaaagtcgtgagttttcttttgctagatatcataactgtaactacagaaattggtttattatttttttttactttttttaataaaaccaaactacacaagtcaaaacaatactaaaaaataatgtcaaaccagtaacaactccaatagctcagcatttcaaactctctgtcactcaaagcccaaagatagcaaaagaaatagaatacaagaaaaatattttatatagtagtgtggtggatagcatcatgtacattatgatctgcactagaccaaatttgtgccatgaaatgaatgtgatcagcaggtgcatgagtaaactaggaagagaacattgggaggctgtcaaatgtatgatgatgtacataaagaggacctcaaatcttggattagtttactgctctaacactaaaaaacttgaagtgttaaggtatgtagactcggactatgcatgtaatttggatacaaaggtctcaaactagatttgtatttcaaatcaatgattgcaccataagttgaaaagcaaatcttcagtcaagagtggctttgtccacactacaacatttttactcagtaccggcggaagtaataccggcggagccaaactgccggtattaatggggttattaccgacggaaaaggcattc

SEQ ID NO: 112821 - DNA, 4231 bp, Cannabis sativa
catactaaagttatcaaactaggaaggaatctaccgccagccattaaagaaaaaattgtatccacaataaagaaaaatcatgatgtactagcgtggagccactctgacatgtctgggattaggcccatgtgaactgtcattctctaaatgttgttaataatgcaaatccaatctgttagaaattcagaccattagatccagtttggggtgaagcagtgaaggcagaattcaaaaaattaatctttatagatttcctccaggaagtcctataccaagtttggttagccaaactggtgttagttccaaaaccaaatggaactaggaggatgtgcatcgacttcacaaactaattaaataaggcttgtccaaaagattgcttcccacttccccagatcgatcaaaaggtggatgtcacattcagatgcaaacttttaagtactaaaaataaagttcaaacagttacgtaccacgtgtataagaaaaaatcggcacgggtgcaacaaaatatttgaactttattttttagtactataaattattcaaattttctaaaaatttacaagtgacctaaataactacaacgtacacattcatgaaaaagaatttgaactaaaaaggtcttctaaatgcaaaaataaattatagagatttatgaaaacacctatttaaataggtatactatagacttactatgcatgtaattataaaatatatgtaaataagaaaaggaaaaggttaattattatttttgttttttttttttttaaatatttgtaggaatcatgcctctatacctataaacgattgtttaggggatgaagaattccctaggcttataggttcttccccccaaaaccctagcaagaaggatgcaagtagtacagctcttattcaaagctcatgtgggagatatgctttatctttgcttaatgctataactagagctaataaacttgtttggactactatcaaaggaaagtacgtggaggaagtaaattctactactcaaaaccaaagtgaggaagagattaccgaacaattcacacaacaaggtacgcatttttttcactattttttctctttagagctcttcatatattattattagggaaatttgcaggataaactcttatgttcttcactaatttattgcattgcatttaaactcatatgtaaattctttagtggcaaatattcttatgttgttcattttttttttactaaagagaaaattcattaatcgaagaccaagcaaagatacaccaaggccacaaccaaccggcccaacctcacaccaaacaaaaagctaacaaattaggcgtaaatacatgcctttttcagcttgtataatcctcatatttttttaagctatacaacctgtatttgactatatttttaatatcattaattattttcaaaatagtataacaactactattatgaacactattatttatatttttccacaacatatttacagtaacagcaagaatcagatttatcacccctgaaattttccctgttatccaacataaccagccattgtactccattggccaagtagaacaacccacccagtcgaacacctgcttcacaacagccttaaagacagcaaccgaaaaaaaggtgaggatgactctcctcttcttcgctacacacaaacaactttgcagtagctgtcaatatcctgctgaatgagaccattatagtgccgagaagcaataaatcttcccttttttacagcagcaacaatattatgcttgctaaacttcttcctaagttggcaaatttttctccaataccaactaacatcccccttcaactcatactcccaaaactcagcgcctttcatataaatgttatttatccatttaacccaaagaatgtcatgcttatccatggtagcccaaataaatttttcaagaataataaatctattccaattaggaccacttttgaacccaatgcctctaaaggatttagggagacaaaccttgtcccacgacgccaagtgaatcttgctattctctcccttaatcccccatatgaaacccctacagagcctctcaacttctttaataacactatgaggaagaatgaaaatgttcatccaataattgcacttaaatttttgttattcattttgttgcacttaaatttttattaatttttttttgcagcaaaaatctcagttgtgacatacttgatgcaacattaaatcttaaactggtaacaacaaaaagggactaatattttaataaaataacatagaaatttttgttgctaagaatttaagggtaacaaagtgaactacagagtcagtttagataaaactgaaagaaaattacagttttataaatattgaccgctaaaaaaaataattaaattaatttatgccacttataaactcaaaatttgaactacttacagtttcttcatattcttttttatgtatgttttatatgctttggtgatcatgcattatcaggattattaagtcctattttggaagaggaacatagtactacagctgttgaaaacgacattcatccagttcatgtaaatagtactcatcacgatgtacacaacaagtatagaccattcttcaatgatgtgatcaatggtaatttgaaggaggttagggacttcattatcaaagagaaagagaataataataataataataataatgcaataatgaaagtaacattacctggttcaggaaagaatgctctccacgtggcaatcagtggtggacaattacaaattgtacaagtattggtaaaaaatatgaaaatctacatgaaaagaaaagatgatttaagagttcttcatgcagctgttgagattggaaatattgaaatagcagaatgtttggttagtaggcaaaaggggttgcttacattttgctctaaaatagtcaaggttgaacgtcacctaaggaaacaataaagtgcaaaacataggcgacctcgtcataataataataataataataataataatgaactttttggttttctatataatatattatgtacatatacatatatttggttttcttttttatttttagaacttttttatagttgttttcgttgttttttaacttttttgttgaataaaattagtctcttatttcaaaattctcataatatatatatggatagatattggtttggatttgatgaaagggcagccaagtttgggtttcataaaagatgatgttgatagaaatgcgatatacgtattagcgtccaccgcacaaaaatttcgaaatggaagtcaactgagattttgggaaaaatatatatatcataataattaaatttgaagaataagagtctgtttgataaaactgtattattaatatcatattgtatttgtattcaagaaactgaagaaacaaacagaaatgtacacaaataataaaaccagaatttcaataagtaaatagagaggtggaaattgcaccctctaccctttttttgttaactcatttcatttttattttttttttctatatatttaatttataccctcttttatttgttatattctgattataccttatgtaatgaaaaaaaaaattcctcacattcctgaatagtatccttatgtgaggatataattggtaatggacttataaaaggatacatttcactgaatttaaaataaaactatttttagttaactgatgaaaaaaaacgagtatatttcaacttaccctaatagagaacttaactcaattcgaatggccataagattatatcttttattgacctttagcaatacacaagaggagatttgctctcaattacatcataaacaatggtgactagcaccaactacaaaattagggctagacatttgggcctgaaaactcagcccacctattgcacccgcccggcccggacccaataaacctgatacccgaaaaacctaactaaaaaatctaattcgggtgccagcctatgatattttgagtaggggtgtacatcggtcagtttggtcgagttatagtgtactcaatataaatgtcgggttgtatatatctaatcataacccgtctaatgaaaaaaaaaagtgtaaactgtccaatgattctatcactacgagaagtatcacttttgccagcacatttttgtgctggcaaaagttggtattgcgctagtaaaatagaatttacttgtgatgtgttagcaaaagggggttggcaaatcaatgttgg

SEQ ID NO: 112822 - DNA, 3780 bp, Cannabis sativa
  modified_base (70)..(74): a, c, t, g, unknown or other
  modified_base (841)..(856): a, c, t, g, unknown or other
gtgtttaattcattgttttagagatattcatatttaggatgttaatcgacatacttgttagtaaatctannnnntggtaaaatattcccaacactttccacaactgaagaatatatatatggcagctgatgaagccttcaaagaagctatttggctaaaaggcccgacaacagaacttagtttaaactcaaacaacatgaccatatactgtgataatcaaagtgcactccatttgattaagaatcctatgctacatgaaaagtcgaaacatatagacataaagtttcacttttctaaagtgattgtagctaaaggagaagttcaagccaaaaaaattaacaaagataaaaacctagctaacatgttgacaaagagtgccaacttgaccaagctcaagcattgcttgcatctactcaaaatctgcaagtgttgatgcatctaactcaattttattttctaacatgcctcatatcttttctaaacctaaaatgactaaactaaggtggatttgtggtatttagttcaaccattttatatttacttatgctaatgtgtcactaactatcttaacagtcaccctttaactaatccctactatcacttcaaaaaattttatttttagtcacaacaaaatttgtgactaaaagtaaaatagttgtgactaattacaaatcatcattcctatgctgtgactaaaaaatccatagctaaaagtattagtcaaaaaaatctcaaattgttgagactaaaactaaattagtgacaacttgtgtctaaatactatgttttagtcacaagtaactttttgttgtgactataagtcacatttagtcacaaaaannnnnnnnnnnnnnnnaaaaattatcactaaaaatagttattttttgtagtgtataaatagacattgtaccattcatttttagttatgttgtgatgtcagagaacttaattagagagagtgaaatatcaaagtgaaaggagggttttaaaaggggtccaagtgtatctgatcttggtttccctagtgagctacattgtaatttctgctcatcaattctctattgtttcaagtctctcatgtactgattttcagcatcaataaaaggtcttctattatcaattctcttagttaaattcattctgttttactttttcgaatattgattgtcatttagttattttgttattatttttgattgctataaagtttacttggtcaagtttttcagggtgattcattcactatagtaatgtgcccaatgtaaaatcactataaaaaaaagacaacttttagtgacaaatttttagtcacaacaaatttttttgtgactaaatgtgacttatagtcacaataaaaaaattgcttgtgactaaacatagtatttagacacaagttaccactaatttagttttaatcacaacaaatattgtgactaaaaatatatttagtcacaacaaaatttgacttttgtgactaatatttttagccacgggctttttagtcacaacgtaagaataatatttataattagtcacaacttttttactttttgtcacaagttttgttgtgactaaaagtaaaattttttatagtaaatttctattcagtttccttaatacgggctcttaaagggacactgtaacacccaaattttaaatcgatgagtctggatagaaacacatgacatcaattcacttcaaaatctttcaataaattatcaataaattcaaaaaccaagtttagctataaattctaagatactaaaacagaatatgtattgatgaaacaaacaatgattataacaatcttattaagacaatagaaacaaacgatgattatgacaatcttaagacaatgaaagcaaacgaaattacaacaatcttaagacaatggaaacaaacaaattacaacaatctttaagacaaaaaaaaaaaaaaaaaacaagtgacatatctttatagtaagaagatgtacaccaacaacaaataagtaacttattggataaaaaagaaattacttaggcaaatcataaatattattacatccttagacaatgaaaacaaacaatttagaaatcaaacaataaaccggattgtgcaaacttttcttgaataagcttcttcccaccctcagccatttcgggtgttaaatagttcacccaatctccaacctcgcattttctcatgaatgcactattagggaatccagaatgatgtttcccagtcttagttacatccgattttttcatattttcaacactacacaattgttctatttgttttggaacatatctcgaccaaaaaatctactatctttctaataaaaaatacattatctttttatataagttcctcgtatttcaaaaacaatattttgtgaggcatctctaaactcgctttccaaaaaccctagatatggtcccaaaatggtccaaaagggtggactcccttacaaaacacatcaaagcactcctccaaatgagttggttcagtattaatatccccaaaaagtttatgaataaagtgccaatgagaaacaaacaaatccaatggatttctacaaatgtatataatcttacaattagaggacataatggagggtggtaatgaagggtaaggactatgagcactcataattcttggcttggcttcatcaggtaatgataattcaagtgcacgaacaagattgtgtggattgcatgtactaaacgaaaggggaccattattatcattattacgtttcacaatagaaaagattagagattttaaccaaagactacctgattttggacaagatgttaacaaaatatcatcatctcgtgccacaaattgagtttggagggatagtataccttttaagaaaaaatctaaaatccaaaatccttgataaaaatagtaataattaccagaccctggatatacttaaccttttcaagcttggccagaatttcctcaatagtctctactctctctccttcttcattgttcttagtaacctttgatatttccattaggggtaatgacacacaatatgaaagctcaatattatatatgtacaaaattaaagaaaatagtgttgactgactaaacactacaaaaaactttgcttttagtcacaacaaaaattgtggctaaatgtgaaaaatgttgtgaccaaaagttttagtcacaatattttcttgtgacggtgttgtggcgaaaaagtccgtggctaaaagttttagtcacaataaatgtaatattgtgagtaaaagtgacttttaatcacaactaatctttgtgactaatagtttttaaaatgtcaaaacaattagtcacaactaccttttagccacaatttatttatctttagtgacaacttttattgtcactaatattttatttagtgacaataaaagttgtcactaatacttctttagctatgacctatttatttttagttacaattcttattgtcactaataattttttagttacaacaaaacaatgtcactaatatttttttagtcacaacaaaatattatcactaatatttctttagtcacaacaaaatattatcactaatatttttttagtatatataaaaaaaatagcatataatattgtatctacctttatactatggagtatatggacaaattaattcatatgcatacaccattaacataacatttatatataaatcacttaatacatatatatatatatctactacaatctaagcctttagcttcccttttttcaatctaatttataaaaagggaagctaaagggggtgaa

SEQ ID NO: 112823 - DNA, 4057 bp, Cannabis sativa
  modified_base (50)..(67): a, c, t, g, unknown or other
  modified_base (179)..(179): a, c, t, g, unknown or other
aatgtaaggtttcctaaacttgatatgtatttatttcatcgttttagaannnnnnnnnnnnnnnnnntaataaacatacttgtgagtaaaataatttccaacagtttatgtactaaaccattttccagactttgatgtctaccaaatcatgtgcctcaaattttgatatgtactaaatnatgtcccctgaactttcatccatgatagatctttttttactaaaatttgataaaagtccttaaatctaataatggagacatttttaacgaccttaaaagtccaagagacatgatttaatacatgtaaaagtttggggagcaaaaatcctaattagccttttttttttaatttagtatttggtattttatttttactttgcaagtaaattgttgtttagacttggagacttggagtactaccgaatttttgtatatattttgtttgagaaatgcaaaagggcactagtgatgcctaacacctttctatgtgtcaatatcgctattggtccaactaagtatcagatcccatataatttattataatagcttttaggagtatcgctagctaatcgcaacgcgacatgtcgagaaggtgctaaacaccactagtgcctaataacaatgctcattttgttcacatgcttagttatagggccctcatatcgtcattggtaaactgcagatgaggcgccactagagtggtgtttggccaagttcattaataaaaaatgggatacttatagtgccaggacttacttgcattgaaaacgaagcaatgaattttacaaatatgtttaccacagatatatatactttaaaatacaaataatttatctttcttgaatttgttggactccatagtggtggcatttcagtttcactatctgttgttctgttctcatacaactctttatatctatatctcgatcgaactattacagcctaaacaaaatttatggcatcaatctcaaacttagacaaaaaaagattatgcctgcaaaatataaggcagttgtacaggtaaaagtgaaaaggaaactatggaacacaaataaatattcctagtaattgccagcagatgctatgactggtgacacacaacagccttgcacgaaaagtcatcacccaccatccatgcaccaaaattttcaagccgtttcttaagtaaatctaaatccatcttgacagaccagtgaacaaattttttctcaatgtctaaagtaaccactttatcattattggaagaaatatcaactccaatgtttgtttcgtcaactctcttaatctttttactcttttgttccaataatttttctattatacctgcaaaacttgtgctctcttggttattcagcatagacttcgacatcattgcaacatctgagataaatttgtcgacccaaatattacgagcagaagttgagcttctaatgaagagaagtcctgagatcttcccactgtagaagtcgtaggtattatcctgatcaaaataaggataaccttgaagtagaagcatgttcccctcaatgagcaaggaattgtatcctaattctatgttcttcattatcacataggctttcaccaatatggaagtcatcatatctgaatggaaatcttgggaatctggcattttaaaagttgttacactcctcaagaaatggtctccgatgatcacaggatgtcctctacgagcaaggtcaagcaggaaatctgactcgtggccaatgaaaatgaagttccaaatatttaacttctcaaagttgcaaattaggttccttgtgaccatctccgatgctccatataggctcacaataactgcagttccctgtttctgcactgtgtgaagaacaggcccgagttcatcaaaattcctaacaaccctttcaggaagtacttctctgaaacagaaatcataccacttcaggtttttcaatggctgcatttccagaaggttgaaatcaagagagttttcatccaacagattggaatcaggtccagcagttttaccatagttgacacctgcatctctgtgagagacactcagcgctctctcatttaaaaaattagtgtaaaaattatagtagccacgagaatgaatgaatttaatgaaccaaggagtccatattctctcccccatcttcttataccacccatttgttacctgcatttgaattccatatcttaatcacataatagaaagatttacaaaaaaacgaagaaaagttgtcaaaaaataagaaaattgaaacctaacgaaaatagaagaacaagaagtaccattccatcaagaaatggcttaatgcccttggctttgtgtttgtcataccacagcctgaactctttccaaggttttggaaagaggagctgaccccaagtgcctaccaattggtagagaaaaattctggttccattatccaattgtattttgttaccatgtttacctgtaatcagcaaaaacttacaaattaaacattgaaagccagaatttgttcatgatatatatgtgtgtatgtatgtaatgtatatagatatagtacacatttataatagaatagaaaaggcaggaatcatacaagaccatattttcttgactgcaataattctctacgaaaaagcacagcatgagccgtgtaaaagggaaagttgctattgttacatgagacttgactgagaaaattatttgcaagcaagcacaaatcctcaacaagtttcgttataatggaaattgtttattcagagctcaactgaaactcaatatattcatagcgaaattcaaaatgccaggtaattctagaccaactagaagaagatgtcagacattcctattgtttggtggaagagaaaccagcaaattccatgtaatccagacattaaaattccattcattgatgaaattactttccaactattagataatcaatcagttttgcatacaaacaattttactaataacacattattatttaacatcaatcattcaagctgaattatcttgcaaacattgctatgtaaattgcaacattttatacacaatttaatcacacaatacctctcaaacaacgtgtacagaatctatgataacccaaacattggttctatcagtttttatgcttgttcacgattcaattttaagaaaactataagcaaaatggtacctggaacaaaccttggtctctgcagtgaagctccatagatgtacggacgaaaatctggatcaccataataataattcacaatcaaactcctaagaaacttgtaataaagcggcgatacctctaagtcatcctccacgacgaaggcgaattcgtcatcggactcaggccaccaggcctccagccactgggcttgaagtccagcattctgggtacgataatggacgagcttctccccaaatttccaactgaatccatcagcgaactccaaaattcgatgcgaatcctccaacatacgatccacatcagcggagccattgacgaatgcgaagtggtcgatatagacgtggaggtgtacccgatcggagagataatctgcagcggcgagggagcggaggcagcgggccagcgagtcgaggcggttgtaggcgagaaccttgatgatgaaagtgaagtctcggtggggggtgtgggaggtgtgaaggggaaaagtagaatgagggttaggagtaggggtgaaggcgtggagtgtagagtggtagtaggagtagaagaagagagcagcaatggaaaggaggaggagaggcagcaaatgccggttgggacccgccatttttggttcgattcgtgatgaggtctgagttcgaagaacgattcagaatcgttcagatccttgagacacagaaattgaatgatatctgcattttttttcaactcaaactgagcttaaattagcagttggacattgaaaccccgggtctggtatcagccagcggcctagttaggggtgttctttgattcattttccaaagagaaatgctaaatggaaatatttgtaaaaactaacaagcttcacaacttaaaaaatgtttttaattttaaaaaatagaaaatagtttttttttt

SEQ ID NO: 112824 - DNA, 5281 bp, Cannabis sativa
aactcttatgtgtttattttattgtttagaattcatattaggatgataatcaaacatacttggtagtaaatctagatcctggtaaaaaatttccaacagtggctcctctaactgatgttttgtacgtaaaagggctcaaggctaatctcatcagcattggtcaactgtgtgacagcaacttctctataagtttctctaaaactcagtgtttagtttcaactaatatttgtgtggtcttaacaggaaataggactggagatcagtgctatgatgtatgcaacacaattgtgtgcaattgaactttcccggataaacctgacttgtggaactataggttggggtacctgaattacatagacctacaaaggctaataaagcttcaattagtaaaaggaattccagagatgaaagtatccagggataggatttgtggaccatgtcagttaggaaaaaagatcaaggtacctcaccctcaaatcaacagccttctaacctctcgagtattggaactaatgcatgaggacttgatgggacccatgcaaaatgaaagtttgagtgggaagagacatgtaatggtcttagttgatgattattcacagtacacttggattgagtttctaaaagaaaagtctaaaacctttggactattctcagctctaacactgagacttcaaactcaaaaagattctaaaattggaaaagtatttcggctaaggagtgatcatgggaaggaattcaaaaactatatattttttgagttctgcaatggaatgggaatacatcatgagttttctgcgccaaaaaccctaagcaaaatggagtggtttagagaaaaaaaatgaaactctgcaagagatggctcgagttatgctgcaagccaaggacatgtctaagtgtttctaggatgaagcagtcaatactacttgctacatttgcaatcgagttcatctttgtattgggactttgcagacaacatatgagttatggaaagggagaccaccaaatgtaagtcatatgtacatttttgggtgcacttgctatgttcttaatgatcgagatcacttagggaagttggatcttcaaagtggtgaggggatatttcttgggtactctatcaacagtcgagcttacagggctttcaaaagaataactcgctcagtaacagaatcagtgaacgtaaagtttgatgacttggaaataatggaagaagtgattgctgatgatgatgccccagttttgtctggacctggaccaatcattactaaacctactaaagtatatcctgacactcctacttggtctctcaacattgaaaaagcatcttcaaatgagatagaagtagaaactagtggttagaatggtgaacttgaaatcagtagtgctatgcccaaagaaacacaacacgtcaaactatacaacaatggaccaccctcctgggtccaaaaagctcatcctcaggcagttgtcattggaaatccaaatgacaccatggtcacttggagaaaacttcagaatctattggttttcacatgttacctatctcaaattgagcccaaaagtgttagagatgcccttttagatgatttttggttggctacaatgcaagatgaaatgggaaactttagaagacttggtgtatggattatggttcctcggcctgatggatcaaatgtgataggaactaaatagatatttaaaaataagatagatgaatttgaaacagttactcaaaataaagctagactagtaggtcaaggataaaatcaagtggagggaatcgactttgatgagacctttgcaccagtggctcgactagaatccataagattactactcattgttgcatgtttcttgaagattaaactataccagatggatgtcaagagtgcgtttctaaatggtgtaagttgagaggaagtatatgtcaagcaacctaaaggatttgaagacccacacttttccaaccatgtgtacaagctcaaaaaagcactatatggattgaaataagctccaattgcatggtatgatagaatcacctctttcttcatttcccatggatttactcaaggtactgtcgatagcactctgttcattaaaaacctagaaaatgggatttttgttgctcaaatatatgtagatgacaatgttgaagatggtaccattgctccatagtgggtcttttaagtttctctcttttgtttacaagtgacaattaatttaaactttaagtctcttttgcttaaagtgtgaacatcactattgagtatgtatgcttaataatccttttgatgtggggacatcctcttagcgatttttcttttgaattttatgacgttgtgatgtatgaatgtttccttatggtcgtatgacttattttcttaatttggtattaatattcttcatattgtattttgttgatgtttcatgttattcacttgatgtaaatttgccattgacccatatactatatctcttagtctatgtcttagtgagtgtcactaaacttagattttggagcgactttgctgagtaaatcgagtttggctgaccattttattgttgaataaattttattatttagttatgattgaacataattatagagacttggtttatgatttgaaaagtcagactgaatatagcttttgttacttaatctatggttgagcgtaactcttatcattgagtttgtaaatgaatagctggggtagagcatagctcttatcacttagttcgtaagtgaatatttgggtaaagcatagctcctatcacttactttataagtgaatagctgggttgagcatagctcttatcacttagtttttaagtgaatatctaggttgagcgtagctcttatcacttagtttgtaagtgaatagttggattgagcatggttcttatcacttagtttgtaagtgaatatttgggttgagcgtagctcctatcacatagtttgtaagtgaatagttgggttaaacgtagttcttatcacttaatttgtaagtgaagatttgggttgagcgtagctcctatcacttactttgtaagtgaatagttaggttgagcatagctcttatcacttagtttgtaaaagactatttgggttgagcatagatcctatcatttactttgtaagagaatagttggattgagcgtggctcttttgttattgcttttgctttacgtttttgagctctaaaatgtaacaaacacttaaaatacttgagacaaatatttacttggaaacccttttaggaaaaagccatgggcagagcatgcgaaaatcccctatgtagaatgagaatgtacaaaggggcattgttttgccatacatgtgattagaagtggtatttcttaaggtgtacaacattctagctattttctatgtttcttccatctactgctcagagtttgtatgctccttggccaactatctttgtaatttggtaaggcccttcccaattgggtcctaacttgcctactccttcttccttcgtattttggaacactcgtcttagtacccattctccttccttgaattgttggacccaaatgttcttgttgaagtgttggaccaccttttactagtatcctgctattttgataagtgtttgttctctcttttcgtctaacaaatcatgtcctgtgttcatgctttgttgatttaaatcatctgtcaagtgttcgaatctgatcgttggtatttcaatttccgttgggatgaccacttcagttccatatgcaatgcaaatggggtctctccagttgaggtctttgttattgttcggtaagaccatagtactcctggtaactctctgtccatctccctttggctttttctagtcattccttgagtatgtttactattatcttgttggttgattatgcttgtccatttacttgagggtatctaggagttgagaatgataattgtatcccccactctacatataagctccagaagtgttggcttatgaattgtgaaccattgtccataactatctcctttggaattctgaacctgcatattacatttttccaaatagtattttacctctcaatctctaatttgtatgaatgcctcagcttctacccatttggtgaagtagtcagttaaggcaagcatgaataccctctatcttggagcaattggcattttgcctacaatttccatcccgaaagtacttcatttctcgttttggatggagacaaagaaaatactcgaggtacttcttcaatattgtggctggaagcatcccaaactgacaatatatcatcgagggcgctaggtacatcaccaggtggccccagcaccaagtgcttgggcgctccaaacagaaagtattcttattttgattttgatgcctctaacattttagtgaaaggtcttatttatgtctaagtataaagtttgagtcattttcaataagatgaactcaaaaattgagatcctagtgtggaatgtcaacctaggcactgggtgaaaacccttgggcactcggggttgactttcagggtgttatttcatctattttcagttttcaggccttggacatgaattcttcttgtccttttagtttagaatactaaaagatggtgagttgaaaacaacttggcgaatccaaacacccatttcagagttcccagactcgactgctatgactcgggactactcaaatcagggatattttctttcttgccacgtgtcaaatatttatgtctatgtcactagggtgagttctcgggtaaacagataatttaaaaataatagtcgtgaagaactctagaagagactccctagagaaattataggcataacatatttgattataatcgaactcttgaagtggttttatataagtacctatacataatatatacatatgttgaaaaatatgtaaattaagagatctctataagttatatcaataagagagggaattattatataataaaattattgtcgacaacaaatgttaaatatttgcatatgcaataaactaatataagatagcaagaatcatgatattaaatttgtcaagaattgtcgacgtacattttgtttttggcacccaaaaaaatatgacacaatctaggcagtataaagtttacgcacaaaggatgaagtaatgcatgtagggcgtgtaaataagtattttgttggaatatgttttaccatggtctagatttactaacaagtatgtttttaatatcctaaatatgaatttctaaaacgatgaaaataaacacataaaatgtatgagaaaccatacattggttg

SEQ ID NO: 112825 - DNA, 1625 bp, Cannabis sativa
  modified_base (1592)..(1592): a, c, t, g, unknown or other
aaaagaaaaaaaaatgaaaaaaaaccctgaaattgcgaagagaaaaaaggagagagagatacacagagagaaaaagaaaggtattcattattgtaatcacttttcagcaatgtgcagtttatttctatcatgtatatattgagccagtttacctgtatgctcttagagatggagacatttattattgtaatggatctttttgtctactatgttctctgctgcatttaattcagtgcttacacatactttctaaatgtaattggcgctaaagattaactacagtttggaatcataatgagatgtttttgttttctttattggaaactaataaagtgcttggctaagttttgtctatattttatttgagtttgtacacagaaattgcactcaactttgacccaaaacttgtggcagctcaattaattgtatttatttaaagatgattactagttaaaagtgattgcctcataaatgttaagtttgtgtgtaatttatgtgagtacttattattattcatttattttgtaaatgtaccaacttcgggtttgtttgaatttatttatttaaaactgaagtgaataatgttacccctaaaagaaatgtcgcaaaatgtgcctttcaaatgtcgcaaaactttttgttctgcactaatgtgtcattttgtaacaaagtaacaaaatacataaacatgattatttttatgtgttctttagtttataaaattaaccatttcattttgtatgatttttgcaacgcatttttaagtcgccaaaagtatgtatatttttatttataaaatataattaaattttctttttttataaaatgcattttgtttcaaatataattggccatttatttttgtacgatgtttagcgacgtgtttttgcgtcacaaatagcatgttgtttctatttataaaatatatattaatagaagtgtagtgatatcatatgcaacacaaatttcataatgaacagtttattataaattaaaattatatcctagcaactaaaacaaaaatacaaccatttccatatattttgtatctagcagaaaataaactgaaataatcaaagtttgagattacctcttgtctcagtacttcagcagaattttctctgaatgcaaaattgaatttcaactcctatgcgtgtggggtgtaacgtattaaccacgtgtcttccaagctatttcttgcacaatataaagaggaagagtggtcttatttttcaatattgaatataaaacactttgatatctcaacatgagagtatgtattcttgtgtgtttgtaaaatctaacacacaaggtgcataaattcttatgcgttcaacgtggacaaacaaatcaaacacacaaggtgtataaatacttatacgttcagcataggcagagggagaggaagtgagaaaaaatgctattctttctttagacaataatagggactaaacattttttttacaattcatgatttatttataaattctttttgagtggagagcagaccctaaaaatatatgggcctaaagtaaattaaattttgggaccctcaaaaatatatatataaaaaagggaaatttacatggtanactaacttttgccatttttttacaaaaatactg

SEQ ID NO: 112826 - DNA, 4578 bp, Cannabis sativa
tctaaacataaatgacttctaatcttctattgataataaattagggcataaaatcccaacaaagggatcattccaaatactatcgctttcataaagattttagccatgatacttacgagtgcaagattctaaaagaagagaatgaattcttgatcaggaagaacaatccgcacataaggaggtatgtaaaggtcaatcaagaataaatggtcggccaacaagatgataaccaaaacctactgatgccaccgcctgtggatggacatctacaacttatcataggggacccgcacatagcaggagattctaagaatgcaagggaaaaatacgctggaactcttcagtacaagcaaggagaagaagtcttggtcgtataggagaggaaacccaaacagacacgaatggaagattcaattataactttcagtgatgaagattccaaaattgtgagttacccacacaatgatcctctagtggtggacgtacaaattgcaaacaagacggtggctcgaacagtgatcgacaatggagcctcgtccaatatcttgttcaaaactatttatgagaaaagggatcttcatctcaaagatttaatttcgtgcccatagtcggtttatggattctcaggccagagcataacaccactcagaacatatcgcctaccactcacagtgggaaaatctccaacttcaacaacagccatggcacggtttttggtggtggatgttccatctgcttttaatgtcatgttaggtcgtccagccttatatgacttaaaagtggtaacttctgtttatcatttgtgtgtgaaattcttaacacaaagtgggatcggttgtccgaggcaatcaaatgactgcacgagaatgttataaccttgccctggccaaggctaaaaaagaaaaaaaaaatcatccaaggatcagagaaaggaaaagccaatgctaaatagggattcgctcaaggtagggatgaagatgtggatcttcgccttggggagccaagttcaaatgttgggtcagtggaagagttagaagaggttgaaatcgatccaaataacatgtctagaaaaatcaaaatcgaaaaagatttgttgctcgaaataaaaccaggactgataaaatttctaagagaaaacttcgatgtatttgcctggtcgcatgaagatatggtaggaatcgaccccacaataataacacatcaacattgatcctaatgcaaagaccgtgcagtaaaaaaaagattacttgataaagaacgagcacatgcattaaaggaggggattgaaaaacttcgaataaatagatttatcattgaagctttttatccagcttgggtagcaaaccccgtcctagtgctaaaccaaacattaagtggcatgtatgcattgactttaccaatctaaacaaagtgtgcccaaaagattgttttcctctctcaagaatcgaccaactcgtagatgctatagcaggtcatgaaattttgagttttatagaagcgtattcagagtacaatcagattagaatgcatccgcctgactaagaatacataagcttttgaacagatgttgggttgtactattataaagttatgtcgttcggattaaaaaatgttggggctacctatcaaaggttggtcaataaaatgtttaaaaaccagattggacgaaatatgaaagtttatgtggatgatatgctcatcaagtccagaaagactggggcacatagatgacttggatgaatgcttcaaaatcctcagaacatacaacatgaaactcaatcccttaaagtgttctttcggggtcagctcgagtaagtttcttgattttattgtcaatgctcgggggatagaagccaatccaaagaagattcatgcccttctaaacatgaagttgccaaccaaagtaaaagaagttcaaagtcttactggtcggatatctgagctaagcaggttcgtgtcaaaatccactgataagtgtgttcctttctttaatcataaaaaaatttatatggttttaacaattaaatattcttttaatttttttgattaactaatctataaaatataaataaaataaattgactacgatatattattttaaacttatttgcttaaaaaattattccttatgttttatttattattttgaaagagaaaacttattcttatttaaaaaagaaaaacattttattattttttgaaaatatttttactttttttccaaagataaaattaaaaattatttaaatattcgttttgtagttatataagcaaacatatttcttataattaatatttgagaacggatatgatcatttttatttaaggataatttcaaaaaatatatatatatataaaattaacaaaaaaaaattacaaaaatatattttgtacggagtttttaatatttttacgttttttagattttatttatataaaatacagtctttttgtatatttttatgttgtattcctgttaatttgttgttgattttttgttatttgtctattactttttatgttattttgttgttgttttaatgttgttttcttattattttcatgtggttttcttgtgtttttatagtttaccgtgaaaatgtaagaaaaaaaacctttaaacgtaaaaatttataaaaattggtattttatgtaattatctcagagtttgtatatagatgttaatattactctatgtatgttaatattactctatgtactactttttaacttttattttatttttacgatttgaattgctccatcggttgtgatttgagttgctgcgtgagttgcgatgtgaattgttgctccgtgaattgcacactatattcagtaaaaatacaaaaaaaaaaaatactttcaaatatataaataaaaaaaagtcctatatatacatatttatattttaaaatccaacatacttttcaagtgttggttagggtctatgatagggagcaatatataagagggaccccggacgataatggttgccacattgagtccagaaaatgatttcagtggacattgattgcaatggttttcccctttaattattagaaaagcttgttctcattttcatattctatatacatatatatgatgttttagtttcaattgtttccattagtatataggatttcttgattgatatatattgatcttattgtgtcaagttagtgttgacacgtctataataacatataattaagaaaaacacaaacacaattttattaaatagatatatgtaagaatattgaaatacgaagacgacatgattaattaacaggtcatcacgacatgatacgacaaaacacaacaacacgatcataaagattaacatgaatttttctaaaacaatattatgaagcttatgattatttaattcttgttattatgtcaatatatacaattacaattatcgtatcaacaattcaaacgcacacacgatacaattattaaaaatatcatccaaacatatttatatcatcatttcgagtcgtattatcacatcgtagcccattaattaagtcgaaacaaagtacacatataatacaccaacaaaaatacttattaaataattattaattttgggtgtgttttgtaaaaaaaagtttgaattttataaaccacaaaagtaaaaatacattttagttttaaatttttttgttcttaaaaaaatgtatatacaacggtttttgttttttatttaagttaggagagacacattaaattgagaaaaaagtgaggtgagagaaagagaatacaaaataaagcattagttacaaaaattgtttaaataaactttaaaaataacaaggtgtttaaattctcaaaattttggattttcctttttaataaaaataaaatatacaaaatatgttttttgaaaatatttgtaatgaaataaaactatttaaataaacaaaggacaatttatgttacattttaaccatctactttttcttctatgtaaacaactattatatatacgattccatcaaaatgccaaaacagctaattttagcaattataatataccatctcaagtattgtttttcgctttttcatatgcttctacacgtaaagacatttttagttaaatatattaattagagctttggtacttattaattaattattatacatgctaaatatgctggtcaaatattctcacatgaccccatgttcttaacccttaatcataagttgtgacgaagccaaagccaacttccaaataacaaaaataagtagtacttaattggtatcaaacaaatataaagtaaaaaaaaaaaaagaaatattgaataatcagttgggattacagattggaaatctattatgatactaaggataattacagatagaaaatcatgtgcagtgtagttagttatgggcggcaacgagatgataacaaaaaattagtaataaatcttatatatatatatagaaaatttctgggtagtaccatgggaacaaaaaaaaaaattaataaggtaataatctaataacctttttatggcaagtttttaaaaattattttttttaaaaaaaaattatatttattttttataaaat

SEQ ID NO: 112827 - DNA, 8721 bp, Cannabis sativa
  modified_base (87)..(89): a, c, t, g, unknown or other
tttcggcgtgttaaacttttccgaatttcttaaaattttgcaaaatgtctaatttacatgatcattagaaaaaatttgactaaaaannnatttcagatactaaaacagatagatatgtatcggcgtatcacttttaagagggtacattatagaatttcccaatgttatatttatatactattataactcaaaatgacatgtgaaagaaagacattgtatggattattgaaaccattatcacaaaaactaaaaaagtttgtataactgccagttatgaacaatagaaagatactctcttcactttggctattcaatttagtgaatttataatgtctgtcttttattacaatttcttaattagtttttgtactcaaacacatatgtagaattcttttttcaataaaaagaaaaaaaattatagcggtgttcgttacaattacaatattatccctgtaaattttgaaaaaaatttaaataatttacaatatcaaaaataaatttaaaattttttgagcacacgtgatagactgaaatataaagaatttttaaaaaatttacaaaaacaatattgtaactataacggatataattgtaaaaaaaagatttcaacatgtgatttcaaatgtaaaaattaattaagaaattataataaaaagttgtaattattacttttcaatttaaattctttctatttatctaaatattttggaagatatgtttttattaaaatttatttatttactttatcaaattttagaccagttaagaaaggaaatgtctcatgtcccaggtcattattagatagaagatttttgtctttgtgcatctttaacggtttctgtactatacctcatcttttgcagctttctttgttacatgtattttttgttctcattttttatttttttaaaaaaataataagtaatatttttttttgaaattatatatcaaagctcctcaatttcaaaaatgtaaacatgaatggatataacatctggaatgtaagtccaaaatatcatctataaaacctttctctaagaatttgaatttgcagaggaatactactgtcaatctcttattaacatttttcagtcaacgtattattgtcaaccttctattacaacttctgtgcttgaaaacacatactgaaatattttttttttatagcagtgtttattataattacaaaatcatccttgtaaatttttaaaaaaattcaaataattaacaataccgacaacagaatttttgatattctaatttaccatacgcgttcaaaaaacttcaaatgtattttcgacactaaaaactattcaaaaattgtaaaaaatttacaaaaatgatgttgtaagtataacaaacaccaccataaaaaaatattccgacatatattttcaacacagaaattaattgacaacaacagtcctctttgcatcaattgaccaaatactttcattctatagagcaaagtagaaatgatcacaatccacaaatagctgaccaaattgaatagagtcaatttataaattcaaatagcaaattcctataacaacacaaaagagttcgaaatcaaaatcataattttttaatgtaactttttcaaaatctattattaattaagagcataaaaatccaagtccccttgttccaatgaataagaggattagctgatttataattattattattttttatggttttataaccaaggtaataaactttcaaagctaattgaagactcactcaggtacacaacgactccccaagtgtaacgaaatctcaaatctctccccaccaccatggaagtatctacattcaactcgagcccgggggaaattggaggacaccaactacttgttcaaactatccgaaaaaatcggatgttgaaatacagcaaaagaaaaatccataaaagtgatggacaattcttcacaaggacaaaaatcagagatagaccctcttaaaaagttcttaattgccagtgctatccacactcccaaggctttctatttattgaataataataataagacataatttgatgattaacaaataacaaatttactctaatatttgggttaaaacccatctttttatgttattaggtaatagatcagttatcatgtccactaattattatgcttgccaaaggtacaaagggatatttggtcaagaaaaaggaaataagcaacatgataacatggagaattaagagactagttggattttaagtaaggaaaggaatgaccgaatttggtaagggcgagctcatgatggagcctgcttcaacacccggcagcggtattctcccaatgcccatattgggaatatgtttctatatgccgcataagtgatcatacaattcctattgaacacacccattatttcctgcgattaaaaccactcatttaacatgctcatcattactttaaaaaatcatgatttttcagacatatacagagaaatatataggaattacctgttgaggaaagtctccattctccatttgtgagtttatcaaatatctagctgcatgatgcaagggtgtggcgtctctctcagcctgcatacacacaagcattacacttaatataccaattgggctcaactgttcttaacaacatcagaagtttgaaacaattcatattgatttgattagtcaaattctgatgtatacctgtccagcttcaatgagagacatcatagcccatccagtgttgaccaaatgtgacctatttccatcaagatttgagtagacctgtatggaaaatccaaaagaggttactgccgagagaattaaataacaaaatcaaccaaaacctatttaagctcaatttatcatctggaatcatttctgtttcactattatatgtttaatggattatatgttgacaaatgtaaaaagataattatattgtgcatctcataataagaaaagtgtgaaatggttctatccaaatcagactaagcttataaactagatgtcatgcttaggataaaacttggagcatgtaaaaatcttaacaaaattaaccttgtcttggcatgaaagatagctctctccccatccaccagactcaacctgttttgataacaaaaagtcgcatgctttgcggatgctagagcaattattgtagctctttccagcagccaccaaccctttaatcccaaaccatgtaccgtaagtgaaacaaacaccccaagaaccatacctgttcagcaattccaaaaattataagcaaattcgaactcttaagagaagttattgagacaaaaaagtattatataaaacaatgtatgcacagattaatcaagtagtgcacaaaactgatttgttgggaggaaaaccaaagtcagagcttatgaattgtaaaacaggacaaaccatgaaccatctttagcttgaattttttcaatgtacgcagttgctttcttgatacaatgctctatttcttcttgccggtgctcagggtacaaatttctaaatgatatcaaagcctgaatagcagctgaggtgcattccacatatctaaagagtcattatagttagtaataaacggtgagcctaaaatcagatagaaacataaaactgatgtagcagaaggattttttttggctctcacggataatcaatgacaatgtcaccaaaggtttcagcagggttgatcaactgaaatacaaaagaaacaacaaacaattaagttatcatctatgtattacaggtggtggcaaaagagctcaaacagacaccttctatatgtgtgttttatgggaaatatgcggtccaaaaagaaagatgggttccacacatatgagcaacataacaacacatgaataccatcatgcagatccaaaaattaaacagtatcctactaacatgagttggtagagagcttatatgtgaaggagaaacattggattttaataatatattgcacagtaatatgggtgtacctccaaccattggtaggatctcgtgagctcatatgttgcaaagccaccgtctccattctgcaacattatgattgggaaaaaaaaacatcctatcaccaatatgatatttctcctttcaaatcataaaccataggaattgtagctattaatacgagaacagtgtatgagaaagaacagctttgtcagctaaaatatgtcccttttaatacatttacagagctgaattattagagcatcatgtactagatatcattacacgagagacttaaatacagacattgttgtgatttgccttgtcgatatttattactaactctccaatctcatatgacatcattacaaagtatttctaacacaggctgctattgatcatcacaatgaaaagaaaagtcttcttagtaaattacagcacccttgacaattatctcaaatgagagtctttactgattgaacagtaaaaaaatctaacaagataatagtgaaaatcttgaatcaccaacctgtaatgagagaatgacattgacagcatcatataaacgatttggctgtacaggttcaccaacaatatctgatggaagttttgataatagaagagcagcctgagaagtgagacagaggaattataaaccagtaaataaaataaatgaatcacatggtatgttgagtgcaatcacttttaagccttctgctgtacaatctgagatgggccaaccatgatcacgggtggagaaaggccaagcaccttttgaaatgtggcgataccaataatcaagattacctgggcaatcttctaaaacctataataaaaataaaaaaaataaaagagagagagaaagaaagaaagaaagaaagataaatacatattagtaactagtcagctaaggagaggtggggaaaaaggcgtcaaattggatttggaagcattagttgaatttagaccacagaaaagcattgacctgcgagtttttaatgaaatcatgtgcctttcttaaagttgtgctgtattcttggacaagattggttgacatgattgcctgagcagcaaaagaagtgtcccataattgacttccattatacccctgcaataatgtcatgtatttaaataaagttaacatagtattcacattgttagttgcaaaactcgtcgtctttgaagcaactatcaaatgttattagaaggagctaaaattacaaaaagccaaaatcacaaaaaccggtagtgacttaggctaatggccacaagtaacttggagtctcactctatcacataataatcttattaagaacacctaaatagaccaagttattggcatcttccaacaagatgtgataacaaaacaaacaaatatcaatttccttgtaaggtgtaaaattctacagcaaataatatgcaggtatcattctacagcaaataatatgcaggtatcattctacagcaaataataggcaggtatcacgctatgatttacaatagctacataagcaatctactatctaaaagttaatttccgcctttgttcttcacttctatacaactcaaagctgtttagtactcagcacaaacatgaattcaccaaaccaaaagaaaaatgtgtaacataaatataagtgctagaaaaaagatgaaacatttcgacctgcattttcatgccatcttcagcaatccatagataatcattgattcttggaaggtgcaacttgaaagcctctgaatttggatcttcaacccaacagcaaagcatgtttaatacctgtaaatcacagtaataattatattccttcattgaaataagtaaatggtttatgtgttcccttcttaacagtagcaagttttaacagaaaaatattaccaatagaaaacatcgtcaataccttattcacaggtccaatgcaaatataacgagtattctcatcttcatagtgtatatgctccattgctgcgcagagtgccttttctctcaattttttccccggccaattcatcagaactggctcaacagccttgtgaagagatgcccaaaggatatcttgaatgagcggatgggggtaatacaaatcttcctgtaaaaacaaacgtttcactttttgataagagagagccaaaaagattctatcactaattctgaactccgagcaactaaaattggtactttatgacaaccatgaaatcattttggttattagaatcggatatgcatttttctgattgactcatgctaatgttgtgtatacaagaggaaactgtttgttgtggttccaatctagggaaattatatttagatatactatgatcaagactcgaacaaatttgctcccaatatctccaacatgttgaatatgcactatgatacaaataagagcataaatggtatatctctagttagaggcatgagctagacttgaaaaacagtatctttctgagcatgaccaacctttgcacatagattccgtgcctcattccagtctatttcatgatacggaacagtgaagagctccttcctcaaagacaaaaccgttggtgtgattggaccaacaaacctcttcccgtacaagtaggacattggtaagtataccatccgacagtgacaccacatccttcctgtacaataaaaagaaaactttaagcatttctattttggcaggatgaggaaaattccatttcacaaacaagaaaagaaaattttcactcaacatatgtgaagtcattcggcatcactatgtaatgccacgttggggaaagaccaaaaaaaaaacacaattgcaacaaattcggactttatgaaaaggagcgaagagattctcaacaataggagaatattagaaatcctaaatcctatagacagaattcggaatagaatgatttcaaagatataagacctggatgaataggaaggatgtacggaagaagccatatctctggaggcaggggattattgccagaccattcaaagacaccaagtacctataatcaattcatataagcatcgtgatataattaaatgaaaacgcttgagcacatccaaaagagaccactgtttagatcaagctacatattcaagtacaaagaggttggagttcatttctcaactgataaccacattttcccccatgatgtaattgcagtagcacccccatggtcaagaatccatttacgcccattctccattgccccttgcccatcattaggctcttcaccaagcaatcttaaagtaacatagctcaaaacggaaccaaacatagtgcttgacccttcaatgtgcaaaccccaaccaccatctttgttctgcaatttcatttgaatcaacaaaattttagaactttgtacaacaaactatcgcaaagggtagaaaagctaaagaataagtgtgttcattggctcaagttcaatactttttcaataatccatcatccaattcaaatccttatttttatctataatagtctaagataccaacatattaaaatagtataaaaatgaattagtgtgcagaataaagctaattttaccaagtttctatgatatcaacagatgatgtaattagctagttagaaattcgacatttacactcaactagtttaccaaccaccaaaacgagtcaacaggatcatttgaaaaacaaactgtagatgaaatgagccagttaactacttaagtgaggtttcttgtgaattttgcacatcataacgaaagtgacaggattatgaaaatgagattcaacttgcctggtgattgtaaaggtaacggcacatctctttcttatgctcttcggataagacagcattaagtgccccagtgatagacaaagcaattatctgactcattcaagaaatgcacagttcaataagtaattacaatgaagttgaatttaaattaaaatttgagatagacgaagaagaagaagaagataacgtaccaaaccaggcaaaagaaacatcggacctccataatcaccaggccaatgaccatcatgagcttgtatggaagaataaaaattcaaagacctaatcaaagtattagtaaccatctcttcagtaacctcttcgttatctttcactttaacctgcgccggcatctctttcgcacatggattctccttcgaaagctacaaaaacataatcgagcatttcgagtattaagacttgaatttgaaatggcagtgaaaatgtttgatcatgtaatttttgttttacctgaatgcgcatgagtagatcggagctgtgtttcttgttaaagcgatcggcgtggaagacttggcgagcagtttcgatagcgtcgaggtgttgggaatcggtgaatgtggaatcgaactcccatgtttgtcttccgacatggttgttgagagagcttagccatgaattggttccgccatcggcgatcttaagcttccacattggtacttcgtcttctcccaaatccaaggaagactctctctctctctctctctatctctctctatagctctatctctgcaactctgtcctttttctctatttcttgtttttggggggttattataaagaatggaagaaacatattgaattgaattaaattcatataataatatggtcccaccaatttaaggaaggaagaagaaaaaaaaaattgttatcccactcaattgccaattggttttgagatagaacctcatgattctcaacatggtatcagagccatatatcccttgcgggcaaatgatcctatccgatccgcacctatacagatagtgacatgtcatcttgagggggaatgttgtggacattgtccca

SEQ ID NO: 112828 - DNA, 8415 bp, Cannabis sativa
tttttttttggagataaaatgctattatattaaacaaaaatttaaaatacaataggcataattggcggaggaacttcctccaaccatgaacatttagaagacttttatatttttcaaaggattcatgttattctttccataataaatactaggtaaaactaaataatggttaatttactaaatatttactaatgttctttgacttaatagttagttacatatttaccgtaaataccgcttactaataagttggagttagtatttacatatgcgatgaaataattgtactaatagttataataaatacctgagttaaaattaatacctacatagttatcgaagaattaatgcttaatataataaattaaagtccgaatttacgaagttgtcaaaatcgtaacatagaatatatttatgtaatacttataataattaatattcgatcacacatatattatgtttattatacgtatacattatttaatacattgttttttttctctaatctaatctttgggtagttatgctacaatttttatacatgttctctaagagctcattgtttaaacttaaacaattaacaaaataaatttctctagatatcaataaataaaaaaattatcatattttccatttttacattaatacccctagtaaaacaccatcatcatcttcaatgaaaatttgtataaatagagacacaaaaagaaaattagaaagaacacaaatacactttgctctcttttccattttgacatttttttccatctctctcccttttggctctaccaaccaccatgaccagaaagaaagtgaatatgcaatatatcactgatgactcttctcgaaaaaatactttcaggaagagaaaaaatggtatactaaaaaaagttgaagagctaagcacattgtgtggtgtcgacgcatgtgcaatcatctatgatccaaatagtggtgagccgacagtgtttccatcgacggaaaaggcccatcatgtggtaacaaattttttagctatgtctaagattgatcaaactaagaagatgttcaatcaagaggagtacttgaggaataggatcgagacggccaaagaacaagtaagaaaactaaagagagataatcgtgagaaggagttgattcaaatcatgtactccaatcttgaaggtaatacaaaccttcaagacttgagtgtcgaagatttgaatgatctcaccaggctcattgaccaaagcatagaagaaatcaacaagaggattggagaaataaatattaatatcaagccttctcagatgcctgagacaacagcaacaacaacacccttaacaactccaatcatagctgaaaatcttgttggagaccgaaatgctactgtggttgatgttgttgcgactaactttgataacaatagtcgtaataatatctctttgagttaataatgggtgacacaagtaaaattggccaatccttaataataataatcctatggaatttggcagaaatagacttttccatttgataacaattatttggaataaggatatctctccatgaatcatggtgattatttgtgtttcgtattttttagatttgttatgtattttgtgtttggagttgtttcgctttggttatgttgttattgtttgtgtttctttttaatgtttcgtattttcaattaagttaaatgttgagtatttaagtaatttctcgtttgttcttgttcttaactttaataatttaatttaaaattgcattattatgtttaagaaaatgggttttgttctgtattaatgatttcatggagatttctcaaactttcaacctctttaattatttttattaatgccaaacatcaatgaaacatattttattaaataaatttaatcatacaaggtcattattataagttaaaattcactaaagaaaactatcaattatctcatatatgataatatcaattaatgttaattttaattcagtcaaatatatatagtaataataagaataaaaacataaaagtcaattaataggatttagcctaatgatttattttatttgaaaaaaaaatgacatgattttattgtaatgttatttcttgcagatattaccataaaaagataaggaatgaaattaattaacaatttcaaaagcatgatttttttttacaaagaataagtaattgatacacaataagaaaaagaaaaaaaaaactatttaaagtattgctaccaataactaaactaaaatttattaaaaaaaaaaataaagccaaaataaaagtgttatgtaactgagattttatttgctataggtttttttttttgttcatgtgttacaaatataataaatgaattaaatgaatattagtttttgctttgaaatgattttttgtttttttttttcttttttgaaacggatttttttgtaagactttgactaatatcatttttacttattggagtaactgtaacatacaataaatttaccttcacatgatttgtatgtgaaaaaatattgtattaatatatatatttatatatataaacaccatataccatgtactatgtatcatatgtaacagcccattgtttagcccacaataacaaaaagtaaaaatattagataaaaaaataaaaagtaaaaataaaaaatcttctacctattaaaataaattcaatcaagagtaatttgtaataaaaatacctaagtttaacttctagttgtaaataaatatctaaatttaatttttggcagtaataatacataagttataattttgatatttctgaaggtacctaattgttaagtgaagtaaattttcacgtggtaatccctaattagtctaggtcattatttttttttaaaaaaattagtttgaatatatcaataagaaaatgacacgtaaataattacttgaaatttaatagtaggtacttacggagttccaaaaatataacttaagtattattaccgcaaaaaattaaactcaagtatttatttgccatcaagagttaaacctaagtatttttaccgcaaattattcttcaattaattaccacatttcctaatattaattagtataaattaatatcaaatcacgcatattttattttaagatttttaaagtgataacatgactttgatttttttgtagtgttaattgctaaaaagttgctaaaattaaaatatagttgctaaaaatgtactaaagatatctaggacgacttgagagtgtcactgattttttaatttaataattattatcaaaaaaaaaaatactaaccgctcactcataaaaaatatcactttatgtggtgttatttttaaaaaccttaaagaagccaaacgttaaatttaaattaaaatatacgagaaacaatgaaatgtatcaaaaaatactatttacagttatgcagttttgaacaaaaattgatacgttttagcatattcaaccgaaaaatacttctttgtcacatatacctaattaaatttgtgtataaatagcggcacaaagcaaacgataagagcacactaaaaagaggaagaaaggtttggtaaagaaagtgagtgagttgagcaagccttgtgttttttttaacggtaggggtgaatcttctaatgaggttcggtaaaattttaaagatggagcgaagcaataagatggtgaaccaagaagctttccttaggaaaaaaatcaaggaaatgaacgagcaattgataaagctgaggaaagagaatcgcgaggagttaacccaactcctgtactctaatctatcaggtaaggctaatcttcataacttatctgctaaagatttgaatgatctcattgatatcattgacaagagtttggaaggtgtaaagaaaaggataaagactattgctgctaagaatgatgacaccagcttggcgactcaaatggcgattgcaactaaggctgagggttctgcaatgaacgagaatttcaataatgaagatgggaaagctaatgccgttattattactgacaatagcactacaaattaagtattaattgcataattttgtcaattgggaacaagaataaactatgttattgtttaaattaatgtcatatggtaatgtgagtggtaataatatgtttcatgttttaattaaataatgtcaatattttactttatctttgtcataggtgctctatgtgaaaaatatcgataatatcaataaaaatattagaaatttgagaggttctaattaataattttttttgattttttttaatcttttacggtgtaatattgctaatttttccagagaatatcgatatataattggatatttggtggaaaagtgacctaaaagctacaataaggttgagttatggacattacacatttgaaaaaaaagtttgcattactcatgtaaactctacaagggacgttaatatttgtaagtttttcttatattttgaacttcttaaaaatttattttagtattagtattttttttatttattattgtatataattcttcaaaatatttgtattttctataaattttatcattattttcttatatatgttttctaaaattatatgatatttgtaattaaaaaaaattgtcacataaaaaatatatagaatatatttttttaaaaaaattaattatagtaccaattttttcatcaacaataatattattttatttattttgagcgcttcatataataaagtttataaagcaattactatagtgaaaaaaaaagttatttttgcaagtaataaatatgatatatagtaattattatacaacacagctatatgacacaaatatgggaaataaaatacaaattatacagtaagcatgagctgtcttagtcaaatatggtcatagatatcataattaataaatatttagtaaagtctttagccaaataattaatatttatatatatcaataagatatcatcatgtaaattttattcctttaaagttttgtaactgataattttatgtaataaaaatggccaaaaaaaaaaaaatatgatattttcatccaattagataatagggtttggattttcttctatttgtggacaaaataattccattgaaactttaatttcatttgatttttttatttgacttttcttttttggttctccaagatttccaatttttttcagatttattatgtaacgttacaatttttttttttattactcttctctagaaaacaaatttaccattaatgttttattatgccaaaatttgaaatatgtgttgtaactgtccatataatacaaatgtaactctcaaataaaaaacaattaaataaataattagttaccatattcgattgttaacatttattcctcatgaaaccctaataccaccttctctatgatttttgtgaataaatagtaccccaaagtgaactaggaagaccacaaaagtattatttgggatatgtttttgtctcccattttggcacactagctagtttctctccttagctcttgttttttttttctttttttcttttttggcttaacaattaagccaaaatcatgactagaaagaaggtgaagttggcttacatcaacaacgatgcctctcgaaaagccacttataagaagagaaagaagggcctactaaaaaaggtgagcgagctgagcacattgtgcggtgtagatgcgtgtgcaatcatttatagcccgtatgacactcagcctgaggtgtacccttctccaggaggagtacatcgtatagtgaaaaagttcaagaagatgcctgagatcgagcagggtaagaagatgatgaatcaagaagttttcctgaagcaaaaaattggaaaggtgagcgagcaaatgaagaggctgaagaaagagaatcgtgacagagagctgaatcgactcttgtatggcaatctctctggtaagatgaatcttcaaggtttaactgttacagatttgaatgatctcacatcgcttattgaccaaaatttgaaagatattaataaaagaatggaagaattagccaaagaaactaagactgctcgaatggcggcagctgctgcagcaaaagtgcctccactcatgaatagggaagtaaactctacttctgctactacttctacggcgtataacaataatcgtggcgggggcatgcagaggaggcaagacttaaatacacaaaatcaagccaataacaataatgcaatgaagtttgggggaagggatgcgatttttccattaaggaacaacaataacatgaacttgaactaaatgttctttagttatgaggattatttgtgtttctgaagttatttgtgttagtctggtattttattttattctcttgttgttgttgtccgttaaaattattgttaattttattttatgtgtcctttttatgttattttaattaagtaatatgagtgttattggtattgttatatgtagttttcatttcaatgaagtttttattttagttatttattgtgttatgttattgtttcagaataatctcgaattttgtttagatttcatagttttattattttattgtaaatttttatataaaatcaaatataatcacaagggcattgtaaaaaataaataaataaaaatattctcttttatattttatattaaataaataaaaaattaatattcccattttgatataattaagataattataataattagacaactggatacattttaatgcacatatataagagtaatgccaacacacacagaatatggtaacattaaatttgaagttatacctatttaattgattttgttaaatgtagattaattaccctgtgacatattatatttttgataaatttaattgcttattctagtaacggattatatattaaataattcattgtttatgattgttatagatacatactataccctcaatatatatttaccgaaaaccaaatataatgagagattaagttaaaagaaaataattttcaaaaaaaaaaaaaaagttaaaaaaaaataaaattaaaaagagaataacgtgaattttatgtggtttagacgttaataaattttaatttacaaaacagttttataagttttttacaatgaatttttttacagctcggatatgtaattttttactttgtgaactttttgtatggaagacataatgccatatttataaatacatatgcttaatgggctagacagatctaggctatactaaggtttttgtttaacaaaactcagtgatggtataaaatatattattttacattacatttgacctattggacttggtaccaatttcttaaacttaaaacattgtcatatgatataatattgttgacagtgacagaaagaagtgtgagctgtcgttggaaaaaataaatgttagagtagtggtatttttcttaaaaaggtgatttcctttctgttgtgtgtatttctaaggtttggtagaagggacatgtcaccatatttctggagatcgtgtcagagtgtgccacgtaagtagtttctgagagatcaaccatcctaaatactcttttagcttccaatcccggtgacccttgaaggaatcctcgttaagttctagcatttcttatctcttgggtaagtgatcgaagatgatccatccttctaggaactccaaagatccagaaagtagagtaggattcggacttcctggctggatctatctcacttgatagatgggccatttgtttgtccgactatgccaaattgatagagcattgaagtaatttcgaacgcaaagaattgaaggaacttaaagcataaatttaaggctaattataatttttgctccctgaactttgatatgtaccaaatcatgcttcttgaacttttttggctattaaaaatttaccctgaactattgagattgttggatttaaggacttttgtccaatttcattcaattttaccaattcagtcattgtccatgtactaaactatgttcccagaattttgatatctatcaaattatatctcttgaactttgacatgtgtcaaatcatgcccctgaattttcatccatattacacttttgttactaaaattagacaaaagtctttaaatccaacaatttcaataattcagggagaaattttaatggtcttcaaagtttaggggcataaattggtacagatgggataaaaattttaattagcccatatttaatgatttttttcttagaaaaaatagaattttttatttgactttgactaattaactaatgtcattattttagtaactgtaacatacaatacattcacgtgatttgtttgtgaaacactaagggaaatttgaaaaaatatgcatgaaataccttaaaaatttttccctaatctaatacattttaaaatttaaaaaatatgaccactttacaataaacccaaaaatacccctct

SEQ ID NO: 112829 - DNA, 2235 bp, Cannabis sativa
  modified_base (2178)..(2183): a, c, t, g, unknown or other
ctacatcatgggctcgagctgccatttcggctgtggggtacgttccaagccaaattctggatttcttcctcggctcacgaatttcagacacccatttgccccagttacgcattcttacacccctatatgtagggtgtttattctcttcattacttcttgacctcttcttgctttgttgatcatttgaccctttaatgctaccatttttcattccttcaactgcttttggtgagccattttgatcagcattcttcgtgtatttctggttgagcccaccaaagaatttggatgaaaactctaacgaggaggaggaggaagaggaagaacacgatgtggtggtggttgttgttgtgctgagcaggttttcttgagcatcactctccatgttgatctcttctgccatgatgttgagtcttcctagttctagagctagacaaaagtgtatatgtatgtgagagagtactgtctataaaataaaattgagaggtggtgttggcctttttattattctttggccaaaaataaaatacgtaaagaaatctagggaaataaaaggaaaagagaaagaatataaaaaagaaaagatggggtccaaaacgtcacaatagaagactacatacagttcaactatgctgtttcccatgtgggaattgaataatgtatgtttttagatgttcaattttttcaagtttaattaccaatattattgtgtagagacataattttatagtaagtaataaacataatgaatgtgtatatatatacacaaaaatattatacatatacgtttttgtttgtctacttcggacaaaactcaaatatattttgcttaggttgttggttatataggaaaagttttacatttaaaagttagaaccatgagtttcacatgaactctgaaatggtcctacacattattcgtagagtagatttgcgggtccgcgccatatttgtaaccccaaaccgtctagatctttcatttgtatttaattaatatttggtttccacattgtatttgcataattatattaagtattagtaaagtttttgctgatccatcaatctcaactagtcccaattgtgtctccctccacctactctttgaacattcttatcagacacgaaggtggctaaacacctttatatcatgaccttctataactaattagtaattttttataatttttatttaattaaaattaatagcattttatattaaattacactaatagcgatatcagtttagaaataggtactttttagcatttctcccaactctttagcctcttctcataaaaacatcccaattaaaatattactttaatacatctattatacaagtatatgtataaatgctacaagtttcaatatcatattaaatggctaaataaagcaaacaattggtcaacaaaaatgtgactaatgtgatggaatcttgagatgaaagccacatagtaggggaatgctcatgatcatgagaggaaagtgcctctcattacctaaacaaacatcagaagtttctcttaatttcacgtttggctcttatggaaagagacaatcgatcgatgctccctaacacatatataatcacatgaagaatgttgtaaattgacagatgcaggctagttttcttaactacatatatgaaaatctcttctatttaatcacttgtctatgcacttgtgtaaactgaaagatattgcttgtggttatataataataattaattagtattctaaattttacagagtacacttgtattatgtgtgtgtgtataaatgtataaggaattagatcatatgggtggttctgcttttctttttaatgatacatatatgcaacaacatatgggcatagatggtgcgcatgtgagtgggtcctgaaatagccaaagccagatatcttagccctgtattgggatctactgttcaacctttgattctttttcttggtgaaattaattgaatggtattggacacgtttacttgtctctagtcaataacttgtttgattgaagagattaagttttcagttgcattatattatttgttttttaaatttaagctgtagggtaatagtgtgatttttccaattcatttataacagctattggttttacagaaataatcattatcgaatctttttatttaggtggcatttggtaacacttttttaatnnnnnntctgtttttaaaattggaaaagtgcaaaatattttcaaaaacatgttctata

SEQ ID NO: 112830 - DNA, 5035 bp, Cannabis sativa
ggggagcctgtgggtcgcattgtgctcggcttgtttggagatgtcgtccccaaaaccgtcgaaaattttcgtgctttgtgcacaggcaaacccaaaaacttttctttctttctctttctctcctttattttttttgataacaaatatcaatgcttttccttgtttatttgatgcaacaggagagaaaggatatggttacaaaggctcctcctttcaccgcattatcaaagattttatgattcaaggaggcgactttactgaaggaaacgtatgtatataacctcattctctctcttttgcttcttttgaaaagaaaagatatatattatataaattaaattgaacaaacaagcatctcctgtgcagggtaccggaggaaaaagtatctatggttccagctttaaagatgagaattttgaatgtgtgtccttgcttatacaatgcatttattctgttctttttgttattattattattatcattttcattgtccaacatatttatatgtatccaaatatgcagtgaaacatgtggggcctggagtgttgagcatggctaatgcgggtcctaatactaatggcagccaattcttcatctgcacagtcaaggtcctatgatcccttcctacccttttgcattttccatcataaaatgcttttagttacttaattgagtgttgtttctgttgtcttgttttgtatctatatagactccatggctggacaatcgccacgttgtgtttggacaagttatcgaaggaatggatgtagtgcgcaaacttgaagcccaggagacaagcagatcagatacccctcgttccccttgcagaatcatcaactcgggagagttgcccctcgatgcttgacttgacttccctttttttcaataatgtggtttcacactcaactctcccccttttctcattgtttttctttcttttcgtttttcattttgtaatgttgaatgaggcaatatcccatgtgtaaactatagagattgagtattgtaagtcgtaatggattagatacatatcaaaagcaataggcagcttctttctattgtcattgtttcgttacacttcaacaatagtttaacagtacagtaggattgtggaatcacttattactggcacccatatgacttttcaatactttgtatcacccttatgacttttcaatacattttgtccatcataaacgtgattttgaatatagtctatctataggacttaggacttagtagacttaggagtagcttaatgctcatgcaactacggtttccaccgcagatgactggatcagtaactccagctgtagttgtttccccacttcatcgtcccatatttcaggtagtgcttctttgatgttgtggatgcttcccaaggcatgatctgcaccaggcaccagtactgagctcccaacctgccatcatcaacattctcaaattaattataaatcttcttcttattaagacacttactactgtgtaactgtgtttagctttttcttcagcctcatcaacaccccttacatgttttgaagtcatttaacatggtcatgtgagaaacagattattcaaatggaaattactgactggaaatggaccagaatccatttagattttcttacaataacagtttgaagcccggctgcctttccactggcaatgtttcgagcactatcatcaaagaaaagctgaaaatggaagtaaaaactgtttaactgtctattgttttcattagaaaatcagaactgaagagctgaagtgaaggttctatctcactgttttcttgggctccacacatgcaatctgaatagcggctttcattgcttcaagagagggtttacataggattttggagttggaagtttgcttcctagtctcaattaaaccgttggaatgggcctctggtgaagcagcagctatggagtcaaggggttcaggaggagggttaagagtttcaaagcatatgatgccttcaaaacagtcttccaaccccaacctgtgcagaacttgtgttgcatgggctttgtcagcgttcgtgaagatctgcatacaccaacatggaagaaagttctcttagaaatcgccacaccccatgttttgtatacaattgataatacacaagaaaatcttgaactaccaagcatcacatactagtttccgctgtggcatggacagtagaaggtttctcaacaccggatcaggcttcagtgcatcatagggtaatcttccatggacataagcatgaaactcatcgttgtcaaactcataaccaagctcctgattaaaagagattatttgtctaggggggataacaagaagaaaaaaaaaaagtattcttgagcaagagtaaagtttatttttaccttgaggccggccatggttgtcccacactccctgtataactcaaggcacatcgtaggtactttagtttcttcaatatgcaagtattgcaacatgaactctacaaatgaaaatgaaataagggcttatatatccttatgatcatcatcagtctcaatctcataattgtttaaaaagtcataccttcgatgttctttcggcatgccaagttgagtcctaagctcaaggggtatagggtatcatccatgtctgtatgcacacacaatatggttaaggatgatcggcatggacatttcaaaaagcaacattttatcatttcttaccaaaaagcaagcactcgtatttggcaccattggacctcccaacaacatccatcttcaaagctatcctgaagagagtaatagcaagagttagaaaagcaagtgcatataagaatgaagaattaagaatgcattttcaacatattaagatattaccttgaaatggtccggtggagaatgaattgagagtagctttgagggatctcaatatatagaagtagaagtagagagagacctgtcaaattgattttggaatgtgcggcatgatgcttgcaggggcatatgtctgagtctttgttgggtcagcaactgaccaagtaagcatgttcattgtttataacctttttttattaattaaagctagtctaaattgttaaagttatctttttctttcatggaaaactcattctcctcataattgtagttgctttataaataatggatttctgatcagatcccacctataatatattaggtttgggtatgggcaatacatttcagtgtaccacagtcacacacaccataacaaattaagtatgttattattattactttttcttttaataagcttgaatatgataatgaagaggagtattattcctattgttgctaatcctattctgaagctgataaatatgtgtggtttcaaaatggggaaataatggatctatggctacaggaatcagatgcttgctggctgctgatgccctttctatactttcctttgtgttaagattacaccatcaaggtaagtctttgttgaggatcaagaatatttcaattcactatgtcactagactccccactttgtttaaggggactaatattataaggcatcttaactggatatagatggcaatttgattcagtggagcagtgcactgtggtgacccttcctaaaagtacattttttcttcaaaattatttgataacttcacaaaaatatgctaaaattaagtctaatctctatatataattatatatgagcacatacaattacaaagttgtcatatttaactaacaataatatttaaaatataagatgtcataatttacactaaggatgtttaatttggtggaatttaatagtaatggtaatagtaatgtaatagaataagaatagtaataagaattgattaagatgtttgatttcttattggaatgaatattgaaataaatgataaattgacaaaattattctgtactttaatttttatatttatataaagaagggtattagagtcattttagctttactttatttagtcttttgtaatgtaattctcgttatatagcttttctaatataattgggattctcttgtataatgtaattatgattacaatgtccattacatcatttttaaaagcaaaacaaacattataatgggtaacttgattttattacgatttataacaaaccaaatatcctctaagaaaacttgtagattctcattacagctcagaaatccaaaattttcagcagttgtctaatcaatacaagaaaacaagagaagaaaagattagtctctttttttctaaatctgttcatgcgtatacgatttgtttgaattgaacccaacactataaatgtgcttgatgtgaacaaggataactaaaatcataaattactattaattctaataactaacggaagctcctcatcaaaaaaaaaaaaaaaaaaaagcctaacggaagctattgcaaactagaacataaattacttctaaccaatattttataaaacagtattgagcaaaacgacttgtaagcaagtatgtatgtctgtatatttcaaatataggtatatactaaaatttgcagtaatcataatatcctaaaatctcaagctgccgttagtggtggctagcagttcaattacaatataacaaatatgcacaaaataagttctccataatttttaacatcatgagaatttttaacatagttttttttttttttttttgacagaagaatattcaaattgtggtgaatcacaattcacctcattcaagaacatacataacaaagaacaattaatatataaaaccagaactgaaaaatgtaagttcaaaaaccagcaatgaatctttcaatcaagcatgaactatgagcaatcaatggtaataaactggaaacataaaattggcaccttttctttaacgaggttcgaacatagatcaatgcaatctatgcctacattcccgggaaacaatcagcgtactttctttattgatgaattaaagttgagtacaaagtgtttgatcttacaccaggaagatcgattacaaaggagtcaagctcctgaccctcccaaacactcagtctctcttttctctctaatctggt

SEQ ID NO: 112831 - DNA, 4175 bp, Cannabis sativa
  modified_base (3971)..(3972): a, c, t, g, unknown or other
tctctctctctctctctcacaactccatttaattttgacggctcaagttctatcaaaattaatacaaacccaattttttcatgatcatttccccttccaccacacccagaacagtcacacaactgccatatctcacttctccaggtgttgcaaacgaataatcatttcccctcctgacctctaccaactagctctacgaggatctgaagagatgctgaagcgatcttctcaatctccaaggcgacccttaatctccaagtatttcttatgtctttcgtctattttcttttcctatttaagctattgtatccaaccacaaaatcctcaacccccgcatactcatctccatcgtcttagtattcacaatcccctgacttcttcatctaacgcctcccaaactctcacttcccttactgatgaagaaaacctaatccacgagtttgatcatatatctctcaatcatgctgatgattctatcttgttctgcctggtttttaaagtcctagcacccaaatctgtcaagcctacttggatcgaaaaggccatgactgaggcttggactcttagatttcctgttgaaatctctgaatatctctctggtatgttcctcgctaccttccagtgtgaaggggactgccgtcgggtcttggaggatcagtcgtggcactttgataagttcctgatgatctttgccaaccctgacggactcgatactctcacactagatcaacttcgctatgtccccttttgggtgcaagcgcataacatcccttttgggcataaaagcctccaactggcccaattcattgctgatgaactgggtgatcttattgaaatccatcctctgtcgcttttggaaagctttggtccctatctacgcatttgtgtttttttggatgtcactaaacctttgagaagaggtatgaacatctgctttcgaaccttggctcacaccaaacagatcaacttcaagtttgaaaggctccaaaacttctgcatttttgtggtttacaggatcacacttacaacaagtgtgggaagtatctgctccgatgtgataattttccaattcctcttgagttgggttataaggattatctccgagcccctgcaaaaagtaaccttaagaagaacccttttgaactttcaaattccaggcttattgaagaatatttccctcgtaacaccaactcgaatcagggcctccaacaggcggttgatcaatttctaaatatggaacctgaatttttacccttgcttttaacaacaatcatcccattagctcatctgacccacctctacaacaatccaacatgcactaagcaagccaaccagttatcccacaacccattatggtcacttcgactataacacacattgacaagggcaagggtatttccattcctgaatcccactctccccacccaattgccagcaatgcaactagaaataaaagcctcaccatcaaggaacccattactactcccaccactgctgccatttcagggtctaaacgcccattcactcgacaaactgcccatgttggtggttctattaggagtatgcttaagagggctcgagcttcttcgagtgaagacgtggttgtcccttctctatctgacaatgaacaaacgacaggtgttgctctgtaaccccgccgaggaaaatgagtctcctcagttggaatgctcgagatttggggagcctcaagcattcagaaatctctccctgttggtcaagcaacatcggcccactttgttttttgttatggaaaccaagctccaggctggccgtggaacgtatcttaagaattggcttcattttgactgtgtttttgaagtgccaaggagtggtttagggggaggactttcacttttttggaacaatagtattgatgttaatgttattacttactccctcaatcatatagactgtatttgtaaatgtttttaatgatatgaaatggcattttactggttattatggttctccttatccttctactaaacatgttacttggactctccttaatagactccatgacactgccctctcttgccttggttacttatgggggattttaatgactatctttcaattagtgacaaaactccacttccaatcctaccactcatgctatgcacaacttccgttctttcctgcataaatttaatcttttgcctctcattcacactggaaataaatacagttagaggcacggtcaccttcttgaacgcattgactgatgcactgctaatcaatcttggaactctctatttccctctgcttgtctttctcacttgggtttttatgggtctgatcacagagcccttaaagtccaattagaggataagttgaaaatttctcagagaagttcccgttttgttttcgagaatcactggcttacgaatgactctttttcctctactgtccattcctcctggacatccaccaattcggtcattcctcattctcctctcaaaacttttctatccaaacaatccacttgcattaatgcaattaaacgctggagttggtctcaagatccgataaaggagcaaattgctcgtactcaaaaggacttagacctgttgctcaacacgaatcagcctaatagacatactctgtcacatgccaactctgtgcaatccaaattggatgctcttcttcacaaggatgaaatttattggaagcaaagagctcgggtggattggcttaaggctggtgataagaacacaaagttcttccaccacaaggcttccatctagaaaaaaaccaaccttattagaagcatcactctaccggatgagtctaaggctagtgacaccccaaaattctttcccatttcttaagcttttactctaacctttttcattctcaaggagctgatcagaatgccatcaccaatattctctaaggagttccaaatcatctctcccctgtccatatttctttcttggatgagcctttcaccacggatgaggtcaaaaaagccatgttcagcctttctggggataaagcccctggacctgatggcctcaattctctcttttaccagaagaattggcatacactgggactcgacctttgtgctactttcctggatatcttaaatcacagtagggatatttcgactatcaatgaaaccatcctagtcttaattccgagaaagaaaaatgcatcaactatgcgtgactttcgccctatcagcctctgtaataccatttaaaaatgcatctctaaggttctttccaatagactcaaagatgttctccactatatcattgctcataatcaaagtgctttcttgagtggaagacagatctttgataacattattattgccaatgagattatccattctatccactctaggaaaaaggggaaaattggttgggtagctatcaagcttgacatggaaaaagcttttgacagggttgagtggcctttccttaaaaacctcctagctcatgtgggttttccctctaggttcacttctcttatcgtgagttgtctatcccttgttacttatcgcatatctcttaatggcagcctctcagacaccttttcttcgactagaggaatctggcagggtgaccctttgtccccatatctcttcctcttagtagtttaaggactctcagctgctattaggataaaggagatggctaatgatttctctggagttaaaatttgcagaggagtttcttccatgtcccatctcttatttgttgatgatagtatgttgttcacccctattcctcctgacaccactatagattcgtaattgcacttttgattacattgaatgctctatatgttccaaatataggtacactatgaattatctattataatcaaagatcctttatagatgatttacatcaagtaaggaaaaatttactattctacccttaatgtattttatccttaaaacacttagcttactataaataatatttcagtaaacnnatataattactgaaataagagctattctttttatgtctattaagccaatctcaaaggaaattatcagttcacttctatatagttataaaagatatagattttctatctatgattagctctcccactcatttgcactaccatattcccaagatgtaagtatttatactaacatgttcccaagatgtaagtattgggctgatcca

SEQ ID NO: 112832 - DNA, 2494 bp, Cannabis sativa
  modified_base (891)..(893): a, c, t, g, unknown or other
taacacgaaataactcaaactagtcataactaaaataaaattggttataacataatgaatataaacaattaatacacaataactcaaatcaattacaattaaaaacaatcagttcttatattactgaaacataaattaaaaacaaaactagttccacaacaaaatacctcataaaatggttataattttttttattaacaaaaatcaaataagatcaattcaaataaatattgaagcataaatatgagacgaaccaattgcataacaaaataaataaataaaaataataacacacaataactcaaatataatataaagaaactagttatatttatcaactaattaacaatttaacaaaaaaaaaaccaattttatgaaacaactaagataaaaactcacacatgaaaaccagttaaataaaataactcaaacaaaaacactcattcaacatggtccaacccacaaaaataattacacttatacgatatctacccaaaaataccatactattacagatgcttaactcaaagattcttttctcatataattcacatgtaagtattaagggtgatttatgataatattatcatttactaataaatcatacaagaactctaatatacggtaattaatactatattacaacctaaaaaataaaacaatagtcaagatatatctaagcacgatcttttaactatgatattgaaatgataataatattattttattgcttcaagaaaaaatgattgtttaaaagattttgatgttattttgttttaaattcaattgaactcatatttgaaaagataaagattttttcccttttcctactgatacgggaacaaattttaattaagatcttgttgagaaaagataataataataataatnnnaataataataataataattaagatcgaaaatttgaaaaaaaaaaatatatattaagattattttggcaacgatttttgaataatacatataatataaataaatgtggaagtgtcagttaaatgtttttttttaggaaaaatgttttataattaataaattattatttctcacaaatattaaatttaaaatcacgtgtaactaaaaattaaaaatggtgcaaagttatttttgttggaaaatcataccccattcaaaaacattattttcttaaccgattaggattagattttttttttccgtccatttaaaaccatatcattttcttatagtacattaatattttcttaacggattaggattaggttttcttttcatctatataaataataagctttgttaatcaaagtacaaaaactagttaataatacctaagactttagattgctcaaataatttttctaatcatatacaactttataatcatatataatagatatggcgaatactatttacgatatgagtatatatttagattggtcaaatactatttctaataattttgcacataactacccaactgaagaaaataagtacgtaatttttatagtaaatttttgtcatggaatatttcctgctgaacgcattattcaaaatgtgtgggatgtgagcatatttactcaaggattttacaatcttgatcgtgtcaacttcaacagaagtattctattgagaataggtgtgacagactcaactgtactctctacttttacagctgaattagaaacttgtctcgacgctaatcttaacaatcttccggattgtaagtatcttattattactgtttatattgctgctgtcagtactcaagaataagaggaagaagaagaattgataatatataatacaattagggaggcacaagatgccaactggcacttcaactgctgttgctgctaaagatattgttgccaaccctaacactgctacttaatttgtcttgattttattatttaattattatttttttgaaatattgttattagttttattagtttagatgatttagatcacattcaagtacaattatttcagtttagatgatttagatcacattcaagtacaattatttcttagctatgctttgatataattttattattgaactatttaaatattagaaaaaaataataaagtatttataaaggttaaaagagatgtttgtgtaggtagctatttatttattgctatggtattccacatatcagcacaaaagaaatctttattaaaagcactcccagtccactccactcaatacttcaaaataagtcattatatcgtgcatactgcataagcttctattatttatttatggaagattgaaataacttgatcgaagttcaattttgttactttttttttttcttataattttaaaattgagctagttttatcatcaatatctattgcagcgcactaaaataaataaggaaaaatttcattgggaccttattttggtaattattttcaaaaataacattgtttttgttatgttaagtttctgtatatatagttgccgttttttggtaattttctattttta

SEQ ID NO: 112833 - DNA, 2066 bp, Cannabis sativa
  modified_base (43)..(44): a, c, t, g, unknown or other
  modified_base (1926)..(1927): a, c, t, g, unknown or other
  modified_base (2029)..(2035): a, c, t, g, unknown or other
tattaataagtaaatctgattagattgaaatgagttttatttnnggcataaaacccaacaggaagatggatgtatccattttcaaagagatatgaaggtacttaaaagttatgtgcataaccactttggccagaatcatatatggttgagtgctatatatttgaagagactgtggaattttattcagcgtacatagccagaggttaggtaattggaattagaaaaccaagaattgacccaaataaagttgatgaggattaaggaggaaacgaacaatggttattgtgtcaaaattgaattagattggactcaattagttgtgatgaacaataatacagaggttcaaccatatataacgtaagttatagctagcttttcctttgattaacttaattagccgcgataaaaaataacttgatcaacattacctttttattctaatttcataattatgatttgcagtgatcatatggagttaatacaatcaatggttccaagacattataaaaataaaaaaaaaatgagttacagacgagcatcgtaaaacttttattaggtggttaaagaataccactctagcaaagttgaatgaaccggatcatggagtgtccgatgaattgagtcataatgctcttggagcaaactctgaggtagtaaagcatgaagcttacattgtaagggaaaacgtttttatacaaagttgagagatgatgctcatagggttcaaagtagtggcttaagtatcgttgtagaaaccatacattttgaaagtgtaaaggataataaccatgttttaggtacgatgacatattatggggttattgaagaaatatggtaggtgaattctttaacgttcgagttccactttttaaatgtttttggattgacaacattgttggagtaaaaactgacgagcttggttttactttagttgattatagtaagaaaggaagtaagaatgatcaattcatcatggctagccaagtagcacatgtttttttacatttatgatccagctaataataaattgtatgttgttttatcgacactagaaaggaagttcttagagaataaagaggatacggagaatgctaatttatgttatgataacttcattgttggacaatcaatgcatgaacaagtcgtgaaaattgatcgtaaccttgaagaaaacgataatgaatacattagaaacgatatcaatgaaggaatatgggtcaattgtgattcaacaaaagataaacgaaaagaaaaaatgcatgtctaattggtaacttattattttgtttgtttatgtagctactcagttatagataacttgtgataatgtttatttatgtagttactttgttataactaacttgtgattatgtttgtttatgttgtagatatgtcaaactcaggttcaggttcagactcagaattagacccagcaacggagtgtcctagggtgatatcaaggcaaggtcaaacagagatgaacaaaataagtaaactgatggaccaagggaaaagatttccccttgaagtcaatgataaagggaagtactatggcaaaaactctggccagttcatatcaactttaggagtttgatgttgtaggacatttgcgttggactatgaagattaaaagaaggttagccctgcattgaaaaatagaatttggaatgatataaaagtaggaatttatttgttaattatattttaattttttttttctttttgagtaattgagatgtaactcttataacagtgtttgtttaccttataactagcatgattttgaaatttgggaagatttcgaaaaaagattacttgataatcagtggcaagttaataaaagatttcaaaaatataatgacacacaacatatatatcctttgctagaagcaaaggatatggagtagtttgttgggttttatgccnnaaataaaactccattttaatgtaatctctatcttttaaatatcaataaagaaacagaatattgtgtcatttggttcatttatcatttatatgtttatttgannnnnnnattcatccaaatctttatcacatttatattc

SEQ ID NO: 112834 - DNA, 5848 bp, Cannabis sativa
cgacaagatttagctagcttgaacaatgaaatcaacttaaatatgtagaagatatgggcaaatgatcaatcaatacttattagttattatttactactacttactaagatctaagtgaagttagttgactgcattgatgaagtggcagtcgctgaagaagtagtggcggcggtgttagtgggagtactatctgtaattttaataacaaaactattagtataaaatttaatgacttaatttaatttaataattataatctatataaaatataaagttaaaaatactagatagtagataatgatagagtataatcataccaatggcaaggtcttcgattgtcggtagactttcttcttcctcctcatattcacgaacaactataggttgatgtgattggctccaccaatttttcagacatatcaaagcttccacagttgttggattcaatgagctcctaaaaggatctaaaatacgccctccagtggagaaagccgcctcagaagcaacagtggtaactggaacagctaagacatcacgagcaatttttaccaacatatttgaacaaaaacttgaggtaagaaacgtatacaagtaccacataacatgttaaagtatgattaattatcatttcaactcaattatgattgaagtaatgaaatggtgattaccattaaagcggattatagttacaattgtcttattagacaatgattgagaaccataggattatctgattaggcaatacggtatatgaatgtcagactatggcatgagctttccttattaggcaatgcagcatatggatgtcagactatggcatgagcttgtatgattaggcaatacgatacatggatgccaggctatggcatgaattcgcctgagtaggcaatgtgatatgtggatactagtatttgggttgttcttgtgaggcaactgtgagaaagtcataactctaaactgaaatcgttgttaggtttcttcctatcagtgatcctatttaggtagcagcagtgacatatgggtgccaggctatggcatagactcgtctgataaggcgatgcgatacattggtgccgagttatttagatgatgcgatacattggtgctaggttgtggcacaggctcgcctgtttaggtgatgcgatacgttggtgctaggttgtggcacaggctcacctgtttaggtgatgcgatacgttggtgctaggttgtggcacaggctcacctgtttaggtgatgcaatacattggtgccagattagggcacaggctcatctaattaggcgatatgaaacattggtgttaggttgtggcacgaactcacctgattaggtgagttcgtcatatgatgtatgatgtcaggttatgacacgggcttgcctgattaggcaatgcgatatataatcacttcttatttccatgtatacgatcgattatactacatactctttggaatgttattttttgactattttataatagtaagatggacaattaattattacatgtatttcttttattactttttgttgagtctttgtcactcacggatgctctgtggtgcaggtaaaggcaaagagaagttagagcagccacgaggtgacggtcttctccagcaatgtacttattgaccctgctggcttatgtgccgagttgtcaggagttgttttgggctgcatctgctgtgtattttgatttcgtattttgacttgtcgttgtatatagtattttgtaaaacttttataaaaaaaaatccccgaaacatagctttagtgtcgttataatgttcattaagtgttttattttagtgaagtttttaatattatcacagattttaataattaattaatctatgatttcgcttctcatcttctacaatttcactttgtaaggttggcaaacctatttcagttggaattaaagcttcaattccataaattatgaagaatggctattctcctattggggttctccttgtggttcggtatgcccatagaacctttgacaaattttttagccacttagttttgctttcctccaagtccttttttatgttattagtgacaaaatagatgtttaattttcaaagcattgcagagcttttaaactttgcactccaaaatggtgcgccattgttcgtcgttgaatcatgtagaatcccaaattgataatcgacatgtttccatattaaagtcaaggatttttcccttgaaatcgtttcatatgattctccttcttcccacctgatgaagtaaccaagagtacatatcatttccttcttttggctcgaacaaatgaccattgtgaagtataaatacactttttgagaaaatcaatttttggtagcctctcttcttttggactaatccccgacatgtcctctgattcccaagaaaaggttctatcttctttattgggtgagctcattatcttttcacttttttgttcttccatttatgctcttaccaacaccattttcttgtgctcaaaaggatcaagtagagtttcctcaagtttttctgttgttaaccttctcacactgttttcctcttctccttccaaatgtttcatgtatgctggcaaagagccctctgattgctatttctcctcttccgcaatgatcttctctttcaccgcattgactttcctcatcaatttgcaacacttttctggcttgtttctggcaccctttgatgtcaactatatgagcatcgttaggagatggacgtctcaggatttgagctactccttgcattcaatgcaaccattctctccccattattgcattgtaaccaaatacaaatttaatcacaatgaaattgactttcaaagtccttccagcaatcgtgacatcaagttcaatcgctcctggaggatagacctggttattgtcaaaggaaagcactagtaaagttgaagctctgatttttcttctaaccccatattgattaatgcttcgtgaaacaagatgtttgcactgttccctccatccactaagattctccctaggatacaatcttggatctaaagtcaatgatgatagcgtcatcatgtggcaattttacttctttgaggtcttcctcggtgaaggtgattgaagccataaggaaatgtttctcttcatcaagaatataattaacttcaagttgctgagctcgcaacctttttaccctattgatgggtctgcttctcttgttagatcatattttcctactagattttggttcagtacttccaagaatcatggggatctacttcagcatgatcacctttcccttggaataggttaggcagttcgcaagtttgctgccttaaatattcctttgttttccatctttctttgctccttccatcttgattctttttcacatactactggagtcctccctcttttattattgtgcattttccttatgagagatttccactcattcgtgaggtgacaaacgtcttgtctgatctctccttttgagctgcgctaccattatgtcaggttccttccatattgccttttcattattttctaatcaaatctgagcatgagtggtattgagcttgagctcgctttcaggctctattcttggcctcttattcatgtagcttctttgatttggtcctggcctcatgtttgagtttttgtatcatttttcactgatcattggtggtggatttccttttgatggcatagagttcagagccacttttccttcttttgttctcaaattctttccttttctgctcttattctcgttgctctatgacctcgaaaaactccttcaactttttctatcacttcagtcattgtttttagtttgcaaagaatgagttgttcacttgccaaggaacctttgagcacctttctagtaaagtaaccacccacatcttttgtggttacttcgctcacttgatacatcacattcaaaatctttgtaagaattattgaggatgctctccctctttttgctctgtttgatacaactcttttctctctttttctgcttttagcgtttctaccatattaagtggcaaagagctgggcaagctcattaaatggatcgattgatcattatttcaattgcttgaatcttaatagagctaatcttgttaaggtcgtaaagaatgtcttgcatctgattgttggattactggtctccaatgccatcttctgttcaaattggagcacatgctccaatggacccccttttcctttgaacaatgcaaaagttggcatggtgaagtcttttggtttgggttcatcaatgatccattttgcaaatagaaacttagccacatttctcattccagctatattttggatcatccagctctgtgatccttccctctctgacttttgccatattgtctttcaccatctgttcttttatttgctccagatcacctccagattggtcagagcgcaatggttgtgtttgtgtggcgattattggtgccttttgtgccactcctattggatttggatcgcactcaatccttacttgctcattcctctattcttgcttgaagtgcttttggagcacctgctctgtgcttgcggagttaacagaatccagtataaaatcatgaatttagcttgctttatcctcctttcttgctttttccaacacttctttctctttgagcacctagcgtcggttgatttctcatttctttctcaaagttctgagatattgttattgattgtaacttgtcgaaaaaatattgagattcagacccacttgtttgtccaggttcgtaatgaatttgagttttgttcattttggcccgtatatcatccatttcagtcataaatttctgcattgtgtggttaatgtcctcttgatgttgcttgttctcgtcttgatcttgctgacatttctctttagtatcacgctgctcttgctagaatttttcttttgcgagacgccacatttcctcattatgtttgtctcgcgcagtcattctttgattcatttatcttacctccaacgccaatgcagtagtcggatcaataactagattcgacgtatctccttcacttggagctattgccttctctgacaccttcttagaacccatcttagttcgtatcaacttcatatttttgttctagagaatccagcaaacagtgtcagctgttgatgccgaaaattgactcaacaacaaaattgtattattactttgaattctttacaccaggtttgatctaatcaaaatacaatatgtatcggtttacatagattccttctcaattccttcaatctagtctagatcgattactttctgagctcaaacgtgctcttgaggatgtactctgacaaaatttcgactagtagggtgtgatcaagaattcgttcgtctttctaaataaggggtgcttctatttataggcgcgaaaagtgtattaattctcatatgctctttagcatgctttccttttcttgcgtttaaagatccttaagcgcatttattctttcctccttagagctccttaagcgcaactattctttcctccatcatgctctgttcttctgcctctaagcttcttgctctgctacccttttaatgaaaccatgcatttctttcacagtcttactatatcacaatattagctctttcttcattttaatcccctagaattactttcttactaccgaaatcatttttatcccttacacttaagatatatacttgatttttattttgattatataaattagttgtataattagtttttcttatatactttcattttagaaaggctaattataatttttaccctctgaactttgacatgtaccaaatcatgctccttgaacttttttggtcattaaaaattctccctgaactat

SEQ ID NO: 112835 - DNA, 3576 bp, Cannabis sativa
ctgataaaaaagataacaagcgtaaaaattctctgcacaaaacacgattaaaactcaattaaaaatatactaaaaataacctagcactagctttgttcttgttaatgatgtcattagttagttatattagttttggttgttcatagtttgttagctttctattttgtatattctattagttagttacaataactaacttcactcttgtatacattgagctaacagctccctatcaatacaattatttagattcatcttcttactttttgttctcactatctttctctctttgtgtctaacatggtatcagagtagattttttttttattttctctctcttgcatctgcatattgtcactttgttctgtgttcttctctgctcttcgctatgacaacttcttctacctcgactccgaccatgtctggtgctctagctgctactggcacttcttttcatccagtggtgttttctcataagctttttgtcaagcttgataacaacaattatctactctggcgacctcaaattctttcaacgattcgtggtcattagctttcagactttatctctgactctatctctgtcgatgaagttcctcactaatgaagattgtcgtgatcatggaatcaatctgttgtacagtcaatgggaataacaggatcaactcctctactcgtggttgctttctcctaggtgttttaactcatgttgttagcaataaaacctttgttcaattttggcacactagaggtatattttgccactcaaacctctgctaaatttgattagtttactaatcaattgtaatatataaagaaaggatcattatcgatcatgactatctcatttgtatcaaatctgtgttggatcgccttggatttgttagtcactgtgtcactgttaaagaacatgttgcagtgatcttcaagggattaccaacagaatatgacacctttgttatctctgtcaactcaagaaatcagccttacactgtggatgaaattgagtctctccttcttttgtaagaacatcgtatggaaattcaccatcgcgatctagattcaataaatcttgccacaaattgttcttctcgtaacaacaaccttactcttactggatgtgaaaccagataatgttcccattcttcatttatgccctctggccatggtcgtggatagtggaatccttatgttgttgctcctcgtggctcaggacaatttgcttcatctacagcacaaggtcgtgcctcatctaagaactcattagtgcaacctcctttttcaaacaatactggttccaccagctccaaactagtatgtcaactttgtgctagacctggacatatttctgctagatgctaccaacgattcaactttgagctccctggaatgggagctacaaatgttgaacatctctcagtaaatattgctccagctgacttggttgttgaccctgcttggttccctgattctggagaaactagccattgcaccccaactaagcctacttttactcacaaaggaatcatactttggacctgatcaaatccacatggatgatgaggcaagtataaacatcaaggtgttgttaagaaaatctttcataccccttacacttcaaaagaacttgcacttaatcatctcttatatgctcctcaaataacaaaaaatctcattagtgtatctcagtttgtaagagacaataatgcttactttgttttctatcgtgatctttgctttgttaaggatcaagtatccaagatcactctcatggcaggacaacttaaagatggtttttatgtcatatacagtctaaagtttcctcttctactaagattccctcattctcccaatctacttaatctgtaaatcatgctcaaatgagctcttgtaatgtttctagcaaccaatctactatgttttctctttggcataatagatcaacacttccctttgctaaagttgtaaagaaatttttttcacaatgtaacatttctggaatcaataaaactttaaaaactttgtgatgcttgttgtaaaggaaaaatccaccaatttcctttccaaagtccgatactatgtacacaaaaccccttcagttgagctatactgttctatgggattcctcaccaacgccttcttctaataactattattagtatgtacattttattgatgcttttagtagatacatatgggtgttcttgttaaaagaaaaatttgaagcattgtagacttttgtaaatttcaaaacacaagttgaaaaagagcttcagtgcttattaaatccattcagtcagattgaggtggggagtatagagcctttgagtcttaccttgagcaaaatgggatttctcatatattcccacaacaccaacaaaatggtattgtagaaagaaaatataggcatctcgtagaattttccctcactcttttggctcaagtttcaatgctcttaagttttggggatgaagctgttagaacctcaaccttttttataaataggctgccctcaccaatgcttaataatgacaatcccctagataaacttttcaagagacaacctgattacacccaactaagggtatttgggtatgttatgtgtacctttatagattatagtcttaaacacaatggctacaagtgtcttgctcccgatggtaaaatatatatatctagagatgtcattttcagtgaacatcattttccctatgttgaatcttagtactacatcttctcacattaatcacaacatgccaaattcgatacctctcatactccatcacaatgacttattctttctacttacatctccacttctcccacaaatattgtcactccctcccactccactcccatgcatcatttcaaatggttccaatagtactgatgttgaaactgcatgttctagcaatacaagttctcacactacaggtttcactgttgatcttgttttgtctcccactacttacggttcctccactttagctcaacaccagctcccttatttgtcaataatcactctatgatcactagagcttaagaaggtatcactaaacccaaaacctttctcaccagtacaattcctcacaatctcaaagctgctcttacagacactgtgtggattgaggcaatgagtactgaggtagttgttttaagatgaaaagaacttggacattagttcttttaccttctggtagaaaggccatcacctaaaaatggatctataaaaagaaggaaaaccttgatgcaacagtatccaaaagcaaggcaaggcttctagcaagaggatttcttcaacaatatagccatgatttcaaagaaacctttagtcatatggtcaaatctgctacaatcaaaaattttcaaaatgttgcactgttctacaagtggtcaataaagcaactcaatgttaataatataattttgaatgggaatttagaagaagaggtgtatatgacccaacctcctagtgctgattcagcaaattcccatatggtgtgcatgttaggttatttttactattaattttagattaagtttagtatatttttaattgagttttaattgtgtttg

SEQ ID NO: 112836 - DNA, 1088 bp, Cannabis sativa
agaatgcaagggagccagaaacttgcaattggtggtcaggtattatagaattacacgttgatcccgatgttgatgacgatggaattgattctgcttctgatgttgcaagtgtaaatagtgatgaagacaactgcagtaaaactattttggaatataatccaaacatgaaaatggatggattcaatttcaaattaggcatggaatttgggtcagtgcaattgctaaggaatgccttgaaagaacatttcatacacgagagtaaagagtacaaattactagcaaatgatttggaaaaattcagggcagtttgtaatgcaccagggtgtccctacctactttacgcacatgtgaaaggaggtataattgattactttgctttattttttcatgccttttacttttcaattttatactaagcaagaaaaattatcatatttaaactcacttcttatatttgaggaatattatgatgccattatttttatactctaattaattttttttttcttgtgatgcacaaagttacttatcaaagttttattttaatattatatttaataaggatgttctttcttgtataacttattggtttgtaattttttattggttcttttgtccttgatgggctttatttggctacttaatatgtagttcatgagacatattctcttctcacaaaggctcaataacaaacaagttatagtttggtctgtgtgaagattgtcttaaactagttaggagatatttggcatgactaatttctgattctagatcagacaagttccaaccttttacaacatatttttgctattacttattcattatggcaatacatataatgtaatttgttgtatgtttttttttatctttatctaaacatagctcttgcttagttgattatgtaatctgatttggttgttagctcttgctgctctttgttttcattcttcctatataacatcataaaaataacaataaaatcaaatattatatccagacatatgtatttattaggcattatacacatgccaataaaatcaaatattatatcatcataaaaataatcccatacatatttaaatccataa

SEQ ID NO: 112837 - DNA, 4959 bp, Cannabis sativa
  modified_base (75)..(93): a, c, t, g, unknown or other
  modified_base (4921)..(4928): a, c, t, g, unknown or other
ttttaaatttttcaatccaatctactccgcacaagtgcggatatccgcactttgcggattagattggattggatnnnnnnnnnnnnnnnnnnncggctattttatgaacacccctagcttggtttgtgtttggggtcgggtcaagttgggttgacattcgtatcacggtcttaaagtttttatttttaaagagcaaaaaaaaatctaaaaataatttaaaaaattactaacagaatacattttttaaaagctattttttgttacagaaaataatgtcaaacactaattttaaatttcaaaattaaattgtgtaataatctcttttttttgcacaacattgaattggtgactagagggagttgcaattctgtaactaatttttttttttctattagctgtgcttgagtgtactgaagactaagatgaagtcctttcaaataaaagaaaagtaagaccaagttgaagactttggtttggtcatacagtcacaatagagtcataaggctatgctatggctaattaataaaagtcttgaggtgagagttcattcccccaaaacaaaagtctttggtctatggtctttggtttgggagtataactataattaagtggtatacactactacaccaattaccataaaagtccccgtgacaaaggtccacaaccgcgtgaatggtagggtcaaaatcgtaatttcgttaaaataccttcgtctccgatagttagaagaatagaatcagtgggttccttccttctttatttcatcacagaatcaaattcgaagcttaaaaccatcgaagagggataacttcccttctcctctatccctttctacgattactacaatgatttctgtatataatactatgtaaccagacgtagaagacgaagaagaagactggaatcgagccctataggttttttgattttgcctaaactgtgattagagatattttgaggtatccgatctaagccatgggtggagatgtgagcggcagcggaagcagatgtagcagcagtggcagcggcagcggcaacggcaatagcaacggcggcggtggtagcatgatgagactgggacaactcaccttcgcggagccgcagtacgtcggggccaagacttcggtgtggtgggatatagagaattgtcaggtccctaaaagttgtgaccctcacgccatagcccagaacattagttctgccctcgtcaagattaattactgtggccccgtctccatctccgcctatggcgacactcataacatcccctcttctgtccagcaagccctttctagcactggcatagcccttaatcatgttcctgccggtattctttctctaccttgctttttagggtttgtactttttagtatatatttttttttactctattccaattgtttagtctgatcatgataaacccttccatcaaaaaaattgtttagtctgatcatgattaaccctcattttccttgcaagattaatttcatatgagatgtttaagataacgatgaatatgaagggaaatcctgatcatgtttttcaggggtttactgaaagttgactgttttgaatgaattcatgcttttgggtgactggtggttgtttttgttttcctaaagaaaaatatttgattgacattgttaaggtcttgggcaggtgtgaaagatgctagtgataagaaaatcttagtggatatgctgttttgggccgtggataatccggcgcctgcgaattacttacttatttccggagatagggatttttctaatgctcttcatcagttacggatgaggaggtataatattcttctagcacagccgcaaaaagcttctgctgctctcattgctgcagccaagagtgtatggctttggacgagcctctcatctggaggatctccacttaccactggtgaatcatgtcagcttgttaacgggagccaagttagccaaccatttaaacccgaggcttctcaattctcagcgcctgctgaaatgcaccagactagtcaaccgatgtgttaccaaggttaccaagaaactctaccaattccaaaccagaagccttccaacgttggaaggggtgttgacccaaaaactaagggaagaaacaacaagaaaaatccaagccagcccactgtatcaagagcctcaagtgtgccaacaagcatgcatgagattaagaacaatgactacccctttcagccagaacaatcgcagggaaaaaactttaagaaagcaccacatgaatactttggtggtggtggaggcagtaatggaaaccataatataagcaatcccccaaatcactacccttccccaaggatgccaaactcaaacaatccccatatgcaacctccccctttcggatccgataaccggtttcatcctaatccccattttcggccacctcctcccaggcccgatggtcctagattttcttccgctcctcccaggcccgctccacttaatgtgcctgatattggtaagttaggtatcaatcagaacaacatttatgcacagaatccacctaatgtccaaaatcgaactggagaagactttaaaccttcctctactgagtcacagaatccaaatagttttaatgcacctcagaagggccataatttccaaagtggccaagcgtttcatcatgatgcaatgaacaataggtatcctcgcagctctgaattttcaccttccccagctccatttggtgcaaaaaatgttgctaataatggtgtttggggaactcaaggatgtgcgccaccttcagaatatgttcaaggtcttattggcgttattttacttgccctgaatagtttgaaactcgagaaaattatgcctactgaagtaaacattactgattgcattcgatttggggatccaaaacaccgcaatactgatgtaaggaaggctttggactgtgcaatagaacaacatatggtagtgaagcagaacttaggtgctgtgcagttgtatgttggcaaaaatgagaaattatggaagtgtgtaaatactatagggggaaatcttaatctttaccctaaaaccacatgggatcggatacagaagtttataacatcctcaagtggacgttctgccgtactggcttctcaatgcaagtaagtggaattataaaatttggttgctttcttagcattcatttagagtgtaggtatttaagttactaagagtaataagtctggccataaaaattatgtcatcttgctttctttacagatatgaagcagctttaattcttagaaaatcatgcttggaagagctttccttgggcgaatcactccaggtcttgaatttgataattggtgtgaaaaaatggattaatcatcaccattcaggatggcaacctattataattacccttgcagagactaaatctgatatagctacagaagttgatgcttgattaaatcaagagcttattttaatgatgatgaaatggttttaatctagctacagctgcaggagcattttctttttattttgacctcaagaactatgggttgcctttgaatgaactaaaactgttgcaaatatcaggaaagtttactaggaaggcaactattagatcgtgaatcaagtaagttgaagtacgatttatctgtgtagttttagtattagttttttccttttttatttgcaaagttagctgtaggggagatctatagaaatagaaccctgtggtggtggtcgcctactgcaatcaatctcagttctctgttgcagttatgaggctacctattttagatagtattacctgcatttgaggcttttaaccgttcccaagtttaagcggtcgaatcctttgacctaaagcctcttaagcagtagagtatatacaaggactggtgtcattcaaaagatacgatatttgtttcaactcaacatgtcttggcagctgtgctgaggagaggacatgttctgtttacgtttgaaaaagaaagaagaggttccatgactgcattgttctacatggaatgaagtttggggacccttatgaaccccaaaagtagaggcgttacgttccgagtattttcagggaagatttatacaagtgaagtctgatagctgctgcaattacattggctggcaggcatatgatttctattttggaaatgttttgtaacaaaagcaaaatcttcttttgatctgagaaaagaggacaatatgcaagggagatcactgtttccttacttgaatgtcattctaacctttcaactgtgcataaattgattggtgaatgagatgcacgttggttggacctgcagctatctatggataataattagtatatacttatgttgtttaagcgttttctgcccttttatttggtgtctgtaagattctgtcttttggattgtgcaatttttttgtttggttcattataaacagcaataataagaacttatttacctttataaaatggttgtttgctggcaacggaggactatcctctcccctcccctctttttatataatattatatatattgttaaggtgcattagtcatatggcttttagttattggtacaggtttcacatattttaattttaggataatgttatttgtgtttttagacggaggacacatataattctaaaatggtttcaactcagtagctctaagccaatcgcagactcaactaagataatagattagatctattagcgaagtcaagtctttcgaatgttggatagatggctcgtccaaataagatacacctctggtatagtgtatctttggatggcatcgaacagatcttttgatgggtgattaatgggcattctaatatccagttttgatcacatcaatttattgtcaaatctctcaatatgatagttttatttttaggatcatacccaagactcgtatctttcgaatcaatatatatatatatatnnnnnnnnatatatatatataaatataaaggagagttaa

SEQ ID NO: 112838 - DNA, 2009 bp, Cannabis sativa
taaaaaagtgacctcatggctcatggtaggacccgtcccattcgaatgcactcagtaataagtttaatgacttttacgtatacaagaactgaaaggaaattagcaatatttttatgtataatacataacaattattacattccacgaagaatttgcaacaattgattaaatttcgaaatgaattttcttgtttcctctttcaaataagtaaaataaaaggaagtacctacgaagaaaacgtgaaacagtgacaagtgaatcgaacaagtgtgtgtgttgagctcatttcatcctacgtggcattcagtagacacgtgtcaaaggcttatacgtaaagaagacaacgtcttgacgaagttgttgcctgatgaaattgaaaagtaggctggtcaacctgttctcttctctttaaataatccactcctcttcattctttccttcacccaaacccatactcaaactgatcaactcccatgtccgcctgagttcttataaatttgtttttattcttcttcttcatcatcatcaccactaattagtagtactaagtttgctgtaatctctgaagaagaagatggtgatgagaaaattaagtaacaacccactgtcatcaccaatgtccaagtaccacaggttcaaccccactgatactgagctcattgcacacttgaagctcaagattgatggagagagatccaaactcgatgattacattgccgagatcgatgtctgcaactgggagccttgggaactacccggtatgtacatacacacatatacatatagatacagtgttctcttttcttttttttttttttctgggcattatgttcacaattgtatatgattcatgttctgggttttgagattatgggtattgctgtactgaattcagtattttgttggtgtgtttctgggcaataaactcagctaaatcaatgttgaagtcggatatttacgagtggtggttcttgtgtcgtctcgattataagtactcgaaaaatagtaagcaagtaaaaaggagcaccaaaacagggtattggaagagaaccggtgaagaacgcaaagccaaaggttgtactggaatgaaaaggaatttagtcttctacaaaggtcgtaaacgcaccgattgggtcatacacgagtattattatcctcaaccccatattaatctgaaagatcaggtctaaattcctttgctgttgcatctcattattatatatatactccctcttgctctgtccatgcatgtgtatgaatctttttcgaaatgtcatttgtggggttggagttggaggaggaggctgtgccattaaaattgacattgaatgataaacctttccaccacatgaaagtatgcctttttttttattcaaaaatatgcagaagccaacctgtgttatttgtcgcttgatgtgcgatccccagagaaaaaggcggaattcagatgtatcttctgtatttccagaggtaagaatagtcaattcccttttctacattttactatgaattatgattataaacctgagcattattaattcctaactttaggagggcctgggggaagtgaatcatccaccaatctcgccaattccctctccagatgccaacttcctagaacaagcgttgagattcatgctcgacaatgatgatgatatgcaagtttcatatggagaaacttgtgaaataagtggcaaaaccacttctgattctgaaaatccatgggcagttgctgataatgacccatttgtaagaaaaaacaatgctctttcttatcaaattggcttattcgcatgaatcatgtctggtttaacatgctttaacatcttcttgttctaatctatgatttcaggtaaaatatgataatggtgcgagttgtcgactaccagctacatctgattttgaaattccatcatcatctgttgtaatcccggtggtaagaatttgcatttgctcttctctacatttgctaatatttaagtgttcctatcaatcataataagtgaatc

SEQ ID NO: 112839 - DNA, 2174 bp, Cannabis sativa
tgtgaccaaaaatccaacttttagagacttcaagggcaagatttttgatttgccgttgaacaaggtgattttcaatttctttactattttattattgttttgtgatagtttattaacctgaattgtgtctggcatggatgaggaagatacagaatcatgtgtgaaaagaatcatacatgaacaattgtcataacacttctatttcctcagatttaattgtatgaaggaagaacgaaccccagggactatctatccaagtacagctagatgatgtaggaagcaaaatctagtgatgacgtaaagtatctctgcttttcattaactctgtcaaaatttgtggaagactggtgaaaaagattatctcccagatcaatttttagttcaaatatctttccagctaccatggtggaggccgcctagcagtgatacttcaagctatctctaggaaaattcagctcatggaattctttcatggcggtgtttcatgcatattctcctcttctaggaaactcccatctcacatagatacttggtcgaggtaagaaaataccaagagagccattgagatgctacataagcagatttatgactaagacaactaaggtgaaagggttaatcaaagaggggaagtcggacgctgtcctaagaggaatcgaacctctaaggaattatgaaagacattaaaaggcttacaataggtttgatgggatatttcttagactcagcaaatgagtttataaagcttgaagaagtagttcgacgtgtagatatagttagtcagaaaaagagccaaccgcacactactactgccaataaatctgtctagtagaattagaattctcataacaacaacagcttggatcaaagtggtaaatggtcaaataatgacaaccaacaaggtaatgagaagaaaataaagttcaacaataactctgagcagcatcctcaagagaaagcctcaaagttcattgtctttactatacgtatcgattaaatagaaaccatcttcacaaccacctagtgtgtggtgtcgtacaaaagatctcctctcatgaagaaagatatgaccaagagggataccaccaaagattgttgcttcatacagacaatagtcatgatactcacgagtgcaataatctaaaaagagagattgaattcttcattaggaaaaacaaccgcatttgtaagagtatgcgaagacgaaccaacataaaagggccgcctagtcagacaataatcaaaatcaattgatgtctccaccggtggatgggcactgacaattgattattggaggccctgtcattattggagactcaaacaaaggtagagagaggtatgctcagaccctatagaacaaatataaagatgaagctcaggctatggaagaaagaaagcctaaacaaccatgcaaataagaagtagttatatcctttagtgaaaatgattccgaccaagttatttacctgaacaatgatcctttggttgttgataaacaaattgcaaataaaattatggcttggacaatgattgacaatggagcctcttaaaatattctcttcaagacaacatatgagaagatagggcttcaactcgaagacttggttccttgaatgcaactattatacaatttttctgcccaaagcagtgctccccttggacataccttcctaccactcacagtatggaaagctctgacaaccacgactataatggcccaattcctggtgattgatgttccttctatttttaatgtcatgttgggtcgtccaactctatatgacttgaaggtagttattttggtatatcacttatgcatgaaatttctaacaaggaatggggtaggttgtttgagaggaatcaaaggactggacgggaatgctataatcttgctctaactaaggccaaaagggaagaaacatctaaccagagttcagcgaaagggaatggtattgccaaatagggatatgcccaagaagttgagatcaatcatactatgggccagtttggcacagctgtgctgtggaaaaaagcagctatagctgtgctgtaagaaaaagtagctatagcaaaactgtggaaaaaggttgagctgactgtttggtaaattataaattttaaagtactgtgagttgttaagatctattataatgataataataatgttataatctagt

SEQ ID NO: 112840 - DNA, 2992 bp, Cannabis sativa
ttattaatatttataacaatatcttaattttttttggcaacttttatgcaacctcaggtgacgaatggtttgtttccatgagttgggaagctggtgtgagtgcctattccttccaatgctaacagaatgttgatgtaaaaaaaatcttatttttattaacaatcgtaatatttctaaagattcactcagaaaactgactttttatctccaaaaaaactatcaaaaaccatgtccagcaagttaaaatctgcactagtaaaccaacatggagaaaaacaaatgtttctctctagagtaataaatttaagctacaatacagggaacttcatgtattctgcccattctatgaacaagcatcctggcattggaagtcgaaaagaaattcccagaataacttcacaagaaattgtgttattttatagtaacgccccactaaacagccaaactataggattcatacaatgaatttaccagcagacttatcgtactgatatttatacttaactttagctctgatagttcgttctattattactaaaaaaaaggtgaatcagttcttggccttaatagagttgttttccttgatccttgctcggttgtccagcttcacaaaacgtttgagatcttcgtaagggagagtttcaacattcctcctgcgcaattcactcaaagcagggcgcttatcaatcagatggaatagccaatccggatattcagaatctgccaatacttttggatcagctccttctttgagaatatttgccccaactacagttgaagatttcacttctttactaagaatggatgcttttggcgcatctccagccgcaccacctttggctcccttctttttggctcctgctgcaaacgttcgccggaaaactgaactcacttcgtcattgccaactattcgactcctaaacaacctagcatgattcattgccataattctgctcctgcaacatcacaaagctgagctaaaggctctaaataggcactagattttggtaacacacaaagtttgttcttctcataaacaattctcagtctaagtcaattaagaaaagatataaatatatataaatttatatattactaagaattatacatggtcatgtttgaactgaaatttaatcttcctcaatgcttttaaaaatataataaagcaatgtcaattcattatccagaaataaaacagaatcgctgccatctatctgtcaagttcttgatgcctaccatgtttaatcaaatttctaggcccaaccttttcttaggagccaaacaatcaaatcagtatacagaagaaagggaagaagagtgaagtagaacaggaacataaggaaatccaaaaggcctcagataaagaaatgaattggaatatggattacacaggaatgaataatcatataaacacgcatccaattaacattttatgtttcacaatattaatgtctttcatcttggaaattatcatcacttaccaccaaatttgaaaatggcaacaaattcgctctctatgatttgaataaacaatcttttatgatttaatctcaattatggtttactaatctagcaacctaagccccaacatcaaaaggggtttttacagacgcatatgatcacacaaaagcttcactttttatctcttcttattgaaccgctgcattgggtttctcaggttaacccgcatgtcaaattctaacaggaatgctgaagagatgcaaatgaataaaccgtaattgttctaaacttctctaaacaggttattagttcaatgaagtattgtccatcttggttcaaaacttctctaaacacgtaattaattggtaactattcaattaaccattgccaattttgcttctcctattaaaataccggataaattttgaagctacaaattatctctccaatcaacaacagaacactgttccaagtattttttttgtcactacgagtaattaaaatcattaaaattcaaatttcctagaaataccataaattagattatatttggagagaagtatctctatgtcatcaaacacttcatcaccccaagacatataattatcccaaacttaaacacagtactgaaataaaatatatgtaggaaccaataccatacaaatgggattcacatgaaagaaacagaatatttttatcgaaccaaaatcagaaaattatgaaagtctctttgtccttggcccgtaagattgagaacaagatgtggaaccatccagattagaacaaaagctcgtacatattcatataataacgtttcaaatgatactacatacagctaaacattataaactaactatgacaaaactaaacattcatatctctgtaaaatgccaatgtagaactctatacaaaacaagagaatcacttcgagaaaacccaaacaatcatacaaagtttaaatggtctcactgtatttaatactcattagcagcttcaaaacagtaactacagtacctgttgtgagcgaagtaattgtttatccgggcaacgattgaaatggaattcctcccctccgatttccgatcagtaaggaccggtgatgggttactgacagaagcgaagaaagccgaaaaggcccaatagagggattgagtaacagagagagaagagagccaaggaattatgcgatactttggatgaaaccctaataaatacggctatagttttgggtttgctatcataattgggctaacccaaagaatacaacatacccacacaatgatacacaattacaaacttaattgcaaaagccaaaaaatttggagtggtaaaagttgataattttactgccacaccgatatttttataattttttttttttttatgactttgtttggcaacaaagaaaccgtattggtgcaaatgtagttgtttcagcaagaactctacttgatcaatacaaattcgctcaaaaaagaaagggtttttctttgtctccgttgattgatggggaccgtgtgcttgagcgttg

SEQ ID NO: 112841 - DNA, 2133 bp, Cannabis sativa
tttttccattgtttgcactttgcatgagaatgttatctcagtttaatcatttatttgtaatcttgtttgtagctaatcgagctgtggaaattaatgagatgtggcgagttcggcaaaaagagctagaattggatgatcgacttaaagacagatcgaaggatcagcgaagcaatggtgcaaggtacaataatggtggtgacttcaaaagtaataggcacacagcagtaaatgatggggcaaatgcttcatgctcctcaagtaaaagttcatattcaagaaatgatgacgggttgaaggatgaagaacttgaagagtttttgcactcaaggtatataaacaagcttttctctcatgtttgatcatgtgtgtcattgagatttaacaaaataaagaaatggtaagaggaagctacatatggctgacacaaatgagattgcatggcagggccaagcgcgggaggggtgctgttggaccaaggatggatgaaacaggtccttatcttccccgtggtccaaaccccaaggaagagctattgacaaacatagagcatcgtaatgttgtttatggtcccaagaagccttattccctagagtcatgcgaatcttctgaaacagataccgaatcttctgaaacagatactgacgataataagagagaaaagaagcggagaaagactcattctaggaactcaaagaaaccgcataaagagaagcataaatctaaaaagaaatccaaggataagaaaaagaagagaaaggaggagaaaagaagaaaacgtgatcattaaaaatcactatctgcacttcaaagtagctcaaatgattaggtgagtgagtgtatatataaggagacttgggattgtttattatcaaaaaattaagggtggagtggtttttatctgtttctaatttttttaaaggccaatatttatatcaagagatccaatcactttctgcactttgaagaccattttaaaaaggataagaatgggccttgtacatttacacagcattctttgaaatatgcatcataatctactacaaaagttcatctcaaattagacgttgaggtcacctagtaatgcttattcagtttaagaaaataaaaagtcaattttataaaaaaagaagatagatttaacaaaaaatttcttatcaaaaatagattttttttttcttcactttgtttccatcatttctttcttattttattcttttcctgctaaaattaacttccaaacaaaatgaatttaaaataacaggagtaacgtgttttagctacgatgaaagagcttacacccacggagaaagaagcactggattttcttctttatagtttttaatcataaagttagaaagggtttttaaaacacagatctcaatattacacacatatctgaatggtttttctatctttcgaatttgaaatgatttgagctggtctttatatagaagcgaataccaactacctaaatggaatctacttagaacaatcacaagaaacttgccatttttttttacacagtttcaattactcacaactcagcaattttacagcccaaaatcaggccaagtgggcactaaattagaatggaagagctcacgagaggtgaagctttcaatcatgctcaatttaaaccctcatttgttttttgaggggttcttttgttttgtttgtatccaaggtgtagtgtaggttgtcttctttgttgtcttgagtatgtcttttgttttagccttgtggccactctgtaaattgttttacttatctttcactttctctctttaactcatttagtcatgtttagtttcttgattgatttgactctttacaatttattagcaacccttttatcctcttttaggaaaaaaagccttttgcttgttgaaatctccaaatgacaaacttagtatgagaaaacaacataaacctacataatttggctcatgaattatttgttttaggctaagtctatagcatatctagggatgtgcataaatagatccaatctaatgataatcgaccgatccaattacaactgaccaccaaatataggatattcgattgtgatcggatcagattggatgttaattttgaatatccaattggatcagatcggatgttggatggggt

SEQ ID NO: 112842 - DNA, 2928 bp, Cannabis sativa
tatgcaaggattggtgtcatgccacgctatggaaattcagattcaattatatggtttgatgttgaaccaaattgcacgtttcaccttttcaattgttttgaagatggagaagacgaggtattaattaccctaattattataattgaattattgaataataaataatgttctaatatgtatgaggattaatgaacaggttgtagtgtggggttgtagaaccctcgaatcagtgatagcaactggctcaaataaagaaaattttgatacctcaattagtgatggattgttatatgaccggccttacgagtggcgattaaacttgcgaaccaaacaagttaaagaaagaaatctcacctcaaatacagaattttccatggattttcctaccattaatccaaatttttatggtgttaggaatagatttggttacgcccaagttgtggattctcctgccagctttgcagcaggtataatgatcatatagcaaaatgtaaaactttgataattcattaaatgcccctgtttaatgtgtaatcattatgattaacatgccacagataacaatgctaaatttggaggtctagcgaagttgcattttgagccagagaatgattcaagattttcttctacaaaagtagaatacaaaatgtttgagaagaacacatttggcagtggagctactttcattcctaaaataggaagtgatgaagaagatgatggttggattatcacttttgttcacaatgaagacactgacatatcccaagtaactttgttttcttttttgtttcatgctataattttaattaagaattctggcaaggtagccaaggttggcaattttggtgctaattctacttatttattattaattaaccgaaattgcaggctcttgtgattgacacaaagaagttttctggtgatccagttgccaaaattacattgcccagcagagttccgtatggatttcatggggcttttataccatcgtagcctaagagtacgtgttataaatatgtatataattattcatagagattgttattgtggcaccaggactgcctaacatatttaaagaccgcgttttacaattaattagtaatattctttaagagcgctatgatactaaaaaaaaaaatactagttactatagtaacttttaccatttctgttatactgatggttctaaaaacttccaaaagtggtgataattaaaattaaagataatacatcatgatcataattatctttttattgagaaatttaatatgaaaaaaagtaaaaggtttaatctaccttccactttaatgattatttataaatgattgcttttgataatttgcagaggtggaaaaggaagtgatttgctgaaatctttaaattggagctccaggtggctgtagactattggagagtactactttgtttatgaccctaattaaaacatgataaacacaggagaaggagattatccatcatatacttggcttttattagccattacgctcctcccctcataattttggttctattaaactcattgttattattgtgtctttcttggataatgacacttcacttgtatttttcttttccattttaactttttagccataaaaggttcaattcaaaggtctccacctataatttttaatttttagtgtgagacgagagtacctgtcttgatttttgtttacctagtaattagcttaaaccctcctgaaatgtctagatgatacatggtaaatattctaaaatgggatacttgcagcaaaatccttttaatatttataaatattagcatatgatccttataaaaaaaataacgacaaaagtatcttatcttacgattttattacggttgtactattttttagccattaagtattacattaaaaacatgtggcgacatattattagatcatgtattaaatatgctaaagaaatatgtagccatgtatttctgagctgacacttaatgggcttaattagtacttaacagccaaaaagtagtataactataataaaatcgcaaaataaaagtaattttgccaccacctttttaaattaaagtgataaatgtaacaattacaaatattaaaagaatttcgccgcaaatatcccttctaaaatatatgtacagtagaacaagccctaatctcattttcattgaaatattgttactaaatatagtagtatccactatccaacattattacaagtataataattataaaattatatatataaaactttttattttattatactaacaaaaatataatatacattattacaagtataataattataaaattaaatatattctttacttaattacactaataaaaatataatatgctttaagtatatctcttcctcatttttcattagctcctctcgatctatttctctagagaattgctaaaaaaatatcactggtgcttagcactttcctcagtgtgatactgttgttatatttaaaattcggctacacttcaaaaactaacatgtgtcttgcggtggaatatgaaccactagatataataaaattatatgcaagatagaataactcgttaacaaagattaaatagaaattattcataattcactggctatatggtcttaggcgagataagaacaaaagactattaaaacttatatcgaagagacacgcacctgcctcggaatacatagtcaaagaagatattcatctattcaaagtagaacaaaaacaatcacacatggtaacctcgggttacgtatagtgagacagtcacctcgcgattctaactaaagagacttgacgaggcgtaccatctgctaaaacttagcgttttttccacatcaagatggacaaggagaataacttgggttaagcgagatacaattgtccaaatcagtattaaccatcgaaaaggataagaa

SEQ ID NO: 112843 - DNA, 6159 bp, Cannabis sativa
ggcaaatcaatgttggtattaaaatttttgccagcatgacttttcccaacgcgtaaatgcactagtaaaagttatattttagtcactgtaaatgtatgcaagtaaaattttgatctctttgtcagcacagtttgcgaaatgcgttggttaccagcgcagtttgcgaaatgcgctggtcaccagcgcagtagcaaactgtactgataaaagtgacatttcttgtagtgatttgtaggatcttatcgtgttaagtccaatcccatatttttttataccagatcgtattaatgtctcatgggctcgtaacgatttcgtaccatattaaaaagtccagctcttattcacaacactactaataataataaaagccaaaaaggaataatgaaaccaagtctaaagtcttatgtagtaatgtttttaatatctcggcggcttacactacacaaattaatgttaaccctaggtataccaacttttacaaaacaacaaaagttgaaataaattattattaatgccaataaatcttaaggagagcccaaactttcctatatgtatattcaaaccaagtaatcataattaacacatcaaatcaaatggatcagaaaactcacatagccattttcccaaaccttccaattagtcacctaattcctttcatagaatttgccaaacgcttagttcttgatcatcacaacttccatgtcacgtgtcttcttctcaccaccactgaagatcacatctctccatctcgagccaaaatggctatcctagactctacccgccgccattgacatcatctttcttcctccagtcaacttagacaaccttcctgaagatcacaaacttaggctcaccataactcgctctctttcttctcttcaaaccactttaaagtctttattaattactaacagattggatgctttctttgctgacctttttggtttcgaagccattgaaatcgccaaagggttaaatgttccatcatttattttctttacttcaaatgctttgtcgttggccttgtttctccacttgccaaaccttgaccatgaattactatcctctgttcgatttttaagtgacctaaccgacccgatccaattacccggttgtgtacctttactcagtaacactttaatggacacaatgcaagatagggaaagtaagaactacaagtcgcttctcaacctctccaaagggttatatttgactgagggtataattgtcaatatatttttagcgatggagtttgaagcaattaaagctttggaagccaatgatagaatgccacgtgtttttcctgtcgggccaattgtgaaaatggaatcaagtgatgatcatgacaagtcagagtgtatgacttggctcgataaacaaccacgtggtagtgtgttgtatgtctcgttcggtagtggtgggacactatcgagcgatcaaatgaatgagttggcattcgggttagagatgagtggcaaaaacttcttatgggtgaccagaagacccaacaatgaatcttcaagcgctaattttctcaaacaaagtagtcgtcaaagtcaaagtcaaagccaaagtcaagataaatgttttgattacttaccaagtggattttttgagaggacaaaggggaggggtttggtggttgagtcgtgggtcccacaagctagggtgttgagccatggctcaacaggtgggttcatgagccattgtggttggagctcaattctcgagagcattgtgaatggggtcccgcttattgtgtggccgctttatgcggaacagaagatgaatgcagttatgcttgtggaagagttacatgtggcgatgagattgagttgtggtgaaaatggcattgttggacgtgatgagattgtcagaggtgtgaaggagattatggatcaaagttgtgaggagggcaagaaggttggaaagtgtatgaatgagcttaagaatgatgctattatggcacttggtgaagatggttcttctaagaaagcactatcggagttggcatttatgttgctaaataaggcttccaattaacactatataaaattagggtatagtatgcttttgttgctgatcaataataagattgtatttgaataaatcttcagaataatataaagatttcttttttcaaaaagtattcttcctattttgtttgaggaaaaaatacataaattgttatatatttttggtaataagatggtttaacttataacacatgtgacaatattatggtagaaattgaaatttcattattcatatttttatgtgtatatataaaataggaaaattgaagatgcatctctatttgttttgacatcagagatagtttttaatttcattttttttatagttgtatacgttacggttggacatccaatctaatctaacttttttttttctaatccaatcaaattcaattagcaattagatttgaaaattattatccagcccaatccaattagaccttaaaatttaattcaactactaattgaatttgatcagatcggctttttaattggatatccaatccacacctaatttttaatattaccttgagtttcccagggtaaggagttttatcctaagtctagtggatctagagattctggtgataacagagtggttgatctttttatagattgcagtgattgagacattcagaaatggaattacatatttgataaagaaacagtgtcatccatattgaaagggggtagaccatctggtcaaaataaggataggtggatttggacccgtgagagtaatggacgcttctcgtgtaaatcgactaatctcatccaagctttagaaatggctcctcactatgaagttgcaccgtccctctggaacaaactatgaaatagtaatattttagaacaacataagatattgtagtggtgtgtatcctatctaaggctctcccaattcgtgttcttcttgctaagagactccatattgaggatgtggcttgcccgttgtgttgggggtgaagagaaatcaatggagtacatatttctctcttgtaatttggcatttcatttgtggcgttcgcccccgtggggtatctttcctattgatgggtctagcattcgtatgtgagactaggtcaaatttatcttggggcaaggaaaacaagccattaatacatatgaagtgttttgttatgaatcaatattgttgacacaatttggtagactcgaaacgacaaggtacacaatagtagtccagttaatgtgaaatattgtattgaatcaattcataactcttatgcagattatagagcctctcttttccctactcctcatccgctgctggtagatggatgtcagtctcccctcaagagttgattaagctaaactatgatgttaaagtagggatagaaagcatgtgcatctcggtagtggctagaaaccacattggtgtggtagggtgcataaggcaagattggagttttctaatactctgtgcggagaagcggcaacttactgtttgaatttggaagttgctaattaaagatgaaggctagaatattatagagagtgactcaagggtggttaccaattcgatcaacgaactggagttttgttgagagattggattggatttgataagttcggttcaattagattagattggatgttgcccatcccttgtaattatttaacatattctgtaatgttttgagaaatttgaaaaaaattaacatgcccaaaatagggttcaaattttttttccacgcgtgactcttttattttatatgcgtgtgaaatggactctttgaacactattttttatattgtaaattcttctgaatttcttaaaattttaaaaaaaatgtattaaataactataatgtacacaactattaaaaaaattagacttttaattttttctcaatgctaaaatagataaaaagtgcacccatgcatcctttttattgaaagtttataatatatgagcattgttattgggtactagtagtgtctagcacctctagacatctcatctttcgattgactagcaatactccttaaaaattattatattaaactatatgaagcctgatacttaattagactaataacaatattaacacatagaaaagtactataaataatgtactttaacatttctcataacatatatactcttttactctttttgttggtttatttttgtttgcaatggaaagaggacataatttttaatgaaattaggttccaatcaactttctcttttacagctgtagtcattacttttggaggctcaatttgattaatttgttcgtagataattgcatttattgcatattaaattttgcagcatttcaaaattttgaattctcttctatatattttattatatgtataaactagagaactaagttgcgtctcgcggtgttgttcaatatttgttattttttatattattttattttaatattaattaaatggtataataaataaaatatgacattgaaatgttagaattataaaaagataaaaaaaaaaaaaaagtaacatgatagaatgatagaattttagaaataaaatttggtattttacaaaaatatgtagaaagatgtaattatttttggcaaataataaagaaaattattgaaataacataaaattaaattgtatgtgtattgaaatatataatataagatgccacttttttttcttttatataaatatattgatagacaaatagataaatatagattaatgtataaaagacgataactacatatacatatcaatatcaaattttcaatccatctaaatgaaatttctagtagatttgttttggataaattaaaattttttccaacatcatgatattgataataaattttcttttattactgtggtatggctatcacatttttgctccactaactataacttaatctaattatttttattataatttacagagaaaaaattgatgactcctatgagtaatagtgaaccaaaattatctctatatcttgtaattttttttttttttttttgataacataggttatatatatgtattataaaccttttattagatatagttgcttaattattaccttacatattacattatattataattattgattatattaatgatataaactgtacaaattttattaaatagttattacaatacacatatatatacaatagaaggaaaaaattatagcccattaatttttgtaattgtaacttttttaaaaataatttagaaagaacccacaaaatataagaaacaactcaagtcattttgaactttcaataataaaatacaattatattgattaatattaaatattaataataattagttactaaatataaaactcaagtctttttattgttaaaaaataaagtgtgttattaatatagttactatttttttttattgttattaattacttgaatacttgatcataattagatagctagataatataacataaattttgagagataagaactaaagaaataagtttatagaagtttctacctagatgcttttgtgttaattttatttataaaaaatactaaaattttatggtaatgttaagtaaaaaaattcaaaggaacaaacacaataattatatgaaaatcagcatatattatgtgctttaatatcaaaactcctgcaaaaaagtaaattgtaataaaaaaaaagtccttaattttttagtcagtgaaaaaaagaaaattactctcagtaataaattattattttgtttagatcttcgtaggaaggttatcgagcaaactattttactctttatgtaaggcctacaatgacaacaaaagaagaagaaaataagtatgtacgtattattaacatgcatataaaatgtaatctatatatattgtataaaacaaacatgaaatcaactaacacttagaaaaaaaaaaaagtacaccaaaaattacagaactatcaatatggtagaaattgaatttattataactattttttcttaaaatctacaaatttatacatgttatcccaattttcgtactctaacgtgacatcacatcaatggtgacacgtggaatccacttggaacatctgcttgggaagcatagtccgagcaggatgcctccctgacctgcccagagcaaagtattcagc

SEQ ID NO: 112844 - DNA, 4412 bp, Cannabis sativa
  modified_base (4373)..(4376): a, c, t, g, unknown or other
tttccaatctaatccaatccgcactttgcggatatccgcactttgcggatttgattggattggatcgtgcgaattggattggatcagctattttataaacacccctatatatatgtgtgcactaactatgtagttcatatggatatgggttggttttgttttttgaaataattaattggaaatttggaatgagaaataataattaggtagtgatgagaaattaagtaggtttaggcctcacttttgggtacaagcaaagcaaagcaaataatgaagcatagcattagccattataaggtgggtggggtgagactgagattgatggctttggtttagattttttgttgataatttagaatagaggacgtcttttttggtgttgaaatataattataaagtagaactagtagtagaggataggataagataggaacactagactagaacaatagaactagttgtagttgtagtagtacttgtaggacaagtatacctaactaagaaaacaatattgaaattgctaaaagtgtttaataattttctcagtatcatattactattgatgtaattaagtatcgagtattataatatttttttataaattatcactaattaatcgtaaaatgtcacttataacacatcacactatttctctcaataattcaccctttgaatattcatattggatattaagataggatacccttattcatttaattgccttttatttattaaaaagttgaaaatattattataattagtatcatttttcttcatttcacatcatttttctatattcatacatattttctcgaaatgaatgaaacgaaatgaatgaaaccactagtatataatattatattgaatttattattaaaaatctaaccaaatattttcttgtttaaaaacaaatctacacgagtaaataaatgatataaaaccatatataataacagtacagtacatgataatctatttcttaaagttgtgtctgagtgtgatcgtgtgtaattcaagcaaaaatcatttgctatttcgtaatgtaaattgtaactattattaaattaaataaagattcatgtttgactacaaataatcagtttcttttatatttatatttatatatatatatatagtgaagaaaccgacagagacaaagaatcccaacctctctctctacagtctaatggcggtgaaagaaatacattctttctcctcatcagatctcataaccaattcaattattaccataaactactatgactatcagtagaatagtacaaacaactactcttctctcttcttcttcaccaactaaccaaatctttactccctaaatctaatccaacttaaactctttcttccatttttggtatgtatatatatatatgttcatatctatgttcatcgaattgaatcttcctttcccttcccttgtttttaatactttctgaccttttctctcttgctttgcctgttacctgtttgatcttttgttttcgaatttttcttttttttttttttttcatgggctacttcagatctatcttgttatctaatccatatggggtttgtttttgcaggtctaaagactcaatctttaacatttcattcataatataagatttgaattttgctgataaacaaattcccagaaataaagttttaatttttacaagaagatgcaacaaagggctatgcctatggaagaaggcaaggaccctggagctggagctggagctggtggtataaggacaagtcaatacaaggcaatgcccctaagattgcttcagttgtttgtattgtttctagctttttctattacttttgctgtaattagcatatacactattcgccattttggaatatattatagtgtaatggatacagttaagtcaagtttccaaccttgtttagaggaaccaaacggattggaacaatggattaagcctccttctaatttgatacatactatgagtgataaagagctgttgtggagggcttcttttacatctagaataaaacaatatcctttcaaaagggttccaaagattgcttttatgttcttgactaagggaccaatgccacttgcacctctttgggaaaagttccttaaaggacatgaaggattgtattcagtttatgttcattcactcccatcatttcactctgatttccctccttcatcagtgttttttgggaggcacattcccagccaggtacttgctcctctcctctcaatctcatctgttttaataataagctttgctgattacaagttacttgattctttgagtttgaattttcaatatatatactgtttgtgctttcatgtctttttttggggtcttctgctatgctataataaacattcacatatgtgtaataaggccttgatattaatctcaaatagtacaattgattagcattttagaggctgagttatcgagttttttagtggctgggaattttgtttaagtgtgtctaacacttagattttggtgaatttagtgtggattatttagagtaaatattactcaggggtttaccaagtttctcgaattgtgcacaagtgtgtatcaaatgattttcgattataatgtttctaagggcctaatgtcagccctgcttatagttatagctagaagatcatagttttctgtacaccaaaatcttgcttaatttgccattgttaagccatatctgtatttttcacatcttttctgtaagtcaatggctgcaaatttgcaaatgcccataactgttggatgggattgggggacaaggttttcgaattgtaagtgttgttgtttgtacgtcgtaaagacataatttggaagctcttcatcctatgtatggttgtcccaattatgttttgtgtttgcctatcaaggaagtggtagagtgaggtgattttgttctgtatctttcttctaatcctctagtattcatgttgtgatctaaacaatcaaaacaaaacagtacaggccaataacattgtagcttacacaactccacaggttcagaagctatacaaaacagatcttgttttctctctaaacctctcacacaagctctctctctctctctaggtgaattgatttgcattgcattgagagagaattatagaactaagtttatatattgggtatggttaagaatggtaggctgaggtagttgaaagtaacaaacttaactaccatgatcctaacagctttaactgtaaaaacaatgagttgacctggtcattgagacaagtggctgaaccacaatcaccacaattcattacttaaatccacaaatagttctctactaatgaagtacagttaagaggcacacactgataatggcccttaggcacaaaattattagtctctcagagtttacttgttttccaacaacaggtctcagagtggggaaggatgagcatgtgtgatgcagaaagaagacttatcgccaatgcattgctcgatatctccaacgagcggttcattctgctttctgaatcatgcattcctatctacaacttcagcctcatataccactacataaccaaatccaaatacagtttcactggggcatttgacgatccagggccatttggtagaggacgatacaacgaaaacatggcacctgaggtgaacatcacacagtggcgtaaagggtctcagtggttcgaagtaaatcgaaagctagccataagcatagtccaagacacgacattttacccgaaattcgagaagttctgtagaccggcatgctatgttgacgagcactatttcccgacgatgctgagcatagaagcaagcaatcaattagcaaacagaagcatcacttgggtggactggtcgaggggtggagctcacccggctacctttggaagatcagacataacagatgagtttttcaaaagacttgctgggaaacagcattgcacatacaataacaagaactccacaatgtgttttctgtttgcaagaaagtttgctccaagtgctttggagcctttgttgcatatgtccactaagtatttgggatattgaagagtgagagagagaatgaatatacagagagagttatgttaaccacatttgttgtactattagtttgagtactatgttttggcttccaatattacttgatgtacagacactacagagaagcagctgctgatgagtttagaagattataggccatccattattatttttgtatcatcttgtgattataatgaataattcttttgctcatccaatccaatcttaaatatacacacatatactcaattttactacttatttataattggttgtttttgccagattatctaactaaaaagttgtggatgggttatatatatctttatatattannnntgtctatctaacggcaattcttggtttaacagaata

SEQ ID NO: 112845 - DNA, 2132 bp, Cannabis sativa
  modified_base (2080)..(2107): a, c, t, g, unknown or other
atcggtcccatggtatgaccattatgaaaaatagagtatcggacactagtcacacaagccataatcaagttgatccatctttgatcaaagcccatttgaagcagtatatgtataaatatatataaaaataaggacacaattctgatcacacaggcgttgtacgtggccaatttcgcatctcattaatttcgaattatttttttcaataatttatatatatatatatagttattttcaatattgtaaaaaattgttcaaaatttcttaaaaaactctgtaaaatgtgtaaaatttgtatataatagtcaatgtggggtcattcatttgccactcctcaattttttattaataacatttttatatacatatttttgaatattttatatatattttatttttcaaaaattaatatttttattcctataaaatttatattttttatttttattttcgtaaaatttttattaatttcttacgtttttttattgttatgagactaaaaattatatatatttttttcaattaaaattataatttgttttattattagtacttaatttttttttgcttccactaaaaaaatgtgactgactctgccaccaaaaataaataagggctcacttaaggacttttgtagctttcccaccctaatcatttccggtttcccaataataaaattctacaattaatatataaagtcttcacctttgaaataagatcagcttcgagattgaattatattactacactaggcataatgatctctaacattttcttaggtattatattagtcattaagtatagagattcatatataaattaattaaaagagtatctttaataggaaaaacacttatagttattaaaatatactcatcattttaaaatattattttttattttgtctctcattcgcataagattttatcatcttttctttgacaactctaaaagttatccatcatgatcccagattacattgaattaatgactttttaaataaaaaaatacaatttgatcattatttatattgagcaatattattataatatgtataaagttttaattatatacaagtagtcttatagtaaaggtatacaccttatatcataataaccaattaaccacaagatctaaaatcaatgataaaaaaaaatttcctaccagtaaaaaacttttgctaggtcttaatataattttaccatataaatatacataagtgcacattgacattttcaatagtttgtgcacattgacattttcaatatatattttgtgaaaatgtatttacttgttgttttcattgtacactaattaaggtcaatgtattcggccttgttttttagccacaagttagagttgctcccacactctacaatagaaatatatgcatggatccactataatcatataatgacatttatatatagatatataaattttatttgaattaatttcgatcttaaaatttttgatatatttcaactcatgatctcagaagatggcaacaagtgtccttgtcctattcttatgttctcgacttctcagaataagatttggtcattttttctttaaatgtcaaattaattaattgaaacttaataatttcataaaaaaaatatatatgcatgtatattgctacatatatagatataaatttcattaatgctcatttttattgttatatttattaattaaattaattactgtactgatcttatctcttatgacaaagagagagcacataaaaaaccattagtaatatctcaagtattgtccctgatatttgataaagaatttatttattttatacataaatattttaattaacgacataatgtaatctctcttttaaatagatatttaaccattaatgtctacaataattcatatatagtgtatatcaaatacacgtttatgcataaaaagtctattgcattactactcatatgtatgcgtttttagatgacttataaaatatagtttatatatattatttctcaatatatagtacgtatattatatatcgtaatttttgaaaaataattatataattaaatattgttataaaataatatannnnnnnnnnnnnnnnnnnnnnnnnnnnaagaagaagatgaagagagaaagag

SEQ ID NO: 112846 - DNA, 3263 bp, Cannabis sativa
  modified_base (2764)..(2775): a, c, t, g, unknown or other
taaatacaaacataatattttctttttgagagataaaaacaaacataattttctctcattagtttccacttcaaaagcttttctcctctctcaaacataatagaagcattctgaagtagtgatcatcaagaaatggaaaccttatcaagaaatatcactaagggcaagaataatgtagttgtggctgcaaagggtgatgatgatgatcttgatgaggttgaagaaataatgaaaagggttcaaaagaaagaacatcctaccattgaaggtaactcttattgtttctacaatggattttggatctcaaataatttattcaaaggagttatctcatttcaaaaacactatgtagcaaatgatgatgatatagtcttggcttcatgtccaaaatcaggtactacatggctaaaagctcttaccttcacaatcataaatcgatctcatttcacactctctaatacccctttattagtttctaatccacatgatcttgttcctgaaataagcctcattgatcttcatactattgatgattatcatcataaaaattcaccaagactctttagcacacacaatgcatactcacttttgccactttcccttaaaaataacaactcgaaatgcaaaattgtctacatttgtagaaaccctttggatctctttgtgtccctttggtatttttcacaaaagttttcaggaggcgaaaaaatcaaaccccatagcttggatttgtacttcgacaacttttgtcaaggaatccatgcgttcgggccattttggaaccatgttttggagttctggaaagcaagtcaagagatgtctcacaaaatactgtttctgaaatacgaagatcttaagaaagacaatgtatttttcgttaagaaattagctgactttttggagttcccgttttctttggaggaagagcaacaagggatgattgaagagatttcaaaattttgtagcattgaaagaatgaaaagttttgagataaacaaggttggtaagcatgattctttgagtataccaaatagttctttctttagaaaaggtaaggtgggagattggaggaacattctcactccccaaatggttgacaatgggaaaaagctcatccaagaaaaatttagagattccaatatatcttttgattttgaataattctgtttgtgttgtaatttttgtgtgtagtgtttcaataacacattattataaatgtggatctcacaacttttttagtgtgcaaagtttaataagtgatttggaatacatatgtgttaatgaaattttcttaactatgagcaactgaataattaacaaattagtttatcttgaactgattttaaaatgtgatagtaaaaggtctattataatgtacaaaatagcttttaagttttttttttccttaagaaaaaaatacaactaattaattatttagaagaatatttgtaccaaatatagcaatatgtatatgttaagtgttattgttactatatgttcttaattaggtacatttataatttattaatactaaacaaatttatgagaaaacaacaagattattgtttggtaacctaattgtacatcatcacacacataaatatataattacatatataaattttaaataatattatagtgtcattcattgacttttaaataattgtatcatctatccacaatttatatggagatattatttttagattgagtaggaaaatatatagatacaaacaaggacttcctaacaaaaaatattatctataagtattatccaataaatgattgacccactaggatcatatatgatataacatagtaatattttaatattaattagtgataattatttgttttagtggtactggtatttgtctctttatgataaatttcaatacttggtatttgtctttttaaaagtgctttacgtttaattttgtcattgtagagatctgtagagatctgatttggaagctaaaaaaaaaaaaaaaaaaaaaggaaatccgaattggacaagtacaaaaataagtaacaactactcttattatttgttaaacggtctacaaataaagctgctcattgtgtcgcaagagaatcctattttatatcagatggtgtctttagtgagctgaatgctcctcttagacttaaacatattgtaactactgaatattactgaataaataatatttcctttcgcgtaaaaaaaaataatatttcctttgttaaaaatatatatgtaatttatattaaaagtagttataaaatagtaaattattttttaagacattacaatttaaatttaaatttattgtggtgttgtttgataacacttttgttttctaatttcttaatcacaaaatgaaagtaaaatttttatgtttaaaaaatttattttagaaaaataaaaatgcgttatgtaaccacttttatttttcaattttaaaaacaaaaataaaagtgtattttgtaaagtttatttttatttttatattttaattttatttaagtcagatctaggtccagggtcgaattcgggttagggtcagaggtcgcgttcagcgcgaggaccgtggggggatttgagtccgggtcttgtcagagtctaaaatattgattaagaaaaaaaactatttaaaaaaaatattaaaagtgactttttttctaaattttaattctcaactaaaaaattaaaaattgaaaataattttatagaacatgtttttgaaaaatatttttatttttctaattttaaaaataaaannnnnnnnnnnnaagtgttaccaaacgccacctatacttatctatttattttgttatcttatattaaatgtggctagctatataatataatatctttttaacattgtaatttaaatttaaactcattgcacgtatctaaaaaaatatctctttattatattatcaattttttatccaatccacctgatccaaaaaaatatcgttctattattgtgtttttttttttttaacaataaaatagaaaaagtgtttatgtatcttaaagaatcaatattgtgacgtcgttaccaattgcagttaccaaaaaaatatatatttctattattattttcttaaaaaaaatagaaaaagtgtatgatattcctaaaaaatatattataaaattaaaaatattatggttaaataatcaacaacaaattttgaatattattatattttctttttataaatagcactgtttacaccaagagtagccctgatgacatggacatcaatgtttg

SEQ ID NO: 112847 - DNA, 2097 bp, Cannabis sativa
  modified_base (2066)..(2071): a, c, t, g, unknown or other
tgctagttagggtgttacagttttcgtagccaaattgtgagcattagtattaccatttctaggaacatgtctaatacaaactttagggaataaagacaaaaaactctcaacatcatcaataatatccgataaagttgaaagatcttctttattatttctaactttgtcaaccagcaatttagaatctgtttccacgatagcaagaggaaccttaatgttataacacaatagaatgttcgatttcaaagttaaaccttcaaccataaggaaattagcacaacctgctgttggaatggacaaaccaacaacaaagttgcccctccaatctttgaaaacagtatgaagcctagcttccttttcctattatccatggctgcattagtattaagttggtaaaagccttcaaccactttaacatcctgagtcaaggagtgattaggcctgagttgcttgtaatccatcgagttcttttaagctcccttgtaatctgagataaaagagctaatccaatccacaatattagtagaagacatgatttttcccaaataatttgttatttctattcccttagattttccaaagagtggatagcaataataaaatatcatttttttttgtaaaagaacaaaaccagagaggatgaattctctaatatcattattcctgtgataaaaataaaattaactaagaggagatgctttccgaaccagatatgctcttgaacaacctagcaagacatgagtgacagtttcattggagcagttacaaaaagaacaacacgggttgggagggaattttttggaaaaaaagttggatacagtgggaagaatatgataataaaatctccaagagaagagtttaattttgggaagaagacacgagctccaaatggttgtccaccgcttcttagtaaaactacaatccaaagaggtgggagggagataagcattattagctagctaaacggtaagcagtttttacagagaataaactagagggatgcagattccaaattaaaaaaatctttcttgcccaaacctccaagaggaacctggagaatgtgagagaaacaacattatcaaaatagttatgaaagtacttcggataatatcaagagttatgaaagttaggagtaggagaaccttttttaatcacacttatggaagataggcttgtgcattgtaagtacaaatttgtactaagttatgaatgttaggcttgtatattgaaagtattgttagaaatatttgttatatagacactttatgtaatattactcatgtaattgtcttaataatttgaatttatcttttattaattctaattttatattattacttttaatagtgaactttcagttgataatgtatatatttttatatggatatatggtattagtttatcttttatatatggacaaaacaatattagtttatttgtgatttttttattatttgaaaatttttaccgtgaaaatttttctgtgtacacctaagttccattatagaaccgacgtaaaaaacacttgttacgtcggttaaagattgacgcacaacttgttgcgtcatttcaaaattgacgcaaaatgctttattttttttgtgttttgcgtcgattataaaatgacaaaaatagttttttgtgtcattttataaccgacgcaaataaattactatttacgtcttcggcttatacatcagttttttaaaccgtcacaaaatttttattagtcacttgaaaaccaaccaaaataccccttttgtagtagtggttcctcaaattttgaatgatatttccaaatctgaggattgggggaggagtgaaatgacatgatttcaaagtctttctacatttagctgaggcttccatgaagtaagagaaatccctatgaatttcttcttccctctgaaactattgtaaggaggagaccagagccaaagcatttgtctcatcttcgtcatccacccctacttcggactccaaaaagttaattaggtcaactccgattagttctatcattgactttgtcttcttcactgggtccaattgttgggttttatgccctnnnnnnaactccatttcaatgtaatctatttt

SEQ ID NO: 112848 - DNA, 3462 bp, Cannabis sativa
tgtctgacctcaacctattgcagtttaaaggtatgccagggttcctatgatgctagtatgatcaaagcgtgggaagagtgggatgaaaataatggttcagaaaatgatcatccgaatgaatttcctgataaacaggtttgttttacttgctgttgaatttttgttatcttttgaatctattttgacatctctaccataccaagtgtgcatattgatatttttatgtatatttatataatgagaattgaatttcatcctctatttaaggattgctacaagtttatgaggtgaatatggtctttagttgttttatacaactggtgatgttgtatgcagcgctatgtcatgtttgtcctagaacatggtggtaaggatcttgagagctttgtacttctaaacttcaacgaggctttgtctttcctggttcaggtaagttgcagtcatgtataatatcaatccatatttcctgcgaccaaaaatctttaacttgttattatgtaattattttgttgtgctttccaggttacagcagcccttgcagtggcagaagctgcatatgaatttgaacaccgggatctgcactggtacaatttattgcaaaatgtggttttgatcgattgattgtggagtgtattttgtggcttaacgaaatttgtctgtttgcaggggaaatgtccttttgagtaggaatgagtctgcaactgtgcagttcattctcgaggggaagaagatgtctgtgaagacatttggattattggtttcaataattgactttactctttcaagaataaatactggtatcctttttctctcctctggtcagaaattatataatccgctatattataaattttcttttagtagcatagttaaccaatgtcatggatgcacaggcgaagacatactttatctggacctatcctcagatccttatctttttaaaggtcccaaaggagataaacaagtaagaagtggtgatatggaactaatgttgcattagtaagtttatcttaaaacaaagctaatttaggtttcattgcttccagtcagaaacttaccggaagatgaaggagataacagatgattgttgggagggaaggtacagttgagaaaatagtgatgcatgattataaaatactggatagaatctgttctcggatgatatagaaaaagaaaaagaaaaaaaaatgtatattgtgcatgcaccattgaacaaaattaacctggatctttatcttggatcctaattattgttaacttttattgttatctttgcttctaatttataaggatccttaatcttaatgtgaacatattatatttgacagcttccctaaaacaaatgtgctgtggttgcaatacttggtggatatattgctcttgaagaaatcatttgtaagcttaatttcttctttaaacaacctcttcagactttttttttttgtttctgttagtttaaagatactgcatattcattgctttaaatccatatctagaatggatagttggctttgatgttgtgagggtctttcaatactattaggatttgatagttggctttgatgttgtgagggtctgttgacacaattaggatttgatatacattgccctctaaaagaggtttcttaagctttcaaaatatgatccaaaaggggtagcttgtgtagtagacacgtggtttaggcatacctacaatgcctgaggttcgagtaggaggtacctacatggcaattgccatagtttccggaattccaataattgtagggttaggcgtaagttaaattacaaaatatgaggttcttaatctgaattgtgtaagtgttgggaatgatctttcaatagtcatgaattcttgaatctaagcactcataatcagatatgaagaagtgataatattttcggttttaactaatgaaatggtgtggtaggaacgtacctcaaagaacgagagagatctgcgctctttgaagaagcgtttagatacatatggttctgccaaagaagctatttctgatccatttttcagtgacttattggttgaacgggtacaaattattgacttggatgactagtaacttacctgcacaagaaaagagggaggtttttttgcattgtatatcatcagcagaaagatttgtaacttttttttctttctttcttctgtctaaagttagtgtccaaacactgataattgtcatgtgtaacacgtcattttatggaccaagtgtttggatatcgatgagaaatgttgattatgatatagatcacttgcctttttctggtctgtaacaaagatttgctatgtcattatgcactatatatactatctagaacaacttgttcttttgaacccacttttgtgtgctctccaaacaacaccttaaccaagaaatattagcaattattcaatgtactttcttgttaattttttataatattgctactgactttttcatcacctgatttgtttcaaaaagatgttgtgtatatgctgctgatttcaccaaccccaccatttttttttgggggtaactacttgctctaacaagtttatatatatacatcaactcaactcatatgtttttatccattccaaacttttaagagttggaaaatcaaagcctccaaagctaatatctcaaattgaatgtacccatatcagaactttattatatcttttaattttatgggtcatcatattcatatgatgacacttaaataaatatatataaaaatgtactcaaccttatcgccgctaatgactgtatgaccatctttgctttcggctcagaactttagtcacataataatgtgcttttgattcactcttttgaatttcacatgggttgtctatactcatattaatattgtattgtatatattctatatggtcagctgatagacaaaaatataaggctcagttcagctttttatttatttttactgctacttatcattgatattaacttgcttgaatttaacacacctacctagactagaatatgataaaactgttttatatataataaataaaagtcccaccaaggatattgtggttgatttatacaatcaggcaaagaaacaaaaagaaaaagaaaacatttttatttttctttttcttttttagaataagtaattttgcatggttttgttgaatggatatatatgggtgtggtacgtttgtttattgatcatgggaccatgatgatgcagcatggaatattttgtgtcagatattttacacgagggattaattgttaagaaatttatatattaattagaccatgtctcactatcacatcttcttgcaaagccttattcaacaagtaacactatccaaaagtaggaatcaaatacccaaaaacaaaaacgagaagactttctattattttatcgtttggaacgccgtattagatcgtattgtattgtattgtattatattgaattggattatatatcata

SEQ ID NO: 112849 - DNA, 2150 bp, Cannabis sativa
gggggtattttttggggttttgaaaaaaaaggaatagtttttttaggttttaaatttttggtttagggaaaaaaaattttgattttctaagtatagaaaatcaaatttcccttttataatgtgttctttctttttccaattaataacttttctcaaaaattaataactttactacaagcgccaaatcttcaataactaacgcatcatctgatatttatttgtccacactctaatatatagtatgagcattgtcatttgttacaattcaaattcacattttatgattagtaattttttatattatttattaaattataatatatgagattcaatattaatatacattaataatgatatattaccttttattatatttgataccttaaagtatccttagtattctcaatattttatttataactttttagtcaattttcatgttagaaaatacatgctgaaatatttttttttttcaatttttttcgtaacagtgtttgttatagttacaatattatccttataaatttttaaaattttttaaataatttatcgtatcgaaaataaatttgtaattttttgaacgtgctaatcaaactaaaatatcaaaaattccgtttccagtattatagaatctcacattacaaatgtgtaaaaaataataccatatatgacatttaagagctacttctctcataatttattgattgtgagataattagtactcatgcctcttctaattctaacataatttattgatccatttgacatatattatataaatatatgaaaaaaaaaaagttgtcaacataatgaagtattcgaattttgaaagggccaggagcaaatctttaatatgtatttttctaatgatcaattgagatacatttttgctgaatcacagaatacgtacaaaatttaataagcactaattggaatttggaagacgacccaagttcatgcatattatataaaatattatatattccagttcagtggcagtgtggatgtaattcatttataatttatatatacaactaaaaatagtgattaattaatattagaccatagaaattaattagctctctcttttgatacttttagattctacctagctagggtttcacacgcaaagatcagtgtaaaacttttgaccattccacatattacaaacatcaagaataaattattatatatatatatataaatatttttgtttccttccatttcttttggctttcaccaagagttgacgatttaatttggtttccttctaaactagctagtatatatatagatatttataatgtcaattctaactgtagtatttataattaataattaaattaatttgactaagaaaaataacagcatgtctatacataattgataaccattacaaataataaatcaggataaaaagaaaggagagagataatttgtgaactataattttctttttgctggatataattttctcatttaataatgcaaatgtcgagggaattagtgtaggatctgttcttcttcttttttttagagagaattgtacgtgtaggattaatatatagtattcaattattacattaaaaatataacatgatccttacatctgtatgatctactataatatatcactaataagtataattttatttttaaacttaaattaattatacacttaaaataaattaatttttaattaaagtatttaacaaaaaaatttcaaaaattgatatttataacttttttttttttaaggaaataaatcaagttagtatcaggggttacaagtaatttattaattatgtttagtaaatttttaaattaatcacaaccgtctaataataatgatctaattactaaaataaatgtaacaattataattacatatttcatgtaactattaatcacaaccgtctaataataatgtcgatggtgcaatttttgagcagtgggggcgctatggtattgggtgtacagcccgcgatcatgaaggaagaattgtggctgcattcaataaatcttttgaaggtcgggtgcaacctaagatggctgaaatcattggcatcaaggaggctcttagttggattgatagtttttcttggggtgatgttgttcttgagacagatagtttagtttgtgttcaagct

SEQ ID NO: 112850 - DNA, 955 bp, Cannabis sativa
cctttgaaagtaatgaaaatttgtcacaatttcccccaagctcgcctcccttgtcatgccatcaacatgctgagccttctcttccaatgattctgacactcccaaagaacccccatttccctgtttcaaaagttccccatcttgttcatcaatagcaccacagccatctatgccaatggaattaacgggtttctcagaaaccacttcaacatccataggcacagcatcctcattctcatcatccaggttctcgccactcccactagtacaaactccaccaacatatacatcagaacctaatactttcaccattatgtcattcccatgacaagaatcatcttccaccccattactgaatgacccctcaatctgcccctgagctgtatcaccaccagaaccgactagggtttcacctgccacatgctcactctcagtcactgtagactctggaacactaccgacagggatttccccgtccttatttacatccattcaaatcgctatctgggtatttctcaaaaccatcagaaaaaagctttttcaaccgcaaataaataaataaagtaacaatattcaaaaatccttaatcccaaaaaaaaaacctaatgcaagcttgaaagaatctacagcaacagaatcaagaagctgatcaatataatacaaaaataaaaaacgaaattgacacaaaaatagtggacgaaagattaagatcatggtcgtaccttgctagatctactttacagttctactaaaatgaggattttgagagttggggcttagagagattgaacataaaaccttttttttgggcacagcaatatggttcgtaccctttaagagatccaaactaataataataattaatttaaaaaaaaaagaaaagaaaagaaaaaaagagtctgaatataaagtgttcttgtttttttttttttttttttgaaaggaaaatcaactt

SEQ ID NO: 112851 - DNA, 1478 bp, Cannabis sativa
tatatattatataatttatttacatatcttactattataaaagtgtcgtaatagtgtgataattataatgacaactttacccttagtgagaatctaacataataataatgtcagagcttctcgatagttccactgagagagcgtgcctagggttcacgatgtcttcttctcttttgttgcagtcaccgtcgtcgtcgccgttcatcagcgttaatatccgtccgtggtctcctccattcaatgacggtagactcggtagtagcacgatcttccatccaccaacgctagcttcgaatgctgttagcagacgaaaccaagcattcattccatttgtcttctccttcacaagtaaccttcaaatctgtaataacttcttgttttgtgtcccatctgtgagtaaatacccattgtcttgattatcacctctccttctactctttgataacaagccctttttgaattgtgcaataaatatgcctcatcctcctgtaccccctggcttatgattagatctatatatctagacgacctctcttctcttacagagaaccttagagatcccgtaggagccactgtcgaatttgcagagataatcattcgaatgtctaatatggagaagttatgtttcgatgctttttaacccatagagatacctgtttcattccatgctctatatataactaaatctcctctgttattcccttcatcttgtatctttcagatactttttcttgatcgtaccctctttataacctggtccctttccttttttagcctctctatctcacgacatcacttgaacatggaagacctatccaacacttcgaatgtagctttgaacctcactgagtttgaaacccaaatccattccttttctgatatccctgaacatcctgaagaagataaccgcgaggagccatcagcttttcttgctgtaaagctgttaaccactcgccattttaactcggaagctttcaaaaagagacttaggcagatgtggcctgagcatttttctatcaatgttctggagaaagaacctaattttttcactgttgagttcgggtgttttggtgatcatcaaagagtgcttgttggtcagccctgacattttgattataagcttattgtaatgactcctctttgaagcaggttcagttattaccgtcgaaatgctcacttccacaccattttggatccaagtctctggtatcccgtttctaaaacattctcgtgctcttgcacaaaggctcggtgaatgtgacagtcagtagtcctgtgatgcgtaaggggaaataccaggtaagctgtgcaatcccacattgccaggtcagtcaagtgggatgattctgactgatactatgtaggtatgggactgcacaattaaagagagcacaaatggattgattgttactacctatatcaacaaggtgcatcttgtttttcgatagcccatcatgaaagaactccacagttaagcg

SEQ ID NO: 112852 - DNA, 2149 bp, Cannabis sativa
  modified_base (2092)..(2094): a, c, t, g, unknown or other
tttatattaatggctgtttcactttgttgaacaaaaaaaccaaatttatttttcatatttgtcagctgcaattaattagaattgtacatgtttatgtataaaaattaggctgcaaggtaatcccatttgtacaagagcaaatgaacaagacatagttcgattctgtggacaagaagagaaagaacttgacgaacctccaagaaattctagtagttcccttgacgaatgcaaaccccaatcatgtccgaaaaagttttatgagtatgttccaaattctcctactccttgcttttgtgctgcaccaatgggagttgggatacgattgagaagtcctagcatatgggattttcgaccatatgttggtcaatttcagaaatatatggctgataatcttttagtggaaccttatcaacttgacttaggttcattcatatggcaagagggtcctaggctactaatgcttctaaaagtattccctcagtacaacaataattctaatgagttaaatacaagtgagcttcaacgtgtgatgaacacgtttgctacatttgcatttccttcaaatgatatctttggcccatatgatctcctaaattttactctccttggaccttataaagatggtaagtctctagaaaatattgtatttgacaggttaattgcaaaatatcattaattcattatagataaacatttttcttttcttcacattatctcttatcctgttctttatgtataatgaaactatgtttgggatgggttggaaggataatttgttggtagatttaacacatcttgctaagatggattttgcgcaaaacaaaaatggtattttgaaaaattctcaaagtataagaaaagaaatcataatctattattgtcaagtcaaggggtactttccataactacaaataaattataacttaaggtattcatgtgatcttgaaatctttttctattgatctgatgtgcgtgtcttgatcttatctcttattggtccagttatcattgtcacacagtcaggatcaggtatgaacaaaaggcttttggtcggaattgtcttaggatcaatctcttgtggaatgacagtacttggggcaattgcatatcttatttctagaaataatgaagaagataaagttgtgaaaagaaaatatagtaagtcaatttcaataatagttcataattattttttagggaagtttggtaaataaattgtagatgattaatcttatctctctctctctgcagcacaaaaagctcctagccattttgatagtgtaaaaggatttagcttcgttgaacttgaaattgccacagacaattttaatatgacctctcaagttgggcaaggaggctatgggaaagtttacaagggcattctagcagatggcacagttgtggcagtcaaacgtgctcaacaagcatccttacagggtgagagagaattttttacagaaatagaattactctcccgagtacatcatcgcaacttggtttcattggttggcttttgtgaagaagatggagaacaggtacaacaacttcaattgatataataccataaattcatgattttaatgttaccagtacatgttcacttgataaaaatgtaactaacaaattaacttagatgtcttcattgtattagtattactaattttgataaaaaaaaaagtaagtattttgttttgcaatgataaaatatttacgttattgaggtgttattttatgatttttatttatttgtgtgtgctttttatgacaatcatgtcattactctactgtgcagatgttagtatatgagtttatggctaatggctctctttacagtctcctctctggtaatgcttgtatcactcttgaactaagttcatcgtttaatccatcatttcaaataattagcataaatgactcccagatttttgacataaactttattttcatttataaattagagaaataagatatataatgagcacttttataatagcctatatgatacaatattgttgattttttttttgccatattttttttggcttttttcataaatgtacaacaaaaataaaataattacaaaaaatgtgcnnnaaaaaattattttaaaaatttatacatttttaaaacttattatatgaaaccatac

SEQ ID NO: 112853 - DNA, 2308 bp, Cannabis sativa
tgggaggggtagttttggaaaattggtaaaatagtcatacattacaaattttaataagtatgcatttaagaaaaaaattataaagttatgtaggtatggaaattcaaatttcacaataattatcaatatggccaaaaaaaagttttttaaacttttaaaaaaggatagagaaaggttttttataataaaaaagaaaaaaaaaagaaaatagttgtcaaataattggatccctaactttagtcaacgaagcaaaataataaaaaaaaatagaaaagaaaaaataaataaattgtttgtcagaggaccaacggtatttcattatgcaaatcggcagcgcattactataaaaccaacggtattttgtataataaaatacctgaccggaattttgtaattaaaataaaatttgtgtcactgtaaatttctctataatttatctattttctatctttgattatttaaataatttattcttttagagtaaacaaaatattcattaataaataaatagtgtaaaatctattacatgaaaatataatttattgagcaaaatcaataaaaatgggtattacaagttgcttaccataaataagaagaaaattctaacaacaatctcaatttgttaagattctttaacatgtttggacagtgagaaagaaaaaaaaaatgcagagaaaggaagaaagaaagagagacagattgattgtcaaagagaatcaaatgttgttattgattagccattaaatgctcatttatacaagcaaggtcacactataactcaagctgaattaaacaagaattagttacaaaatctattaaaaaccaacaaattaccactaacaaacttgatccaaaccgatacctcaaactagcaattggaattattgacaattgctagtttgtttatgaaaattgaaaaccttgaactagagatagatttagttaatcaatctgcaacttgatctaatgttggaacatgtttcacttgaatgaaaccttgcaaagtattttctcttacaaaatagagatatcaagctctaatgtgtttagttctagcatgtagaataaaattaagattaagcatcatagtatcgaggttgtcacaccaaatagaaagaactttgggaagctgaatttttagttctaagaataaagagtgcagctaagttacttctgcaacattaacaactagacttctatactcttcctcaatgcttgatatatcttgaagttgtgtgttacttcttgcattgctaagtgattagattagacccaaaatagataggaaagtctgaggtagacctcctatcatttagatcagatgcccaatcaacatcacaaaatccaaccaagtccagatcagtaagcttatttagatgcaaaccatagtcaagtgtgccacttatgtaccttaagattctcttcactacaacccactgaacttgaagaggattgtgcataaactaacacactttattgacactaaaggcaatctcaggtttggtgatagttaggcattaaagagccccaactattgacttgtaagttcaactggatcactcccatagctgataacttgagctcactggtcattgcatggtgttgttgaacacttggctttctccattattgatctacataataagaaagcatactttgtttgagacaaaagcatcccttcagtggtgtaagacactttaattccaaggaagacagtttgcccaagtctttaagtgaaaactagtcattcaaagccttgatcaaattggaaatcactcattgatgatttcctgtgatgagaatatcatcaacatacactaaaactaaagttgttgatggatttaaatgttgaacaaataaggaatgatcagctttagatggagtgaaacccagggatacaatgcattttttgtaacttctcaaaccataccctaggagcttgtcgtaattcatacaaggctttgttgagattgtagacaagatgtggggaaaatttgtcttcaaatcctggtggttgagtcacatagacttcctcttacaagtcaccattgaagaaagcattatttacatctagttgcctcattatccaattattagacagggtctacaacaactttgattgtaattggttttatcactggactaaatgtatctgtgaagtcaaagattagttaatggtgaaaccctttacaaccagcatagatttatacttgtttactgtcccattaacattctccttgattttgtatacacatttacaccccattggttctctcccctcttgtaacgtccccgcttcaagcctcca

SEQ ID NO: 112854 - DNA, 3709 bp, Cannabis sativa
gctcttccgaaataaaaaataaaataatttttattttatttttttatttagttgtattataaagtattggaatattattctaacgaagtaaatatatttttattattttagttgaatgactattatatttttattattttagttgaatgactattatatatataacttaggtattattacttttaaaaattaaatttaagtatttctttgcagctggaagttaaacttaagcatttatgtcacaaattactcattttgaaatggaaagaaatatccttctaatgtaaaataagaaaaattttaataaattttttactattttttttaatacatttaaaacttgattcaatttcattcctattctcattctcatattcaattctattctattattatgttttcattccctttattccaatatgtttacaaaatgagcttgttattaggtactagtgttgcctagcacctctagacatgtcgcgtcgcgattagctagcgatactccctaaaaattatattgacacataaaaatgtatcaggcactattagtgtcctttagcatttttattacaaaattgtataagaataataaaaacttcagtatttatgagattaatatgtttccgtctgttgatgagatcacaattcatattaaaaaaaaggaaatttacatggtatactgatttttgtcatttttttacaaaagtattgccaggtacgtattttttatttttttactgtgtatttttataagtttcatactacagtatactgtgtttattttttagctcttttttttatttgttttagtgttgtttgcggttgtttttcataatttatttttttaacatcgatttcactgtttttattctatcttgctggaattaatgattgttttttgggtgttctcgtggtgctggggtggttctattcgtggatgtggaagatggaggctataatatacatttcttcgtccttctatatggttattttgtggttatttttttttattttggttctcctaaaaatacatttgacgagttcactagaaaaaaagttttgaggtgtgtggttcttttatattttttaagtgcttatatctatttattgttttacatttatttttgtgttgttttagtagtttttttgttctgattcgacttgcaaatataattgctattgcagtataaaagaagaaaaaaatagttgagagagtagaaaaataatttctgccgtgtggcagtatttttgtaaagattggatcaaaattgaatatttttctaactttcccttaaaaaaataatgatcacatatgaacatgccaatatataatattgcatgtgttaatagttttttcgtctcataattggatcgacaattcgacatggtattataaaaagctagtaattaattaagtactaaaagctatatattttctttcttttctttttttcctccgaagggataattatgatcgaattctttgactatcattgcttttgtgctatattaatttatttgtcaaagtgaaaaccagttatgttactgttaattgtgtatatgttcccatttatggggaacaatataattgccaaagcacattattgggtaatcatgattttttaataatctttttaatattgctgtaataatttccttcaagtatgaccgtagaaattagaaagattgtgtcttaactcgattttttctatttaattaaatataaataaaactaaaagtatactatataaaaataaatatcacaatgaatttgcttcttatgctacataacatcataaagctttagttctatattcaatttactttagcttccactcaaattagaattactttactttactgtactagggaaatgagtgtgtactagtagtatatattgtatacagaaaaaaactggtcaagtttttcaacgaaagtggccaaataattttgaaaaaataaataaataaaaagctcaactttttttattttaataattttcatgagttttcttcttagggctactagttgggtgatcaaatttatgattcaacgtacacaagcaaggtaagatatatggcatattcccaatggtagtaacttatccgattcatatttggtcacataattgacctaaagaaaaagtattaagggacacttggcagtgaattaacaaattaaaagcccgtgcgggttaagattagagcaattgaatatgttgaccagaatatgtcacacgtgcaaagcaagagaggaaaagaaatagtcattgaataatacttcggaaagttttcatgattggcaatttggcatcttaaagagaatgattccaagggcaatcaaaatgcctgtaaactttggttaagtccgaatctgctgtaagaaacctatatcgtaatacttatctatatatctcgacaccagttgtataattctgacgttttaaatttaatcgtcggggtcaacaaatttgaaacaaatagagaattacttaactgtcttaaatctaaactgaatgtcacccgttgcgtttttttttctttttttcttttttgatgatgaattttgataaggatgatttggagaaaaaaaaaaaaaagagcaaaattctaagttcgtttgttatttagtggctgctgttcgaaccagtttggttacttttttggatgataaaatgtgtgaagaattttacgtacgaaacgcaaactgatgtattaattattggccatgttttcatctcactcactggatgctctttttttgatcagggagaaaaggcagtgaactatgaatggggttggggagctcaatttatattggtggtgttaaactgttaataattcatttgttaattaacattttctttttagaggaagagagaaaacttgaactagaaatctagaatctatataatataattgacatgttggaagaaattcaaaaattaacaccaagttcgactttttagacagctatatatagaatgttaattcttcttagtccgtagaaaactaatgtaataaaaatgaggttatttcgtaaataatccaaaatgataaaaaaatttatatatttaccgatctacatttattttgcggttactattaatttattacaaaaatacgtaccattattttttaattatttattctaaaaattgttttttttaattattattttcatactacaattaatattatttcggtgaaaataaatttgttttcatttttatttttcagttttgtttttagtcaaattagaattttattaatttattaaattagtcaataaataattaagattgtaatttaatagaaacatcacttttaaaacaaaaatacgaccttcttgtaaaacaataagtaatcatattatcgtttaataaaaattaagaaaaacatattgtttagagaaaaaaataaataaacttactcgtttatatataaatatacatatatatatatgtcagtttaaataattgttgacccaattaaactattttgaatttttgatggcacgtgagaaaagaaatcatcccaataatgacggtaattttttttattacttattgtaattttttgtttataattagtactacaacctctagattcattgcaccgaaccaaaaactattttttttgagcaatttgcggcgaaaccccttatgttttgatttttatacacttaacccccttatctttatttttgg

SEQ ID NO: 112855 - DNA, 4351 bp, Cannabis sativa
  modified_base (32)..(39): a, c, t, g, unknown or other
  modified_base (4319)..(4325): a, c, t, g, unknown or other
taagtttgtaatatcttaacttagttgcaatnnnnnnnnagtccaatgtatactccatacatgagattaatatatttaattacattcaaattatttatttatttatttattattttaatttagtcacaccaaaatttgtgattaaaataaaaaaaaattgtgaaaaaaataagtaattcctatgttatcactacaaggtccgtgactaaagatatttatcacaaaaatcacaattctttgtgactaaatgtgtttttaattacaatatttattgtagctaaaactaaattggcgagaacttgtattaatgacaaaatttatgactattaactgaaaaattgttactataaaaatattttttttattttattttatttagtgagtaccatgttactaaaatatcactagatttatgttcaacaaatataacatagggatactcatttttatggttgtttgctgaatcttttagaaatcatttgtaataaatatttaagctaaagaaaataagattaaaaaaaaaataagacagttttatgtgttcggggcattaacttgctttaatttataagtcattattattaagctcttagctatagagtttacaattaatgtattttcaggtttaagccttaattagtccaagttttccgaatatcaaaaatcttttgaaatactttaatttctggaagcaattggaaggtttttgatattgtgaagactcattggaaagagaaggttgatggctcgcatatgttttgccttatttctcatttgaagcttcttaaggtcggtcttaaaatctggtgttatacccaaagtttggctatttatcagaagctgacacatgtcccacaaaagtaatgtgaatcaactcaaaaaatataataataatgttgtatcattaaatgcaattaaataactcattataatttaatatacgtttaataaataatgttcaaactcgttgattgtatagtcttacgcgagacaagaataataactattaaactggtattgacgagacatatgtttgtcttgggataaactcagataaatatacaagtagatactcactcgttcgagtagattacggtgacgccaaactcacaccttgatcttccagatcttccaccacacacaaagactagtgtgtgctatagtagtgtatatcaagttcttatttttctcaacacatgagcaagaacaattctatggtattgatggacagaatagattaattagattaattctttttaggctttcataaaagttacgtaatttttttggcttatacagtatatttaaataaactcaataaatatttttttgattaattatttaaattcaaatcatttattaaattatatttaattatttgaataaataatataattgaattttattatagagatttattttctatagccgattgagaaaatctttcaaccactcaagagaatatctcaactacttttcaaattcaaatttaaataaatattaatcttttgaattaattaattaaatctaaaacaaatctagtagaggacaccctacaatagtggtgcctacactgtgattggacacaatgtaggtggcacctccctcaatcttagttaagacaaggtttgtgtattttgtcgtgacaacttttgtcttttcctaatttatttaattaattaattctaaaaaataaattatttattataaaataaataataagtattttgacaaattaaaagaaattttttcgaactttcatatataatttttatacctccccttgacaacatttcaaaggtagcaatccggagactatggacctatattttaagctccaataaactagattatttgttgaaccccatcaaccaaataatcctgtttattaattccatgattagaccactaaaaatgtagatttgaactcttagtaattatagaattatatttactgaattttactacagtgtctattaatataatcaattcaagtgattaggcctccttgtgtcggttcataattagttttggtcaaattacttactattttatccttctaataacttatttatttttatcaaacatgtcgtttaatataaagaccggattcaaatcataatgataatcaatggtagatcgacataaatccataataatcatgaactgtgattgatgttattagtttctttgattcactcattaaagttattcagagaagaaaattcttacaacttctattttggaaatataataatatagatggttggaaacataatttacaattatagaatcctgactttcctaacaaatcgcgcgttagtttcctttaagtgttaattctagaactgaaaagttgtgcataaatttagactgaatgtaaattatactttcactagtgaattaatggtactaaaggataaaaaaataattagaaaggaaacaataatttaaccaaaattaattacgaaccaacacaatgagtactaatcactggatatgattatatcaatggacattacagtaaaactctgtaaatataattttataattactaagagttcaatttcatatttatatttatagtagagtaatgaaattaatgaataagattatttggtaaatgagattcaataaataatctagtgtattggagcttagaattataggtccatggtccctgagtcgccacgttgaaatactatcaaggggagacataaaagccgtatatggaagttcaaaaaaaatctattttgatttgtcaaaatagaaattatttattttgtaataaataatttattttttaaattaattaattaaataaattagaaaaatacaacagttgttaagagaaaagacacaacccttatgttaactaagatagagggaggcccaacctacattgtgtccatacatagtgtaggtgcccctaatgtagggtgtccccactggatttattttaagtttaattaattaattcaaaagattaatatttatttaaatttaaatttaaaaagtaattgaaatattctctcaagtggttgagagattctctcaatttgttataggaaataaatatctataacgtaattcggttatattattcattcaaataattaaatatgatttaataaataattttaataattgaaaaaaatatttattgagtatatttaatatactgtataaaccaaaatttagaatgagaattataacgtaacttttatgaaagcctaaaaaagattaatctgattattcttttctctccatttatataacagaattgttcttggtcatgtactaagaatacaagaactttatatacatttttatcctactagtcttcactagttcttgtgtgttgtggaagatctagaagatcaatgtgtgagttttgacatcagtcttccaatgatacaatatacaaaaaggctcgaggataccctgataggcttcaaggggtaaataattttttcatgtttttactttcaaatttaatatatatatatatataaatatatatttatacatatggtgatcttagggatatggtacgatgataatcaaaacttctaatttcattacgtacctgatttagtaccataaacccaatacataaaacataaagattgtggagctatgaagtttcactttaggtgagttggtattggaggagactagtgtaaacaaaaaataaaatgaccttcttctctcaaacagagttctagaactttaacttctccatttttggtctatttgacaaaatgcaaaatttaaatatggaaagatggaagtattttatgatttgcgatagttctattgtgtgcaagcatagagttatcatgtggcttgctttacgtgacagactcctaactagagactgatcgattactcagatttggttgcagatgaagatacagcaccaacatttttttttgcttgttgttatagtaagaaggtccttgaggaaatagctttttggtgtggtttgtcttacaaatgtactaacatgaaaaaattgatccattattggttgcagaaaagtaatctctcgaaagtaaggatggtgattctaagtattatctttgttgtattgttgtagtatatagtatctcgcataataaaaactcaagtcttatgggatcaaaagtttccactgattcatgtaattgttaagcacgtaattcatactgtttgtgttagattacaattcatgaacttcaaaaagtttgaccgaatatcaaacactgtaaaaaaaactgctatttttagtgataactttttagtcacaacttaatttttttatgactaaatgtgannnnnnntcacaacaaaatattacttgtgacta

SEQ ID NO: 112856 - DNA, 1666 bp, Cannabis sativa
  modified_base (94)..(95): a, c, t, g, unknown or other
attcatatgtaattaccacctcatatccaaacatatcttgcattttaaaatatagtgtaattactgccttaataattaccctacctagtaattnnacagttacttccaaacacacccttcattttttgtttctctataaaacaaagctagctagtaactcttataaaagaggttattagtttttttttggggggacttttggagttgggggttggaaagagaggaaaaagggataaggaacaagtgatcttgagtcactaagtcctatcattataatttgagaaattttaatataatttaattacttaaagaaatagtacattattattttgtgttgcactcaacactgtgttcatgccaagacatgcacacaattactcaaacatctaatctgacccacctcaaagaaaaacatgataaacacacagtggcccatcaataatgaaacgcgtgagctcagttaattaattaaaacatattatggtattcaatgataacttaataggaagataagttagtataggattgttcccaaaaccatcatgatttctcttttaaaagacatgattgtcttaaccccaaaagactcataattcatcaaaatcataatgttcaatttaagcatgacattagaacctatggcaaaggctttgtccaattttttcattttaccaagaaagtacagaaacttttttgttttaggctaaacgagaaaagaatttactatttatttaaatttctattgtttatatatggcttcatttgtgtgaatataaatttatattatatgaagtcaagctttgtttgtcttattgtatgaaatgagatgaattatttaaaacttttctatgatcatgcatatataatttgcgtgcaagatatttcttttagtgcatgacatcataactaaaaagttattttttatttttaaaaatacaatattattttgctagaacaaattaggggtgtttaactttaaaattaattttaaaaaataaagttaaaaaaaaaaataagaattttaagatcaataaaatattatttttaatttttcatcaatattttttctctactttatctcacattattttctctttcaccactttcacttttatcattttctctctcctcattttccttctctttattttctctctcatcactttctctgtcattattttctctctcatctctctctctcctcattttttctctcaccactttctctctcatcaaggtcggggttcgaggtctgaggttgagtacaaggtcagggtcgaggctgggtctagggtccgggttagggttgaggccgaggtccagggctaaggtatgggtccaaatttgggggttgagtccgaggctagggtaagagggtccgaggctggggttagaaggtctgggtccaaggttggggtcagagtttgtctctggcgctggggtctaagttcttgccttgggccagggtctggtattggggtttgggtctaggtccaacattatcattaaaaaaggataattctttcagtatatctacttaaatacatttacgcttgattcttttcttccaggtccccgggtgtttaaagaaagtatttacaagaattgaggacaagtgctgaaagaattgagaagaaaaactaaaaaaatatgttgctgccaaatc

SEQ ID NO: 112857 - DNA, 1506 bp, Cannabis sativa
  modified_base (1468)..(1468): a, c, t, g, unknown or other
agtacaaaacaaaattaacatcaatattactatactttgttttcaaacaagtcctataacccaaatgcacataaatcacaaaagaatgaatatttctatagtaacatacaaaagtgcctaaaatttaccagattaatatactcattacgtgagctccaaagattttgaacaaaaatgacaaatttgcaatagttaatgaaagaaaaaaagaacagttataccaatttactgatcttgattagcataaaaagtactcttttctcaatcaaagtgaaatttgaaatgaacaaaatgaaaagaagggtcgtaacatacctacctccattaatgggcactaattctatgagattaccaacataaaaaggaaaaataaaatcccaatttttattttatttcatttatcaaacaactaaatacctaggcttatacaaataatctatataatataatatgtagattaatatagtgtaacaataaatcaatagtgtgtaacatatatatttataagcatagattatactcaccaaaagtggcaccatcaacccgatttcgattcccaataaggacagtagcagccataccatccaaaaaaccattaaattcttcacatctttacccaatttccacacgttcgttataaacaccaaatttcatatacaccacaactctcttattcccaccgccgccgagcttagcggccgccgcaacaccctccgagatagtcttatagttatcgaacatctcaaacgacagctttgtcatcagagaattgatcggaaagctcgataacatcagaaattctggcgtgactgtgtcagaaaaatgccatattatactttaggagtctatttgtggggctattatgcatttatttgaggagattttttttttaattttactggaatcaaagagttgtgttgaaccaaaggaaaattagatatgaaaaaacagagtacaaaaaaaatgataaatatggtatgggcaaaaagaagattcagaggtagaaaaagtagctcgattttaggttaagagaagataaatattagattaatccattatagataaatacttacatatttattattcacttgcctcaatcttcttacgtttctgattttcccaaatgatctattaaaagagcagcccttttcctctcctctctttcagcctgttatattcctagaatcaatttgaagattgaattaaacctcatgaaacgaaagataggattggagtctcacacctagatgtcattgatgcaaacttacctaagacacggaatttgaatagagtgcggcaaatagagagtcgggagtatcaattttagggttagaaatagaatttgctatgcgtagaagaaagaagaatctcgtcgaaaatggatttttttttttttttggaaatcacaaataatggagatgaaatcgcaaagtaggttttgggtgaattgcaatagttaacggaagantgagtctctccgttaaaactaacagagttaaaaaaaat

SEQ ID NO: 112858 - DNA, 2284 bp, Cannabis sativa
attttttttatatattttttttttccttttgcttttttttttttttttttttggttcggtcacttcggtggtgataagagatagcttttttattaataaaaaattaaaaataattaataattaaaaggggtctaggtcgatcaatcaactcgtatttgtttcggtatttgaaagaattttttagtgagatttaattcatagttgtctaagttaatttatttaagaaatcttacaaaatttaaaaaaatttaacacgcttaaaataaaatttaaatcaatcagtgtttgaaccttatttttcgatttgttaaatttttcaaatttttatagaatatcttaaataagagcaatattgacaactataaaaaaaaaatagactaaaaattctctcttttattaggttaaatagtattatttttctccaaattttaatatatgtatcaaattgtacccttgaactttttatctgatagaatttcttgtaacaattgagattattactggtggattttcgtcattccaagcaaaagtattgaatttgttgataggattgaattgggctagttctattgggttgcatgttaatgttttatcgcggttaaggcttttgcgtaattctaatgtatttaataatgagctaggagttattttttctgacattaaagtgttgttgtctaaactttcaagggcatatctttcttatgttggtcgtaattttaatattgcagctcatagattggcttataactcatttccaaaacatgtttaataaaaaattcgtattcttgacaaaaataataaaaaaaattattgagattgttaaatttaagaacttgcaaattttgtttaatcttactaaaggactcgtaacgtagttatctatgtactaaattttactctcaaactttaacctgtatcaaattacgtattctgaaattttgtccatgtcaggcgacaatgttaataaataaaagttattgaatttaacaatttcattaatttgagtggattttttaacggtctgaaaattttaaaatatataatttattacatatcaaagttcggacaaagaaaaatcttagttagttttattattacataattaataattaactttttttagaaataaataatttactttatgtacaatattattgaaaatgacaattaatatattactcttttactttggcgtaggttactatgataatgtctttaaattaaactaaactacatgtcctttttttcaattacttttcttttttgctttattgaaaaaaacaaaatttataaatattaacaaaaccatggactatttaattaaataaattaattatatgcatggtcattatccaagctttgagttggtatatgaataagcaaaaaaaaaaaaagattacattttattatagtgagtatatattctattatttttaaaataggtgatgaaagtataatatcttttgaattttttagtgtttaatagtttattaaaaaaatttacaataatttttttttgaaaaaaaaaatagtaaaagtagtaattaagttgttgttttttttagaataaattgttattgttaatattagtatttttaatgtataattttttaaaaatttcgaatagtttatggtttaaaaaactctattatcgatattgtaaattatttaaaatttctttaaaatttatatgaataaagttgtaattataataaaaaatcactataataaaaagagatatataagatgtgtttggagattgagagagatgttgtaataagcaatctcatttttaataatgatctcgatattcagggccggttttaggcaaaagtaaaccgcttgagacccatttttagtgaagctttaactttttaaaaatgtcatttttaagatataaaaaaacttataattttttcaaaaataccattttatatagaaacttagaaaaataacaatttttatattgtcttaagaaatatgaaaaaggaaagagtgtattcacatgataggcacgtgtaagtgtaatgaagcggctatttgacaaatttttagattattactggtggatttttatagaagatgcatatttccccacggggatggggccccgcggggacccgcccctaatagggtggggattccccgtttaaatggggaacgagacggggacggggatcactttttgtccccgatgttaaacggagcggggacgggatcacactccccgccccgacggggacccgtttagtattttatcttatatttttaataatattttata

SEQ ID NO: 112859 - DNA, 3086 bp, Cannabis sativa
cccaaaccgttggttggtttacagggcgggttgcacttaaattttagcaacccgaactttaaattgggttagaaaatatataagataaccgtccaaaccaaccgatgtacaaccatatttcctatgcaaacaaagtctgaagtcaccaaactattttctcaattcaatgcctatgttaagaggtttttcaattcaaaaatcaaaagtgttcaaactaatatagggaaagaatttgaacccttaaacacactgtttcacttcttaggcattgtcaaaagaaactcaacctatctacacagattcaaacacatacagaatcccaactttacctgtccccaacccttacctcctcctcctcctccaccacaaccctcatttgactcttcatcctaaacctatagtaacagtgcttcacctaacaacaatcatcatttatccactccaccacatcatctccttcatctcaaagctcaaattcctccaataacacagttaatcaaaatcaacaccccatgatcactcgatccaaacttgggatatacaaaccaaaagtttacctttccaccattgaccttgactcgaaacctacctcagtaaaagaagcccttgctcatcccaaatggtccaaagccatgaataatgaaaataatgctttcaaaagaaatgatacttggacactcattcctaaaccacctgaagctcaggtcatcaggaacaaatggatctttaaaattaaatataatgcagacagctccatagccacatacaaagcccgattggttgctaaagggtttcaacaatctcctggcattgacttctttgagatatatagccatgtaataaagccttgcaccataagagtaatgttcacacttgctgtcacatataattgggaggttcaacaaatagacatcgacaatgcattcttaaatggtgaacttcaagaaattgtttacatggctcaaccagaaggcttcatagatccttaataccccaaccacatttgcaatctgaacaaagaaatttatggactcaaacaagcccctcgagcttggtatgacaaattaaaacaatttctagtttcatggggttttcaacaatttaagtccaacaacagcttgtttcacaccatcaaaaatggtcagttattgcttttattggtctatgtcgatgacatcctaattactggaggtgactcatatcagattcaacagttaattcacatattacaccaacagttttccttgaaacaacttggtccagttcattactttctaggctttgaagtgcgaagacaatcaggcacattatttctcactcaatagaaatacatcaatggcctagtcctttgaacaaagatggcagatgctaaacctcagtctactccaatgtgctcaacatcgaacttaactcatgatacatgctctgttttacaaaaccctacagaatacagaagcatcctaggagcccttcaatacttgtgccatacaaggcctgatatagcctatgctgtcaataggctaagccaattcatgagtagaccaacaaatgaacattgcagagcttgtaaatgaatactttgttatctggctggaaccaaacatcttggcctcacattcaaactagcaattgctctcgatctccaaggcttcatggatgctgattaggctggctgcagcattgacaagaaatccacttcaggttacagcatcttcctgggtggaaacctcatcagctggcgttcaaagaaacaacatgtagttgctaggtccagcattgaatcagagtacagggccttagctctagccacttctaaaattatgtggctccaatctctgctagctaaattgtccatcaagctatttcaaattcaacatgggagctagttccttagccttaaacccagtcttccacgttagaaccaaacatatagtagtagatcttcacttcgttaatgatcgagtattagccaaccaacttgatgtctgatatgtcgacagtattcaccaaattgtagacatatttactaaacctctttcagcttcttctttcaactacttcaggtacaagttgacacttggtgttcacccgtgcaacttgaggggggatgttggaattactgaagtagaaggattagatgctgagctggaaagttagtttcattcagttaggattacttttccattttaactaacttctgttggttacacgtgttctttgtactggtcttgtatgtataaattgtttacaataatgaaaagaaaagattgagctgctattttcattctttccattcagcacatttctattttcctcttctctccttttctgtcaaaactaactattcttagttttcttcaatgcgcaattttatttactgatcgttttacaaaacaaagtaaaacaaaacataaattctcaagtaattccatacaatcataaaatatatagccataaggagaggccatatgtttaaaacaatttaaattactaacaagagtaagacaatccaactcaataacaacctctaaccacccttgtgtttaatccaactgaatgcttctttgagatcaattgcttcagctaagagcatttccaatggtagtattctttaaaggtgttatatatttccacatcatctaaagatataatattttattttatctttcttccacattatttttgacacccttacttctaaaaatacttcaatagtatagaatattttaagaattctataattatgatctcacaaattattgtatatataatttttttcctttattaagctattatttatattgcacctttaattttttattgtaaaaaaatatagcatcactgccattgtgtgacatcaatttaaattttaagaatatcattcttttatctccaatggtataacatccctatatttttccacctaagcttttcatatcatcaaagcattccccaaaatgctaccattggaggtactctaaggcaggttgcaccactccatctcgacattgttgcattgcttctatcaccgcactagtagcagaacgagtgttaggttatttttagtattaattttagattaagtt

SEQ ID NO: 112860 - DNA, 5757 bp, Cannabis sativa
ttttttttttttttaaataaacttgttaagatagaataaagtattttagatgaattggaatcataagatggtgtgggaaataatttatatagtgtaaggttcatatacatgaatatgtgatcgtatttcatagcaatctgttgactcgattttaatggatgtgactttatagatcatcatgtttgtttggatacatagaaatatttcatcacttgcttatgttaaagtgatacttgtttttatatggtaagatgcgatttgatctccaattatgggtctttaagtttggtagattagtttctgggctcattctctattttgtgcttcttttattttgaagctttatttgtcctaaaaatggtattactggtgcaatgctgtgacatgagtaccatttttttgggccatgctcagtacctgtttgagtaacatagttatacattcaaattttaatgttaatacattcttgctactaaactatgtctagaatcaagtgaagcacactcagaggagaagaaagtatcccaagataataagaaaaggcgactcaagacaccttcacaagttatggctttggagaaattttataacggtaagaatgtcattgttttcttaaaatatagaagtttaaccccagaggggtagtttaaatggtgaggcatgtggcttgttcccacaagatcttagtctaagtctgtcttgggtacctacatagcatctatagtgtcattttctccaaatattgtatgattaggaatctagttaaaaaaaatggaagtcttcggtacttgtatacatttatatatctatatatttatatcttaacgacttggttatattgtttcattgatgtgttgaaatggaaacataatggtttctccaccagaacacaaatatcctacagaggaaatgaaatcagaacttgcagtacagttgggattgacagaaaagcagatttctgggtggttctgccacagaaggttaaaagacaaaagagtatcaaaagatgaaccctgtgctaatgggcggcaagatcgtttaagtggggtcattcaggaccttggtagtggacttgggcaagattcatgtggtagcactaaacatgtagattatagatatgttgacccaagagaagttgaaagtcaaagactctatgggaatgattttccagcagcagatctcaccagtgataaaaagagtctttacactgaaagaggcatggatgatacatcttcagaaagttcctcatccttacaggataggttattaactccaattgaggatcctcacagtgtggaaacttttaggtacctcacacaggatggaccaattgcacccttaagttccaagggcacaagaaccatgggttataagccctcagggtatttgaaagttaagaatgaaatagaaaatgctgcaattacagctgttaagaggcaattggggaagcaatatcaagaagatggtccaccactgggtgtagaatttgaagcacttcctcctggtgcatttgaatcaccaatcagagatcctgtccatggtaagtggtacatttattttctattctacttttccattgaaaaagagtttcctgtggttgttctgcttaagtcaatcccgattatgcattgcttagagctgtagtcttcatcttcttatttatatttttatatgatatttaagttgttaatataaggtgtactatagttattgaaagaaattaaaatgtggggttctttgaaggaattctactcaattagggatttctgccatcttagtataggttggaaaatctgataaggaattgattatcttgttttttgtatgaggatttctttctgtaactgttttttccttgttattttagttaccgttttacatcactcataagtcacatctagtacaacggctggtaatggattgcacgcaagggaaaagtatgttgagagagggcaaccttttagatagagaattgattctttgttaaatgtgtgtgatagttggtacagggagtctaccccccgccctttgaaagaaacaatttcccagcaaaattgtgtttagcaaagtaaaataaattagagaacttcagtggatggtgaattaagaaagggagactaatagagatggtacatgttgattcattgatactttatgctgcaaatttcaattctcctttggcaatgtctttttctcttttttccgttttccctttattgttattaattcttttgtttgttattagttgatttagacattaaccatcttgtaagttgaaagtacatgattttgagaatatttgttttagtgaagagtgcaagaaagaaaaatataaaaatataacgaacatatgatattggatatatttatacaagctatcaaattgctataagagtgtcaacttataactctctgttccagctatagactgaagttctgagctttgtaagaaattagctgtcttatttgtctttgctactttgctcaatttagattgcatgtacatttgtctttgctcagtgtcgattttcttttcaaattactatttgagatctaggttgtagttaatatcttttaattctgttgcagaaccctactatgttggaaatccagttctttctcaccccttgaatatttctggattgaaaaagcagccctctcctggcagtgtaagtggatattctgagattcaatttccttttgacatattgagtgagactaatcctgacaccatgctcggatctgctctattactttgattcccatgctcgagtctttcgatagatttccatgcttaatacatctgtatgaaagtgcatgcctgctttatttagacttttcatggtttcaaattgtgtgttgatgtgatgttaattatttctgttttatcaagaacattatggcgtttaaaagcttttcttagcagaacatcagcattgtaactttcacatttaaattgttgttaaatgaatatagaaaatggaatgaaaataatatagtttgcatgcctttgtatttacgtttaggaaaatattgtaaacttatcaaatttgtttatttttattgtaactacaatgtactctttcaccttttgctttcatgtgcgtaatatttctcaattttatgatcatgtagagatacgaaataaataattccaagctgagttccaaggacccatatatgcagcaagaaggtcctggcatcatacatggtattggccatcaggaggcaaaacctagcaatctaatgagacaaaaatcaacttatattgaccatgctggttctctctctggccgaaattcctccttggataattatgatgattctagttacaataacaatcatcatcgtaaaaagagctctaaacatggtgttgaaggaacgtcatctgactcctttcacaaccgtcttagtcaccatagtgggaaggttccaagcaaacaagcattttctcgtgtacatgatgatgatgtaagccctgagattgtgcagaggagtgaatactttaagcccgcagtttcagcacgaaactattgtgaggcacctgacatggaggaaagagggatatccaccatgatggcacaggtctttttcttttctttgttcttggtgaaaggaatgtgataatggtagttcttggttaaaatttcagttgcttgatatatgcaggaggataaattttttggagaaggcaagaccaggaaagatgtcaaagtaaagatgaagcatgtgaatgaaatgactgtaagttttaatttgatatgcttttggattatttacaaattcagatacattcatggactaatgtgctgctacatcattataatgtgtttatggtgttttcctgtgcttttgacaccctctcctttttgctcaaatattaaaggttgcaaaaagagggaaggctgacttttcacaacaagaaaacggcacaaattcttacgtagagattctacctcataagaataacactaaagggtaagtagaatttctcctagattaattaatgattttcttttacaaaagttcatgtgagatccattttttgcatgccctgaatttcagtcccagattagcttcttgcttatacatctttatgatgcaatcaaatgtttcttcttgtgaatttgattgccattttttccttgtttttattattctactaagggctgtgacttgtgcattatgcttaacttccaaaaaaaaaaaaaaaactaaaatatatttgtgactatagtaaagatccaataagctgtaccgaattgtggtttatatagtttgggagaaatgcagtatgtctgagaatctaaaactcactatgtaagtttccttctattaggttctagcaagcaacttcttctccaccttaaccttagaaaaacaattcttcagattctgtttcttgagaactagatatcaaccgaatgcaaaaggaaacaacagtgtaaagtaacattctagcattatgaaaaaagtaaaaggaataggttgtgcatcctatgttgataacattaagtttcaaaatttaatacattttggggttaaattgcaatttatgctttctaagtacatcacttccattgtagatctgccttagagatgccatcaagcttcagtgaggatgaaactgcagaaaccagttcttcagcagagtgaagtttctggtaaagcaggaaggggtttccctaggcttgtacagttcagagagagctatggtcattaaatagtcaccccagaagtactacaagggcttggggattgccactttcctatgcccttttgagtattcactcatctgtttataattgtagaaaatatataaatatatatagtttttaggctattttaaatttaatttgtctaccaaaaccaagagtttttctcagattgaattaactgtttgtaaatgtgcctgctgctacttctccctgaacaacattgttttggtggttaagtgatgattctagtttctctctacaaaaaggttttaagtttttcttagaagatcgagatagcgtttggttggaggtaatgaaattgaatggaatgaaaaagaaacaattttcattcttttgtttagttgcatcttaaagtattaaaataatagaatgatttttacattaataatgagaacaaatttaataattttttttaatgcattttaaatttgattctatttctattttcattttaatagtaattatttttaatgcattttaaatttgattttattttctatttctatattttcatttttttccaactaaaatcatctaatttaaaagcttgctgttttctaaaacatataataaaaaaaaattggagactccttcatacatctcctaaacaaatgaatattggagtaagtgttaaattaacaaaattattctttattttttgtaacttatatatatatataaaaaaaaaaaaaggtattagagtcattttagttttatttttttagcatttttgtaatataatcctcattaggttttttaatgtaatggagattcccttatatgatgtagggttcgtttggtatagtttttaaaaaagttaaaagttgtgataaaaatgtgtttggtaagcagtcaacaagtagttttttgaataagtttttaagaagctaaaagctaaagttgatccaacctaacttttggaaaaaattgttttgattaaaagactataataagtttattcgtactaaaatcatatttattatatattaaaaaaataaaaatatttaaaataaattaa

SEQ ID NO: 112861 - DNA, 1978 bp, Cannabis sativa
aacgctgcaaccactttagaaactcaaaccgtaaatttgaaaaaaaaaacaatatataggataattcccctataatttaattctataaaatagagataatttaaataatataactaaataattatatttattttgtctttattttattgaatcatttaaatcttaaatatcctatactataaaatacttaattaaatatttaaatgatttatttattttgattaatctatttaataaaataatcaaaacaaataattaaattcttataaccatatttaaaaataaatacaacgacaatcaaggtgagaacaaaacattgaccacaaaaacaacaagaacacatcatgaaaaccctaatattacataagatccaattagggtgagaataaaaggaacaagtactccaataaattcaaaaatgcattaacaacacatgtttcaaatgatgggtagattcatacgggtaggcaatgcacactttatagagatatagatcttgataagcgtacatgtatgagaaggtcattaatgccaccaactcattcggaatgagactacaattttaatacaaattccacacaagactcattcaaatccaattagtaagatagtatcatatcatttctcctttcttcttcctttttcttttcttctttttttttttaacatgaggctctttttaaatcatgtagcaccatctaacactatcactgttttcttttattatctttgactgcattatgattgaaacactaactatttgtagtttatttgtggaatttcttttttttttttttaggaaaggatacttgttattataaactaaaaaagagtttcgtttacaacaacagagtaaataggaggagggatattctccaaccaaaaacaggcttcatccacccttagcgcatgtttagctaacctatgagcagtcatattggcatcacgtttgacatgagaaacacatacatttgggaaaaatattaaaagactaacaacatcaacaattaaatcactaaaagataaaattgaattgaagggagctcttaaagcattagagaccaagagagcatcagtttccacacaatttattggcaattggtgttgcaaagccatgtttaaacccaaaaaatagtgatttagcttccatttcatgtgacaagtagttgccttcatcggtattgaaagtgctgcaaccacctcaccatattcattccgcactactgcacccaagccaattgtgtttgttgatgcttggacagcagcatcgacattaagttttagtagcccagcagcaggtggtttccaacgtgtgtgagatgcagcagcaactgatgaaagtaaaaattattaaaaaaaaaagtaaaaaaaatatgctcctctaatccatatcacttgaaaaatacataataactcttataatagtcacattttattactgttagtctaactagagtacatgtggcaagtattattagaaataaatttcgttttactttggcatggttaaacttcacccacaaatatttgtacgaacattatgtaatattgttgtaattccagcaacaataacatcaagaattcaatcataaaacctataataaactcacaacttggacagcaataatgaacataaaccaattaacaacgcaatgaatcaaaaccataaattaaacaaagaacaacacaagaatttatcctggttccggtcctagagatcaacataatccttggccatactccagctgagaaacatcaccaattcttcattaatatgtagaataagagagtatcaatacaattacaagattcagagcaatctcagccctgtggtactcgaaacagactagagaaaacagtcatagttttctcactaccaacccgagtacacccccttgttcttgaccctcttcaagaacagaactctcaacttagaatcctaagcaactctcttaaatcctctctcttattctcctac

SEQ ID NO: 112862 - DNA, 4364 bp, Cannabis sativa
  modified_base (3474)..(3478): a, c, t, g, unknown or other
  modified_base (4298)..(4313): a, c, t, g, unknown or other
atatatatatatatttataaagtggaccatttttcatgattaattatcgatcgataaatatggcattaattatttttctaataatatatatgtagtgttgtcattttcactaacatatatatctctatgctcaccactctcaattacttttaattaatttatgttatggacaaaaatggttggaacttggcatgcatgcattgtaattaaaatcatattctctactcgagatggataaaatttgagttctttacaagtacttaattaatgaagactcgaactaaatagctaggataattataattgtgtaggtatgagattacattaaatggaatattgatgattattgcctctatatcaacaaaatacattttgtttctggtggtttatcccttaagaattctaaaattaagcgttttcccaaagagcgtggcagtgaggccaatacctaatacaaacttgaaacaaggatgttacattaagtgattattacaagaagtttagccattaattaatggctaattaataattagccaattaatgaatcatgcagttcaatggtaaattgtgttaagtagtattctgaagagtttttggcagctaaacccttttaattgttgtttcacttgcatttaactttctaagcttaaattttagcggtaaaactctctaaattactgaattagtagcaaagttaaggtgtcatctagttaactgtcactatggactggttatgtatacactcttgtacacatgacacgtttatatttgtacacctaatattattagttaaaaaacgaaaaataaaatattaaaaaaaataaaaataaattataaattttgaaataattttatatttattaaataataatattagatgtaccaatataaatatgacacatgtataaaagtacacataagcagtctatattgacatttaactatgaaaaatgaatgacaccttaaatttactagcagtttatagtagtttagagaattttatcgtcaaaatttaagcttaaaagattaaatgtaagtgaagtgatagttgagaggatttcatcgtaaaaaactctattctaaataaaagtctttgttggtttttgtagatgtctcagttaggagtgcgattgcttatatatggattggttgccgtgagggacgcaaagtaatataataaatatgttagaataatgtttaactgcgaagttttgtgtctcttcccctcttataaggcggaggtttttgctctgcagtacacggtggctcgatctttgtcgattagggcatggacaagcgctacattcttcactaactgtcaaattcttcagtctacagtgcaagctaatgatctcagattagaaatgctctcctatttttcttcatcttttcaaattattagatgtcaattctctttatgatccgtagaatgtaattggtacctttcctttctacccttttttttttttgttaatgaattgcttatttagaaaaaaaaaatcttaggaggttgattttgcaaattgatttaatagacatatttttctttgtacatgactatgataagagaaatattgctaataggctaggctctgggctaaggtgttttagggcccacccaaactcaagggctaaaatttttatatattatactattataaaaaattttacttttcgtcacaacaaaatttataattataagtaaaaaagttatgactaattataaatcattatttttatgttgtgactaaaaacttcgtaactaacagtattagttacagaaatcacaatttgctatgactaaattagtgaaacttgtattaaataatatgttttagttataagtaattttttgttatgactaaaaatcacatttaatcaccaaaaaaatgtattgtgactaaaaaattgtcactaaaagtatatatatatttgtttttttgtaatgtatatttttggattgaaaaagaacaatatttttgtaaaattttgtgagaaaatgtccaataatactaacattttactttagatataacacacaaaatgtccaataattgatattaattattactcaacgcccgctaatatgattgctaatataattatagaaataaattattaactattcataatacctaataacaatgttcttttatagtgagaatgcgtattttatacatataatatttatataattaatttttataattaagtgattgatttaattaatatatattgtagactatatgttatatatatatatagaaagatggacgaacaatatctttttattgactctacttttcatctaagcgaatctgggtatccatgtttatcttaaatattataattgtccaattaattatttacaattcattaatttacaaaacattatattattataataattaaaatggagattattaactagctaggaaattaaggtgatcacttatttatttattaattataccactgaactgtacactatcaattaattaacaagtagattaagtgcattgccactttatattatgttactattattcaatatatttttgtatatatatataaatatataagcattttgccaacttgtcatagtggaagagaaaaagaaactataaatatagatataattaacattttagtggagaaatcaagctggtgtggcaactcatgaggtgatgatcaagtatttaattaattaattattaatttaataaacaaagtttaattaaaaagactgcatatgataaggtcactaatcaagctagctagtatgcacttatcatatcatattataattagatataaataaacatattaatataatcataattaaataataatcacatttttttacgacggtgtacagtgttataaaatcacaatagcttcagggatgacatgtaaacattactaatttatatatatgcgcatatataattgatatatgaaaaatgttaaaaggtatgtaataatgtgatccccgctttaagttttaattggactcttacacccatagaatgatggctcttatacacgagtactacgtcactttgactgcttcatggaatgatgactgaccctatataaactaatacgagtatttctaaagtgctttgtcctcactcacacacttcttgggaaaacattccaagatgtcacctatcttgaaattaccccaagtcaatgcttaaccgtgaattgtacagctcccagtattttcccctatggattacatgactactgactgttacaatcacccccccttacagggtccgacatcctcgtcgaccacactttcgattgggtcaaggctctgataccattttataacttccccactgtcaagcctccattggacccttacacccacagaatgatgattcttatacacgaatacgtcactttggctgcttcatggaatgatggctgaccttacaaaccaacacgagtgtttctagcgtnnnnngtcctcactcgcacacttcttggaaaaactttctaagaggtcacccatcctaaaattaccacaagtcaagatgcaccttgttgatataggtagttccaatcaatctatttaagccctcttcaagtatgtagtctcatacctatacagtctcggaatcatcatacatgaccttccccaagtgatgtggtgggattgtacaactcccaatcttttcccttatggatcacgggaccactaggcacccgtagtgcctagcgacctcctatgtgtcaatatcgttattggtccaaataagtatcaggttccatatacaggaccgaccctacgctaaggtgggctaggcttgcgcctagggcccactcctattaagggcccaaatgtaaaaaaaaaaaaacttttaataaatatatatatatttaataatttttaaaaatattatttattgttataaaaaggacccaaaataattgatttttttaggacccaaattaattcagggttggtcatgcccatatagtttaatataataagttttagggagtatcgttagccaatcgtaagacgacatatctagagatgctagacaccactagtatccaataacaatatccttaatatatatatatattatgtatattgtaaataatctgaatgacctaaaaagctccattatatgaaaccatatatatatataattcaacatttttcatgattggaaccctaagttgatgacttttggccgtacaagcatattagtccacgaattagatacatatatattattaaagtgagaaaagtgatttatatatatatatatatnnnnnnnnnnnnnnnntgcctatctaacggcatttcttgatttaacattcttggtttaacagaatat

SEQ ID NO: 112863 - DNA, 1328 bp, Cannabis sativa
  modified_base (42)..(46): a, c, t, g, unknown or other
  modified_base (102)..(105): a, c, t, g, unknown or other
aattcagggttctatttatactattttagaaaatacagggtnnnnnttgtcatttaacaaaacacagggtccaattaataacttttgtaaaacagagggtcnnnnatagtatttacccataaatatatacaaactctgttttgtttaattgtaatcactaatcattagcattattattaatattcaagtcttagaaattgaaattttaggcacaattagaaagccaagaatgagttagaattgagtgtaactagatgtcaagtttatttgaccacataattatttgtaattacaaattataagtagttgagaggtctcaataacactttagaattcttatatggtggaatgtaattactaactattttattaaataatacattaagaattcgaattttttttttttaaagaaaataaccttaaagagcaaagctcaatggaattatatattttgtattaaattactaggatagtaattaaataattagttcttaacacacccaatattgattacagagcttaattttgggtctcttggaattgattgtgtaattacacacatttattcctaatgcacccaatattaaattgcacaaaactgctgcgaacccatactctttctcatgtccatatacataacttattaatttcacaagaacaccaataattagttaaggattgtttataatttttatgagagtaaaataaataagatttaatatttacttataacaatattacaattcaaacacatacatcttcttacaaataagtaggggtagtaaaacgggtttcgacatggtacatgaatatgaacacgacacgaattttacgggttagggtcggggaaattagacgcgggtcgaaaacgactcgacacgaaataaaaatgggtcaaatatgatagactcacttaacacaaatttgacacgattttttttttaaaaaaaataaaataaaaaattaataataataacaaattaagttaaaaaattttaaatttaattttaatatttattatatatataacaaattatatattcataaatgtatataaattttctaataaaacttaaatttattattttttttctacaattctagctttaataataataaaacggctaacaatggtcaacacaaacacgacataacttagtacgggtcggattagaaatgattcattaaatatgagttaaaaaacaaatcaatacacttgacacaaaatataaaaatgagtgacataaaataaaagggttgatttcacaaatgcaataaaataataaaaaaaataacaaaaatacggttttacggaattttaaacattt

SEQ ID NO: 112864 - DNA, 5720 bp, Cannabis sativa
acaatctcaatagttcaggggtatcatttggtacatatcaaagtttagggggcaaaaatcataattaatcttatttaatagtaagagcttccaaatatctggaaaatcaagaaacaaacctggaagaccacctgtagtctcagagcatacacgagagagaaatatgtaatgtatctggaaaaagaaaaacacattatggttaccgatgagcttcccaacaatataagcaaacctttgatttgacaagtatagtccttcaattaactcacacctgagacaatgagatcttttgctctgtgcaaaaccgttgtaaaccctacaacaataatcatatattaagagacaactaaaaactttgtataaaagaaaaatagagaaaaaataattagatgaaaaaatcatatgacaaaagccaagcataatttcataaaagctatctcaagcatttggtaatattttctccactaggtttaaatacaaatgggcttgaattttccaatgaagtttacaaatcaagattaaatacaattttttaacaattgagacaatgagcaaccttaaataactgaagtggaaactctttcattcacattaagtagatattagacataatccaatgcaactttttgactaaaaacaacataatccacttacaaaagttatctacaaagtaatgagatcaatttacataaatgaaatctgtcaagaacacttacctctcctgcattaaagataaatctcaaattgtcaaagaaaagcaacaccgaaggtaatgtatcatgggtgtccattccagtccccagtatctgcagacaagtaaatacttatacagcattaaaatccaatcgtataaataagtgtcctatactcaaggacacatcaaacaaacaaactaattaacaattattttccccgaactttgacaagtacatacagactgttaaaaattctttcaaactattgagattattggatttaaatattttagtctaattccattcaattttactactatacgtctgaacagtagttcggggcacaatttggtacatgtacaatcactcaccttaggtgttcgttagtaaaattgacaaaattggacgaaagtgtgtgaatccaacaaaaagactaattcagggagaatttttaactgcctaaaagttcaaacacgattctgaaaattttgtggaaaaatcctaactaaataacaacaaagttacatccttttccatctaacaatgtcaacaaactttacaaacaacagattaaacagaattcgattcatcaataaatcagtgtctttagtaagaacactgaacagctcgaattcgcaaaaatgcatagcatgataaaccaacgtatcaatttcaaacagaaatacagaaaatgtcttacgtcaaactcgaaagttatacctggaaataacaagtggtgtttgaaggaatgaggtcgggtgttgtttccgagtgaggagtcttgttaggcctattgtcgacgctatcacgtccctcagagcttctcttcttcctctcctccataggcggtcctgtttcctggattttggtctctgtgaaagtggtaatgattctttggagggaacaagagaaaaaaacggaaagcagttaagaaggagggagtagtaggcatatttggaagtaattgtgcaattactaggtaggttaattactagggtagtaattacagagtttagtaattacactatattttaaaatacaaggtgtgtttcgatatgatgtggtaattacatatgaattcttaatatcttgattggcaaaatagttagtaattacatagaaaaataatatttttttagttgctaatatttaatataaaaagtttttagtaatcacacagtgtaattaattcaattttcatggggccatgagaattggaaagtgtaattgtaaaaatatcttatcttaggggtattcgtaaaaattaaaaaatcgaaaccgaccaaaccataaccgaatttttagttccacgtcatcaccaaatttggccggttacaatttttttgatatagcagtcggcttaggttttcgaaacaaaaaattagttaaaccaaaaaaacggctaaaactgctaaaaactgccataaaccgtccaaaaccaccaaaaactaccaaaaatcgtccaaaaccgtcaaaccgaaaaaatactaaaaatcatacaatcagttttatacggttataatttctaaataatcagttagggtttttgtaaaataaaaaccgtaaccgatcggtcggttatcttacaattttgttgcggtcgtacttttttttggatcattaagtgtcacattaaaaacatgtggcgacatattattagactacgtattaaataaactaaagaaatatgttgccacgtattctgagttgtcatttaacggacttaattagcacttaatagctaaaaaataatacaactgcaacaaaactgtaagataggtacttttgctgcaacgtttttttattaaaatcatatatgtaataattataaatttgaaaagagttttgttggaaatatttctttaaaatatattatataattacctattttattttacaacaaaaataatattttcttttttcaatttgtatttaaagacccaaaaaaaatttaaaaaaaaaaacttattagaataagaaaatacaatatgaaaataatattcaacaagtgttgagtcccttttttttctaattctatttctttcttatttttggttttttaaaataaacttttcattaataacactagaatttaattttaatgtatatcaataaaaacaaaaatccattcaatcaatttatcatatccaccctaggtgataaaattaagaattctaatttattgaaattctagaaattaaaaaagtataccgagaaatacagtattttacaataaaaataagataaaagaaaaaaaattttgaataaaaacgcattaatttatcatatcgttattaatgtaattaagtattaaattttatataatttaagataaatgctattttatattctgtgttttgtaaaagttaactattggactctctattttattaaatgacaaaatgaaccttgaaatcattttttgttaaaataaaacttaataatactctaatttagacgtgttataacaaaattggttatattttctgtatctgttcgtgctaagaattatcttcaagttcgttatattaaaaaaattgtcaaaaattaaatttaatgttttatttttaccattttaaaaaatatagagttaattttatcatttaacaaagtaaagaatccaatgataatttttgcaaaacacaagttccaaaaaaatatttatcctataagttaatataataacttttaaaaaaatattattaactaatgtcacgtttgaaaaatactaggcaccattatacttaataataatgcttaaattataagtacaaacataaattagaaacatcttacaaaaataaaaaaaaaagtgaactaacacttttaataaagatcttaattcattaagaaaagaaaaatgctttgaccaaatttaagagagcaaatgtgaggctcttgatttaaaaaaaaaatgtgaaactcccacatatgccacaacatctacataaataagatgacatcctataaataagcaaacattatacctaatactcaaattgattaaactaaaagttttatcaaaaaaaataaaattacatagaatggaaaatttatctttaagtatccacttgtagttgataaattcttaaaattaacaaaatataccactacacaaagacagttgattgtaatataaccggtaattatgggtggccaaataaaaatgaaactctcaattattgttggtaaaaaaaaaaattaattaaattttatctaaatattatatgaattcaattgaatcacacaaatatattgaagaaacaataagaactatgcttattaactcaatttttttttgtatagattaattcactataataattacatgtttcactaaaagatacttttgtcctcctatttaagaagaaaaaaaaaacataagtataatttccattaatttcaattacttaggggactgactatacatgcagtgagtgaatccccataaagaatattaataaaacacttcaaattacaaaaagagtgactaaaaaaatattgtaaattaataatacaatgacatgaagaagaaacttgagtacaatagcactacaccaacatggattcttgaacatcatccgactcctccaacgccatctcgtttcgaaacagcatcttcagatatggaagtactctcgggagcacaggcaaatctgctacgttgacgctcatcatgtcgaacgcaatgcacgtgttgtgcatgtgtgtctcatcgaatactgggattttcggatatctttggctgaaatgtgtgagaataattctatatgcaccggcagcgttccccacttctatggcttcctctgtcgtgctgtggttttttgccactgcctcctcgaccattccctcctcgaacgttgcctgcgaaaatcagagatgttagaacttacaatcatcgttacacacttctcgggaaaaggtatacgagtacttgcctcgtgtatgagaatagttgcatcacgagatgcttctatcgaagcttcacagggtctagtgtcgccagaatacacaaccttccatcctggaatagattttccgacgctattagttctcccggctgccttcaacacaacaccgaacgcctgtgggcaatgaacaactggaaaactaatcaaggcttccaaaccagcatcgccgagaattttcttcaagctctttatttctgtgatattgtcaactggactacccggtttctgccagtagctctgcattcgggatcctctagcaaacaaagtagaatcgattttctgagccatttgcccatcagttgttttcttccaaatatctttggaatttttcggatctcctatagaaatttggttgtcacttgactcgataatgctcttaaacgcatcgagtgattcttttgtggtgtgctgacagtcgagaaacatcatgtccaaatcttcaagtctttggtatgcatctaaatatctcttaagctgtctcggtcctacaacgagtattggctcgtgaggctcttccttcaacaattcgtgtctgagggcaagtattcttgccaagcccgtgtggtgatcggcatgaatgtgggaaatccaaatacacctcagacctctcaccgcatcatcagcaccatctacaccatatctgtgaaaccataaccgtcatagggttagtacattcgataaacacattattatactattaagtatttgggtaaaatctcgggttttaccttcgtttaagttgtcctaaggttccttcaccgcaatctaaaagcaaaccccctttcgagaaaagattgatatggatagaactgacattccgatatttcgatggctgagatgatccagtcccgagaaagacaatctccatgtcctctcttgatatattttcgagacaactgggaagagtattctcgtccaaccacggctcttcaaccataaacttaacatcttgaacgcagcttatttctcctgtcaatccggtggatgtattccacaactgactaacattttgggcagcaactacaatatctggaatctcagaatgtaattcgtc

SEQ ID NO: 112865 - DNA, 1056 bp, Cannabis sativa
agtatcaatggtattattaacttttatacctagtttgcatcttgtgcattattggagcacaaatacaaaaattgggctaaatatggttttgtggtatattttaaatcaaatttaactcaaaatatacaccatcgattagagatagtctaaaaatcataatttattatgactaaatgtatttttgtcataatagtgactaaaattaaattagtgacaacttgtatgtaaatactaaattttaattacaaataattttttgttataactaaaagttacatttaatcaaaaaaaaaaaaaattgttgtgataaaaaagttactagtaacaacttgatcattttaggcatttaataagcttgcttggtttaaacacttgtaattagtgagccccaaatcatatatttataatcataaatgccatattgataatttgtacagtaaacggttattagatagctagtagttaacacatcatatatattttttttttggaaaattcacaggttcatatttaaatgagtgaaaattctattaataatagtcatttttgctcacttgaaattctcatcctaattaaaagactagattgagaatatagatcataataaatcacaaaaactatttcaattcgtgtattcttaagaaaggggtctaagcttttttatgtttattttttttatatatatatatattttttttaaaaaatagtcatttgagacttgttcaaatctagctagaagttaattcttataattgttcacattgggtgttattatttgcatttattctgcattgtgttgtataatctcatcttctaattccttatttccttttatgtatcatcaaatatactttgtaatatcttgtgttcacttttgattgattttaaaaattgattctttgagacagtttttggaaaagttaaaagtcacttttttaaaaaattgtgacaaaaacgtgtttggcaaacagttaaaaagcagcttattaaaaattttatgaaaaaattacagctaaaaattaaagctggtatacccaacttttagaaaaaaaacta

SEQ ID NO: 112866 - DNA, 5419 bp, Cannabis sativa
gaaagaaaaaaatttaatgtgagagacttaccgctatagcttgttgtttggaggcatgtttcaacatgacaaggtccatgatgctacaaactacccattctttattattaactttcatatgatgttagtagtcagatctattatgtttgcgacaaagggcaccaaaaccttgggagccaaagatctagacatggctgggcaatccatgatgggactagggctcatcccttggtcactatcggctatctctgccttcctttggcatgtaagatgcttgctttcttttggctggttgccacctcccggtcatgatgtctcttgaggtagagattagcctctgctactttcttaatgatctcagcctcgattacctaagggtgcgaaggccagttgagagaaaaggaagggatggccagaagggtagtgggaagttatttcggaggtactggctattgatgggtctgttgtttttgttattgttggagttgttgttggtgttgttattgttactgtttttgtttttgctgtggttggataggagttatggacagttggggccttgcttggacctctctagtaggggttccaacccacctcaaatctcccttgccttcgggagtcttctgccttccaccgccaacttagcctttttggcctctctcacagagttagatagggggtcaggacgcttaagtgactgagcagctttcctagtgaagacatagccttccccactttcatccaaaaggatgatggcctcgattctaccttgggaaggtttggcgacagagctcctaggaaaaaccctattaggtgctagtggaagttgatggaggggctgaacttcttcaatgaatggaccctttggtccatataagtcttctcaacacccacagatatcttttcaacacccatagatgttttctcaagactcacttagccttctttagcatgtggaggagttggagtggcgactgaaggagtggcactagaagcctttgctttattggccctcttttccttgatctttcctttgcctttggttgctccagaaagtagcctagctctagtattggctttaatctgggtaatgttcttgtcgatgtttcccataagtgcattcaacaatcccatttcaggtgtttttgagttctctgcaagacaaaggagattgtcaaaaacaagtgcaagtcaaaagtgtgtctgacttatagctagttagaaacataaacaaagcatagaaatgaagacaaccatcaacttttctacaacttgggttccctcgagcaaacaaagttatatcctcccggttcaggagactaccatactctctgaagtttgggaagaacattaaaaagaaaggatccatcctagtgatctggggtaatgtctcagaatgccccgggctccttaagatctcatatatcctatcataatattcctctaccagatacctattgagatcaatgttcataaaatagtcgccaaatcccccttggtctagctgagccatttgatttggacgtggagcatgaattaaatggaaaggcactatacctctttcataagtgctagcttccagagcacctttatcaggcgtaatgacaacaaacctaatggccagttcctgctcctcactaatgggatccggatgacatcttgctcaatccaccatcaaggacttgtctttcttaatggtccttcttaatggcttcctttatttcccctaccagcatggcatcaatttcctccttgacctttagaggatcccatcagagatctcgattgttgatatgatcaatgatttgggacttcatgatcaggccataattttgaagtagcttagtggtggcgagatcctctatttgcaaaacattattaggaatcttgttgtattgtgcctgcttggtaaacaaagctttaaaaataggggtatgggcaacaagcgctgtataaatatcaccacttccatcagtcgtgagcataaggcacgtcaaaaggaaaattgaaaagtaaaaagtcggggaatgtacctagagttgcgaagtcaagatggggtattggaactctcttcagcggggagtcagtactaaagaactaataatcccgaaagtttgggacgtgttttgtaatgctaaaggaatgtgtcctcaaatacttttcaagcttgtaaaacttgatcttgatggtattagtccgcattggttgaggcttcatcgggtaataatacaacatttcttttggtcctggaatctctatcctctgcatcttacacaatacgtaccatcctaccaaaagcttatacgcctacagggtaagttggaagggtgcaatcccaatttctacccagatttttacaaattatgtctgtagaagcaagtgagctctgtaagagatgtgggcccagctctaagcaccaaacacatctatgctcttagatgatgactcatctaaaacagaaagtgaattttaacacagaccaaggacgtttcggactctgctcgtgttcaagagtcgttggagcatgtcaaacctcaaaacttattttgaatttggtccatttccaaatggatgaattgtatacaattggaatgtttttctttttaggcttcctctttgaggctacttctaggaccacgtcctgcattggctcctcgactggaggttgtatctcgacttcctcaagacctatagcctcgaggtgaaactcatcaccaggagtagccactagaagaaaagaaaagatccaagtagttaaatacccgaaaccacgaggacatgaagggtatcagggaaggcctcccctgaaactacttagaaaggtcccctctagacctgttactcaaagggccactcttacaagagaaatgccttcgagaaccagatcgagaacttagagaaatctaggggaaaacttaaaaagacccatcctaagccctaatgggcttagatgagaagacctaggggccaatctaattcaaaacttacttacacagtcaaaacttaccaagctactatacccaaaaaaaaaataacatgaattggaagttcaacatgtttataatcaccataccaccccaaaatagctattctatcatcctagcattcgcgtacaaaaaaaaattatcaaatcaatactccaatctaaattcctatcgaatcacagagtaatttgaaaaagagggtcaaaaattaggaaaaaattacttatggtacgacatgaggataaaggaggatgagagtagttggccttaaaatcaagagcccagcaaagaacttgattacagcctgcttgaaagtcgatggtcttagtcaaatggggatgtctcacaactgggttcagacgtggcacttttgaaaactccctcacccaaatttgtagcaaaaggaggatgagaacgttgcatagctcactcattcatcaaagaataaaacttgggatttctagcatttttctttacaatttttcttctttgctaaaaagaaggctgatgctcaaagtttgaagatgaaaactcaaaagtttgaaaatacaaaaatggtgaacataggtccctcacgcctatatataggtgaagatggaaatccctgtactttgagatcaagggccaagatcccttcgtaagaaactcacattgcaatccaacaaccatggaactgaagggacaactttaaatgccttaattcctttatgggaattgaggcattttagcatcattaacactttccttggggccctcataaacagtaaataatcatcatcccatcattttgcacaaaccattccttgttggggtgcgtgatggtcatgaacccaataagtgtaacacatgggtaatgccaactgttttgcaagctagtctttaactcttcaactgtcaagtaccagaaggagaaactacttccaccactttcaaaattgtccatgtgtctaaaatggacaaggtcgttcgggcgaaaggctgcaagcttccaccactctcaagtctcggaagctttagggggtaaatactatcaataatttttaaaagagacacgtagcacaactagaaaataatcaccatttaaaagtatgacaaagtcggatccagaacgggcccaggcctaacaaagatttaggactttgcctccgagacatgtcactttcccaaaatctggaagcctccctagcctttcatgacagaaagaatcgaaggcctcttaatgaagataagggcctacctagagacagcatgtaaaggatgacattcaaaagcctacttcagattgggagtcgaatgtctaccacagggtgagagccggatgtctaccctcgaacgatgtctcctcctctctgacacaagattggatattgtacactgtgttagaccatagtagtgtgtgtaccaccaatagcccttttttttctgacggctccactgatatctttgtctgccaggcatgttctccgttcaacacgtgccctataccaacagtggtcccagtcatacgaaaccttcgccccacgagaggagaccttctaaggggcccaacaatcatgtatataatgtattttaccctaatagtgggtgggtttttgacaagaaccctaaacgggtcacaagtatgtctagacaagtactttagcctatataaactccttcatttctttatgagggatcaggaatgaaggagaatataggtttagagaatgaggcatggtggtttcaccacctaggtgcctaggtgaaatgttatcattgtgattgttatttttgtaaaattagggtataacacttgcccctcaaaagtatgctcgtaagttaacgagtaatacttttgaacttcttctaagacttgtaaaataggtttagaattaactctccaatttttattttaaatgagagaagtggccatcaaatcttgtcatgtggacaaggtgatggcacctcttggtcacaaataaagtggcgtaacccactcgttgtggtacaaagattatttaaccatgtggaggatgacatggaataggtgaggtggtgacatctcatggtgacgtgggcgatgaggtaatgtcaaattaaaaattatatcaaatttaatacatgctcaaaaattataccatacaatatagcacaaagtatattttttttaacaaagcacgaaacatatttgtatcagcataaatattacttttttaaatttatttataaaataattattttattatattattattatctttagttatcacattaattattatttttattaactattgctaataaaatatatttttatattaaacataatattaaatattgtgctaaataaatcaaatattaacttttataatcaatatagcacaatcgatatgataaggatggatgtattatttaatatttcactatctgttataaatattaataattatgtggat

SEQ ID NO: 112867 - DNA, 4358 bp, Cannabis sativa
tgtgaaaataatgtaaaaagaaatgggtaaaacgtatctttaatttttatttaaggcttgcaatttgagaatgtttgtaagagtaatgtacattataaacttgtaaatatgatctaatttgaattttagtaatgtcctcgtgaaattgttgttgtgtatgcagtaattttctctgtgacatgccatattaatgatcaggaatctacttgtgatatgaagcgcgcaattcaaataagggataggaagcttggcgtcctatctgaaaaagtaaagtctcatttattgttatttgattctatagagaaagaggcagtttccgtcaagcaagttgtcgataatgtgcaacacatgatgagtgaaaaagaagatctaggcaagtagctttactcttgcctcagttgctttggaatttaggacttcagttcatgaaatttctgataagatttctgttttactttgctgtttatagtggctgacttgaacaacaaactggataaagtctctgcattcgagaaagtgtttgttggtaattaaagtttgtgatcatctgagtttattagttgattttttgttgtttttggtagttcaagtcataatttgttgagaattagtttctgcatgcatgatgcttgtagatgcaagtggggattttcttgaaaaccacttcatttgctttaatttatcaagttcaaaaatgtaccagtgaccagtcagagtgatagaattttgcttgttttatgataaataaattaagcactgaactagctgcatattgatggtacttgtgttttattattgactcaatattggactttttctgcagaaaggattgttgacttggaagaaaaactgaaatgtgaagaatatgagatacaaagaaagaatagagtaatctcggagcttgaagcacaggttgaggcagcaaaagttagtactgcctgtcaaactcagatagatgagatatccatatcagttacaaagcctagtggacttaattcattttatcataactgcaatatctgttggataaatatttcattttgtgttactcttcaaggaaattatgtttagcctggggttctttccttaaccaaaactcaccttcagaaaattctttcatcaaaggacgtagtcattgagaatctaatttcagaaaaagaggtttggatatttggttctcagtcacttatttatgcttttatgtgtcaattacctttcaaacatttcttgaaaaattggtttcaggcactgcactctgaacttcagagtttgggtattgtcataaagagtattcagggcaatctcaaaaatattaatgaagaggtagggaaaaatagttactgcattcacttctagtgtcacaagactgtaaattcagagatatgttggatttttattaagaaacttatcaatatattttaattatatcaagtaaattgtgttaatgaaccacttgaggctagctcaagtggccatatagagagtattggtgtgtaactcaaaaatataatataaagacgcttctatgtaaagtgtgttaatgaacaaaaagaatatatttggtaagtttaagcataagataaaccctgattgtttgcacaattggtattattagaactcagaattcaactaggtgtttgacagagctttataaaaaacttatgttgctttcaatttgaatgttcttctggcaatcccatagaatgatattttcatggtttattcaatatgtatatcctttatgtgatgtattgttttcctctgttaagcaagtagttccttaataatttctggatgatcttcaaaggcacacattatgtctattttatttcactgcaaggataaagacaggttcgcctcaatacttgaataccaagaaggaagcatcatggctttgacaactggtaacaggtagtataattttattattatactgcggtatattttttaagtttaactctcagttgcgaataaaaatatataaatttaatttttagcggaaataacactttatatttttagaactctgtaggtacctaactatgttaagccattgtacacgtgtcattatcttattgaaatatttagatcaaatgttttttaaaaaaaataaaaatttaatgacttggatcaatcaagaattatcacgtagtaatttacttaaaacttaacagccaagttccagaattataactgagatattattaccgtaaaaaattaaacttggtatttatttgcaactggtagttaaacttaaatatttatgccgcaaattactcatttttaattagtattttgcaatattatgtaattaaaatgatcaaatagaaaatgtgagaagaaacagcctagtgtagatgctgcagttcaggtcttttgtaaggtagacagaataattaagtgctggttgcttggttcaaggtccaaatcttaaatatgcagcaataagttgttgactgatatatttataaaattaaggattctagtttgttcatgtttgtgtattcgcacaagtaacacagattctgagtcttcctccaagatcttaaaaaccttgtagaaaccagaaaagggtataatactaataactgtattaatattaaaatcctaatgaacacgattacactagttgctgtgcttgaattggaatgaaaatctgatggataaatcacattaatagattctcatataactgatttactagtaatgttaaaattatgcaattatgccaggattgataatgttaacggaaacagcacaggaagatgctcaaacaaggattacatgattggggctgcagcatgtacaggtttcttgcaaactttagctctgctgagtctttttgaagaggggctgtactcagtttaaccataaaggattggataattgcacactaatagattatttcaagtaaatttagactgctgatgccacagaaatgataaggaaacgcaacatttgtgcagattcatctctatctccaaagtctgttggcacacacttactggaaagcattagcgtggattcgtgtgtgtcaaaggtaagtggaatatattgtcgcatgacatgcatagactcgtgaattggtgactatcttttgaaataatgatttctatatttttgagatttgactgtttttccctctcagtcagcttcctcagagcctcaatcagtaattaatgctccatgcatttctgcaaatgaggagaatgtaggagagaagccattttttcctaccttggctacatgagttcattttaacaaatttttttcttcaaatattttgtgtcattaatattttgatttagtttctgaagtaaggttgcattttgaaattactctagaaaaaatttctctgtaatatctatcagaattttggccttaatttggctttatttaggttgatgccttgaaatagtaatatgcacggacaaaaatttataatcaacgttttaaaaaaaatatatttttggttgaaaataatgaaattttatttacacttcaaaaacattctattttattatttttattttatataaaatatatctttaatttatattattttttttttcttttcacattcttgaaaaatgtcaatcaatcaatcaaatgagagaaattagaccgtgacaatctaaaattaattacaataagtttatgtattctctgcttaatattttcatgttcatacttttttttttaaaaaatattcatatacatatatttcaaattattgattattattaattaataaaaactataaatatacctacttatgcataaatattcataaatatcactatctattattcttttcattttttttttaaaatttgattagtttataaatataaaatttaataaatcaattattatctttttgaggtaattattattaatgtgtctccaacaatttttttttaatttttatataaatatttataaattaattattgtttttttttttgagataattgttattaacgtgtttacaacaaattaatttatattatatttaaatttttaacccctctaaaatctctttatttaaatatatatttattttatacattaaaatatgattatgtaacgaaatcattaatttaagagatatattattacttaataatatttttcataatttttttttaattaaggttattatatgcttagatattttataaaaataaaaatattaagctaagtaaattatataaatgacaaaaatgttataactaaaaaatatcttagttatatgtagatatttagaaaaatattataaaaataaaaaatatatagatattttatataatatataatatatatatataaatgagagatatgaagttgtgacatat

SEQ ID NO: 112868 - DNA, 1925 bp, Cannabis sativa
tttttttttttttttttatctgaatgaattggtgtcttctgttgaaggcaccctcttgtgagtgctggttattgtgccaatctggcttcaaacataagattgcaaatatttattcatgagtcagattgtctccaataaacatcacaaaaattcaacaacaagggtaccaaccaaaacaaaatgaaaagaaaatacttgtatcaaacatcaaaatcactacagtcttcagttgtagacatgcctttggtcggtcaacactcaacagagaagaaattattcagagcagctaaactaaaggcctccttcgtgagcttgcaacattaaaaactccaagcataaatgtagaaactaaaaacacaaataaaaccaacatgaacagaattcaaaacaatgcttagaactgatcttacatccaaggtgagagtctgaaacccgcagtcaaatccagtagttataagcctcaacacaaagctagcttgatctgtcaaatcctcatatacagaagcctatagagctaaggaaaacttggtacagtctgttagcctttgaatcactatgtaatgtaaacaagaaaagaaagcctcattctgtacagtttatcgcatagcaaaatattcagagcaacataattaacaaagccctatagcaaatataataactactgactgtgtatagagtacaaccataatcacatataaaacaacaagaacagaaactaataacaacacacaaaagatattaatcttacatccaaatcagggttcagaaacccccagtcgaatccaattagttcaaacataatagattatacactctaattactcaatgctcaccaccaaacagagtcaaagtcatttacaggctataacgccaagctaacctgatctctcatattctcatacaatttcactttccaacttgacataccaaactaaatacaaagatacagtatgttaacatacataaatatatataaagtacagaatatatgtcattatagtttacttattcacacctgtcccgttttacttgccaagttttccattatcatcaaataagatcccatatgcatatagcctttaaaacaattaagagtcacatcttagagccacaattaagactttatttaaaagaaacatcaaagaatgaacatgaatccgattaaaatagaaatgaataaaagtagtaacattctctaagaatcattttatcacacacaatataatcaacatgagaacataattaagggcaaaaccttaacataccgatggtgtagagaatgactctgatggctcaaacaattcaaattcttccccttttttcaaaacaaaattcatagcaagtgaaacagagcaaatccctaccaatcaacacaaaatgaaaaaaatacctctcatcagttcactaacttcagtctcgagcaatttatggatgttgtaaagatgccttctttagtcaacagatcagaatgtcataataagtataatagtgtgaaaataaaaaagcttagcagctagcaacattaagaactccaaacataaatacaaccacacaacaacaagcctctgaaagatgaactcaaaaaaatgacattaatccatttaaacttagtcacaaatatcaaaaaaaatatatatatatatattatcgaaatataatgaatatataatcgtaaacgtctgcagtagcagaatgtaattctattattgtagaaaatagttttgtagaaacaaaccagaaccagcagaatataaaaataattacaaaaaattaaattaattacttgacacaagagattcgtacgtggtatcagtattctttcgaacactcctaattcacggggccactcccaaagaatgaaatcaattaataaagtatcaacaattacaaagacaattaacttaaacaagtttagactccctcta

SEQ ID NO: 112869 - DNA, 8618 bp, Cannabis sativa
  modified_base (8559)..(8589): a, c, t, g, unknown or other
taatgagttgagtaaatataaataaataaataaataacagtgaattgaaatccatgctctacactgattttttttagcttcccaaggcttcattttcatgaacagtgttcacaacatgaatgaaccctccactagtcactgttcatcatctgttatcgtcattcagttacagtgatactgaatgccataatggagacgtaaaggtaattcaattccacacaattataataacatttaataagtaacacagctgcttgaagtttgtgactattctaactcataactcatttaatactatagttctttatttcagcatgtttgatttgaatcttttgaataacactaccttctatttcttgaatattttagctcaacaaataaatgagaaatgctaacattctagaatgtgacggaattcatttaaaaacttataataaatcataatagcaatatgtgatgttgttttagggtaatgggaaatcaaatagaagagaaaccatgaataaaaattgcaaagaaaattgtggttggccaaaaagttattctttttgtgaagccacacaatgagcctagctttataccgaaaaaggaaatagttactatgcgaatgaataaacctaaacatagtatttttcacataaacggaatatggaattgttttgtacaaagaaaaaaggttagtaaagatggaagatgctttgagattgactagtgttgttgacatccgcatatagttgtgaataaaagaattgtatagaaagtgatggtagtgataatgccgaattatacaaatacacaaaacccttttcgtttttttttttttttttgtttctcttctctttgtaatttcacaaggagaattgtcatttattggaagattacagttttttctatgacaatttatatattcaacatgaaccagcttttacatctatacaagtcatccttaccatccctagtaaactctgcacacaaccaagttcctcacaggcactgctttctctccctgaaggtcataatttggtatgttacaaaatggtgaccaggaaaacgaaaactgaggccaaaaaaaccaaagaaaggaagaccaattgcctgatatttttttttttttctattttagattggatgcctctataatatttctagtaactgtgatttgatttgtctcttgtttatacacatgatctccatatccttccttctaaagagataacaattattgaaacatcatcatggtaccgccttcggtccccttgaggtatttcgagtaattcatgaaaatccatacctgagattaacagaaatttggcactgaattagtttcctgcaatgaacaataatttgtaaagtaaaattataagtttttatatagtgattaatacctgctttctttgcagcccggaacaacacttcttcaaccaagtgttgtgctggatctccttcaggttgtaatgtgataaaaagctcaacttctgaaacagcttcttcatttgtgaagtactgatataacccatcagatgataatatcaaaaacctgtcctttgggcctaatctgtggtggtagagaaatgggaaacaagtgatgtatggcgaattcccaacgtaatcgattctgaacatctctaacagtgcattgttccacttgggctgtagagagttgaaatttacaattagacaaaataaatttgtaggggaaactatttaaaacagatgacatataacttttccatgtgctaaagcaaaatggatgtaagctatggtgactagacttctgttactatactaacattcttctttgtattcattctgtcgtcatcttgacttttatgcactaaaatcaacgaaattacagtaatggaatggtgcaacacaaattgaggaggaggtgtatatgctgctatgacagtgttactaaattaaccattgtgtttaaactataattggataattacttggtatgaatggctacaacttttcctgattagatagatagagatttcgcaaagaaagtaagtcccagaacaagagagcatagttaaaagcacctgtttgaggaaaccagcaccaaaagctcgagtgacctttaatgaacctttgacacggtcattcagtagagcacaaggatcgtctggatgttcatcttttattctttgaacttcctgtgaaaatgcacccaataaaacatcaaccaaagttctcaaattatctgaaaaggagcaaaataaatagtaattgtcttgcttttatacctcatccgcactggtggagtgatccttagagagctgaacagcagtcaaagtgggaatcgaacagggtctatcaccgtctgatgattcaagatcatgtaacgtttcctcgttaatcctttccaagtcttgtcgaatctttccaagccaataatcaggctcagatttctgagccaatacagctcggctatcacccacattcataacgtaaacattctctcctttcatcagcataacaagaacacaagaacccattaaagccaactcaggattttccacaagcatcttatcagctacatcgaaataagcttcctccgtctttctcagagcttgagaaagagctttcaacacatccgagtgattaatcgaactcgaaccgtccgaatcagatcgattcaattgctcctttaatctccgatcaagctctaatctttctctgtcccattcacacctccatcttctctgattatcctcccatttcttcgacgcacctctatacttgctcctcgagttctgattactactgccctttttgcgcttattacaactccaatttgaatcgacattcccatccccacttgcgcagggacgattatgattactataattattctcttgctcaacacagcgggaacaagcatcatcaacatcaatagtctgcaacgactcttcttcttcatcctccgttgctgccgatgcaggctcaaacttatcctcatcccacaacaaaccctttagctctttgtgtacagccgagtacaaattcgaaagaaggtaatcgggagcatcagggccgttgaacccatcataaatcccaacaaaaacccagccgtgctcctccgaaacgacaacgtgtactcgatcttcccctgctttcccctgtgcccattgaagattctgagattcggatgaatcatcgtcctccaaactaccttcgctgctcaaattgatgctactcaccgtcaggttctcattgtgcttctccgggccgagaatccagtccggatctttgattgagatgacccctttgatcggagccacgatcgagttctgaccacgataaatcgtctttgaaatcgctcgacggaggacccgaatcagcttccctttccttgatctgggtcgaaaagcgaaacccccttgggagaagcttctcttaaactgatcggaatcgtctttttccattggcccagagaaaatcccacggtcgagcgggcccgacatgaatccacgctcaatcgggccggacataaatccccgttccagcggtccagaaccggggaatcccccgaagttaccggaaatcggacctgagttcatcaaccccctaggaattggttgcagaggaatcgaagcgaacgaggtggagctctcgaaagccgcagctcgatcgatacagttgtaagaataaagatcgatgagagaagtggaaagaggagtagaggtgttggcactgaccgaggcaccggagattgtcttaaaagttgtcgtttcctccgagtgaaccttagacgaagagagccgagtcgggtcaggtcgaacgtagcaaaaagagtggcccagaccctcatctagtgggtcggaatccaaaaccgacaagtcatgtttccgacgagcttctccaccgccggtgaagcaaacgctaaacttcccaaagccgttgcccatctcgaaaccaaataaacaaaaaaacactatatatgaaaacctatttagtttagctgtaagaacaactaggaccaataattcatggcctatttttttttttttttctcagagtgccagaaagaaaaggaagaagcagaagaagatgaggaagcagaagtggaagatgagtatagagagagagaaaaagagggaggcgttgacttttgagcttatatttgtttgtttgtttttttttttttaatatttgagcctatatttttgaatgtaggaaaaaacattttttaagaaaaagattttcgattctaaacgaaaaaaaaatatattgggagccgttgactaaggtgaggcaattaagtaaagtttgggtttaagttttgattagtaatagaacagtgattttacgaagtttgaaagagcgtggaaatcacgcttctttgcaagtggtcaggacattcgtgggcgcacaacgggtgtgagtgacgagactatacgaacgtatctttccgtgtgcatttgattatggatatacgcgcttagtaagcgcgtattgataaacggtaaaaaatagtttctattaaaactctggtaaggagccaaaagtcaaaagaagaaaaagccaataaatatgcgtggaaaagcgtgccacactcaccgttggatgggtttattagaagcaaaggttgactgacacctggcagcccattattgcctccgcgtaattgttttattttttgtcaactcgaggtttttcgactaatctttcttgcctcagcttggcttgacttttttaaatgtcttttaagtataaataattgaatttatttcatttgaaatttttgataatttcttttcaatttgtatttttttagtttgttaaatcatatgtgggtggggtggttgaggattcctaattaataattatgctacattaactaatatgagaagctttaagagtttatgcatgatgcttgaccaatatagacttgtctttttgttgactttatacatattataagtacgttccctataaataaccaaaggaagaaaaagaaataagagaaaaaagtggatgaggaataatgccatgcgattcaaaaattcaaaccaatgagctaagttttgaataaatttttttaggaaaaattctactttattcatttaaagtaatcgtgcattttcatttagaaaattaagttgctctgtttcacattttttttttttaatgaaaaaggtatatttcaaaagaataagtttactctcttttaattaattttatttgaagacttacatcactaagaaaatacaaattagtaatagtttttttttttttttgagagagaacaaattagcaataggtggccttttgtattttacctcaaattctttctaccaacatattttcatttccatttcaaaaaaaaaaaaaaaagaaaaaacatattttcatttcaagttttcatcctttgcaagggaaatcaaatgtagaccgtgtacctaagaaaattcatatattatctcatacaaaaaatagtaatgacataatgaacgaaaagtcaaccaagtgttaatatttattttggagtacgatagttgtaaatttttttatttgttcttcatatacatcaattagactttccatagtacagcacttttgttaagaatgttgacttaatgctacagtacataaagtatttttttccttttcttaaaagagagagaatattaggaaggtttttttatgctaattatttgatatgaagtcattatcagcttggcttcttaatgagtatatattttatctaatctattcgatctttttttattaccacgatataacgtcggtatgggggaggaagcttaatcaagaaaaaacaatgtaacaatttactaacatcgtatatgtaagtgtcaattttgaataagtagttacggcaatttataacatcacattgtcttctttttctttttcttatttttttttttagaagatatcatacattgttgtgattagtcattttcgtagattgacgactaaagttcagcccaaagcaaaactagttaatagttcgtttgtttagcaaacatttatcttattatagagggaagtaatcaggtgatattgccatattgattattatctatttcaaatgatattatcaattttgaacctaagttctaatagatttatttttttcgcaccttctcaaaaaaatctcataagaattgagatattatcattctttatatcctcatgatttttctaatttcaaaccaatgtaactttggttgcatatacccaacaattattttgaggtgtttattgtgcgggtggtgtggattgtaatatttttttcaaactaaaccgcatatgtagtttttgtaatttttcaaaccacaactgcaccgcgaaaatgcgatatgatgctatgtaattttaggagtttgcactatcatcattatcaaacattataataaaaatttaaaactcaatctagtaacaattgaaaaaaaaaatatatcttattaaaattttaacataacaatatatataataatcatcaaattattatattgaattgtcaccaaaaaataatataatatacacatatattatgtatatttgttgttttatgtaaaaagaataaaaattatattgtataaattggtaaccttataatatatagtacggtatgggttgaaccacaattattaaatttaaaatctcaaactgcactgcacatcatcgcgcgatttggcaaaaaagcaaaccatgaccacaccgcaaaggatttcaaaccgcattttttatgcagtgcaatgcggtgcggtacgcgtggtttgtgcggtgtgggcgatttataaacacccctacctcaaacaaatgaccacattgcctcccctcaaacaatcttctatctgtccactctccatcaattagtactgtatacttctctccaatacgttggagtacgcaccttacatggagcaccaccactacctcgagagttcgtgctctttctcagaccaacacatatttgttaactctgaaacttccaaggttacatggacatcaatatttgacacgtggcaagaaggatgacgtcacgaagttgagtagacccaagtcatagtagtcaacctaggaggggaccctagccctgcgcccaggttgacttcgggagctccgagatggaagttgagacttcaatagcttgaatccaactcactatcttttagtattatgcaccatgaagacatggagcaacctaattcaagcccaagttatgaaattacacgaacctgcaatccaaaagccaacctacgcacgtagggtttcacccagcacccaagttgacattctaaactaggattttagtttcttggaccgtcttagtgtaaatggtcaaacattgcattgtgaaatcaactagacataccacgaacatatttgaggtattatagtcagattcaaagtaagtttatttttaagcgcctagggccccggtgcctgggcgccccagtgcccaggttgataatttatcaatttgggtaacttctgtttgtttttttggtactaaattgggtacgtggagaaagacttcgtattatttgattatcattataccatagctcaatggatccccaaatgtgtatacattaaatcaaaacataaaatacaagataagaacatatacttcttgatgactattagtgtatcctcaaaaattctcgtgtgttatatatttttggttgattagaaactcacaccatagtcttccaaatcgatccaccacacaggaggaatagtgtgggctattaggataaagtgtataatgtgtttttgtttaattttaaacactttagcaagaacaatttaagagggaaaacaattttcttttctcctatatgtatttcaaaaatagcagttgaaaagctcctgttaatttcgaaaattatgttatgaaaggtgttaacacagattttgttaacctatgataagccttttcgtaataaatttaacacaaaattaataagagattaataaagtatataattataacacaagatatttttatgtggttttacagttaaatctgcatactccacgagtctatcttattcaagatatttctgagtatttaatacaatatacaattgatcgtagttttttatttctctccaagactttccgtccctttttctatctgcccctatttataggaatataggttgacagttatttacatttaaattcaaaataaataaccgttttaatgaaacgtggttaattctcacgttttaattaatattttttactggataatacttgataattgcttaaccgcttgtcatctttatcctcaaagatggccaatgctgatttggataatagcatctcgcccaatttgttgatggttaataccaatttggactatcatatgtcttctagcaatggcatgagcacaagtgtactgagcaaacttaagaactaccctttgtccataagaccttgtagactggacaatcatatctttcatatttctaagttgttatccttagttattgtgatgttgaaaatatactaagtgttgataatgttgggttttatgccctaaatattacttattaatatagatcagannnnnnnnnnnnnnnnnnnnnnnnnnnnnnntttatttcatgattatgtgtacataatgt

SEQ ID NO: 112870 - DNA, 2567 bp, Cannabis sativa
cttccgcactctctcttttctaatcctctttttcttcttccacactcgcctataaccttttcatacgctaacacaggtatgtttattattcttctttctcatttatttacttttcctccttccgattcatcctacccaattcgatttcatcttttccgtgcttgatttctctttctccttctttttattttattaattttcaagatgtaatttcttcgaaatcgtttctctttccatacttcttgaaattaaaactgaaaaataatatgtatttgctgagataattcatgtttccctcaatatttaagcagcctcgtctgaatctacttgattatttattgtttcattatttgcttgaactatttcattgttttcttttcgagagattcttgatttgtttttttccaattttaattatatttttggggaaagtagaataatcacccaagatgccgaagaacaagggaaaaggaggaaagaacaggaagagaggaaagaacgaagctgatgacgaaaagcgtgagcttgtgttcaaggaagatgggcaagaatatgcccaagtacttagaatgctgggtaatggtcggtgcgaggctatgtgcatcgacgggacgaagaggctgtgtcatatccgaggaaaaatgcacaagaaagtttggattgctgcaggagacattatactcgttggtctcagagattatcaggatgacaaagctgatgtgatcctcaagtacatgcccgatgaggctaggcttctcaaggcttatggtgagctgcctgagaatacccgtcttaatgagggcattgctggaggccttgaggatgaagacgagggtgctggtgatgattacatcgagttcgaggatgaagatatcgacaagatataaagaaatttcaactttgtttgatttgaagttttatgttataaaaaaaggcattatttctatgttggctttctgcatatgaagaaggtttgaattttataggttctgcacaggccttgatcgatgttaacaacatctttccttaactaatacatggatatctatcgtctttgtacttcattcattcattctttttcttttttctttaatgcttttctgggttggttctttcacttccattttgtttttttgtgtggttttatgctttctatcctcagaattttatccaaccaaattttaaagtggctattgtttgtgtttatgttatccaataaagctgtgttttgctgcagctctccccattttgatgattttctaaattattgcaagtgtttctttcaatgaagacccaatattttgtttctgtctataatgacagcaaatcattttagtgggatttttgattcatttacaaaatgtttatttgacaaatttagaacgctactagtagaataaaattaccttacacacttcatacattttccaccttatcaaacccaggtcaatttaatagttaatagagaagcatgagagatccttagatcttcctaccccatataatgttctatacgatttactcacatacaataattgtcacagttcataaagttttactaggtaatacagttatattagaaagttcacgctaaagtattccaagtagagagaaaacttattcacaaatttttataagatcaggaattactaagttgagggtattaacatggtgcttggtgcctttgtcttttaaaacctccattaagcgatccttcttttttcacctgtaaatatgtgaaaacagcattcatttcgtctagtagaagtaatatttttatcattcaagaaagaaaactggtaaacttttctgacaccacagaaatttcccctaaattttgtaacgagtatggtaaggtatgcaattgaaatgctgtagaaaattcttaccttggtataatctttttggcactgatagctcggcacggttttgcgccttgaaacagttctcgttgtctttctgtttctagctggcttgaaaccatctctgtcatttgctgattttactgagagagtatcaaaggagagagacacttcatttgaaccacagctctctttctcttctcctgctaaatcgaaaaatctattgtcggttttgaacatctggtttctttgcattgaatccaccactggtttattcacacggctttcaactgaggagctttccggtaggcgggttgccatccatcgctctagccagctccaacccatgtgaggttctttgccatttgattgcatctctttcttcttagagcagattcttagctatgcacaaggagaattaagtttacactttcatgtcacatccagcaaagacaataaataatgtgaaagttgatgaaattgctctcttagtaattgattcaaaagagaaactttagtgtacctgttgtgaaaaagcataagctagcgctctctcacgccttgtggttgcctctaatctgtttcgaatcctcattttggaaatgttgctgctgacagtgctatcatcccagtcttcctgtcaaaattaattttcccaagttttatgaataaatgtgataatcattagtgccatatcaagttcct

SEQ ID NO: 112871 - DNA, 6130 bp, Cannabis sativa
tgagtgactcgctaaattactttttggggacttaaaattaaaactaaaagttttcctatcgacgaataacatggcaataccctaaatatcataaaatgggaaaatttagggtgccctaaaatgccccaactagtagactggttcccaactgaaaaatctgttatgtggggtctaactgaggatgaactagaattatggttcctacaagtcatactgaactggtcgaccggttcagtacaggaatccccaaaaataacacaaacaccacaaatcgatcccaaattgtaccaaaacctctagaccacctaataaggccacaatgaacataaaccatgcaaaagaactgaataaaaccccataaataaaaatcaccatgaaagagcaaagtgtgagctctaaagttcaaactttgctcaaacacaaaaacaatcctcaatttagacctaaaacagctcaaataacatcaaaacatcatctaaatataaaatcaaacatcatttacaattacaggatcctaactccaagaatcatgcatagaaacctaacttacaacctaagaaaccaaagagaaatgagcttgagaattttaccttggattggattcactatgatcttgctagaacatcgaaaatagagttgaaaaaccctatttttctgctagttttctaaagatgtcgagaggaagagagttgaagagaaagagagtttgatttatcttataatttctaatttaataaaattaatctttttctatggtattatctaatatcatatacaaacaaatcagattagactagcctattattaacccactagaggacaaaggaaagtatatagcaaaagactattttgtccttgcttaaatcaaaaagtaaccttgtcatctaagggtatttttgtcatttttaatactttgaatattctcggcattctcaatatctatctaaattatcccgctattactcaaataccaaaccataaaaaatgtgactctatcggccaaacgtcgcgtttcactgttaccggacataaaatagagtaatttgcggcataaatacttaagtttaactcccaattacaaataaatacctaagtttaatttttggcagtaataatacctaagttataattttaaaacttttgttggtacctggctgttaagtattaagtaaatggtcacgtggcaattcctaattggtccaagtcattaaatttttatttaaaaaataataatttaattatattaataagatagtggcacatggataatgacttaatatttaacagtcaggtacctatagagtttgaaaaatataacttagtattactaccgccaaaaattaaacttaggtatttatttgcaactaagagttaaacttaggtatttttaccgcaaattactccataaaatatgaaaaacatgaaatttcatatataacataaataacacacctagaattcaaatatatctccgtaaattcataaatcataattaaaaatttaatttcaaatcaaaccttaattatctgttaattttcatattaaaattaaagggtctttacagattgtctaaatgagatgttttgaggataattagaaagttggtgcgcacataaggttaatcaaatgtgattgtcattggaattaatttgtagtccaagtgagagattgttggattatttttaataatctaatatgtgggcttaagacaatttatttgagctaacattctaaattgggctaattaagtgatctaattaaatgagcccaataaatatcttatttggtatgggctttgtaatgtgtaatacccaatagtaaacctaattagggtttatgggactctatagtttgctaaggctaatcttaactactcttttcttctattcccatcaattgagtgagaactcgcaagagaagattagtctgtagaagatcatatactcattatcttatctcatatctaataaaatcatgtatatcttctatcttattaatttatagagtaatcttaatctaacatgagtctaagatctatttactaacaaaatctcctttattttgttttttttcagtgtaaaacactttttgaaccattatttattattttttttcttaactattactttaatttgttgtaatttttctgtttttacatacacttatataaaaaaattatagtagtaattattattaataatagagtaatttgtagtataaatatctaagtttaactcttaattgtaaataaatgtctaagtttaattttttgcggtaataatacttaagttataattctggaacttttgtataggtacttgactgttaagtgttaagtaaattgccacgtgacattccctgcttagtccaaatcattaaatgtttattattttaaaagaaattagtttaaatataccaatgagaaaataatacatggatataatgacttaacatgtaacggacatgtacctatagagttccaaaaatataaattaagtattattgccgccaaaatttttaagtatttaattataactgaaaattaaacttaagtatttacactacacattacttttaataatattaaaaaaaaaaaaagacaaaatcagtcccatattacaagagttgataactgtagtaggataaaatacattccagaaaataagatatgattcaaagtaccatatattagataatcattaagaagtgcttttttttaattaaaagtaaataataagtgaaataaattaagaaaatgttgtataatttattttattttatttagaaataaataaatatatatttatatgttcactgctagcataaagatttgtgctccagctgccaatttgattgtggaaagtgatagaacatgctactaattatcataactaaattcatttgatttaatacgtgtatcttcttcaaccaacatcaaaaatatgaaatgatataattattcattttatttacataaataattattatttattattatgaatttactaggtcccacgcttttaaattttctgatgtctcagccttttattagtgtccaagcatatatagctagtggaaaaacaattcaataccaacgagtgggtgatgattaaatttatttaactcaatttatgtatattaaaaaatatttaaaattttgtaaaattgtatttttggaatttttttttattagttttgtgtatttataaaatattttttttaaaaaaaaatatataaatgtattgagtaattaaaatttagagagaaaagtataatttttatataattaatttaaaaaatggcaatattgtagataattcgattaattttaataaaatatatcaataaaaataaatctatcttgaagaatttatggttgggcccattatatatttgttgattttgggttggtggtttaaattaaattatatggtagaaagaacaagagagcttcttctaacttctagcctaataatgacacaatgagatatgagtatattttttcttttggctaaaaatctactatattttatctcttctctataatggccaattacattcaagaaaaacatcatggtagttttttctttctttagtgtaatttttttctaaattatcaattattaaaagtaagaataataaaaaaattaatttgtttatatctgtagtagttgctgaagatccgaattaatatatagtattcttttattattattattttaacaaaatatatatgaatgatgttggctagtgaaaatgaaggtaacactaattgagtaggccgacatgatttaaatctaattacgaattttggatatttatgtgataattgactctcatcaaaattatatatgtgtttgtggccatttcatagtatggaaatattagtttatcattagtgtcaattttatatatagttttttttaaacaaaattatttaattgtgtaatttctatgcttttattgaagatgtcatacaatttctccatatctctctatactagctaatacaatatagtattgacaaaacatattcacaagggtcaaggctatcaaatataatatataaagaaaaaaattgtttgttgctagtttaaaataatttcataattatagaaaattaatattttattgacaaatgaattgtcacaattgcttatttgtacccttcgaacatgttaaaataattccctttcaaaagaaaaatgttaaaataattacaataataaatcatttattaacaatatattaagatcctaattaaactatattaattaagacgtattgtacctcgtactaaaacacaaaattataatctaatgctaataattatatgtacacacataaatttaacacagtaacataaaaaaaatcaaataattatattcatttataataaatttcacttctaaataatatggcgtataaaatcctaaatcaatttataaggttctcctttgtcaatttgaccacattttattgctttggaggaaaaatcctaactatattgtctcatatttgattatctccaactcgacactaaaaatttaaatttagtgttgtttttcactaaaattaatcaaacccaatattgaaatctatcctataggattgtttatcgtgtctacctttcctatatgtagactacactaaaattattttttatttttttatttaaataatcaaataatagttaaataattaattttttttttaatatatacatgtattatttatatttatatataaaaataataaaaaagtaaaatttttttgtgtagttttttttttttttttgacatgttgtgtagtttttagtattgtggttagaataaaaaaaatgttaaaattgtacctttttagtattagttcaacaataaatttaatttttattattggagttggcctaaataaatggccaaaattttaaattggacaaagttcttccatagtgtaaaatttgtataatttatgtgtacacaaataattaattatttgtatagaatcatataacatctcttgatggtcattaggtgtaaaaattgtttgtgtagaatgaaagtttgattcataaaaaaaaaaaaatattaatgaatctaattaaatcttaatatgtgggggagattggggtgagtatattatcaagttaattcttattttcattatcaaactttttttagcgattagacacttaaaatgacggttcaaattgtacaaggaggatttccactcacataaaattggtttattagaagaataaaatgtcatcaaagtttagaagttgtaataattattgataaaaccccatcaaactaattttaattatgaattatagtcattttcaacccaactaaaagaatattagtcagccatataattatgcttaaatagtgagacttggcaaccaatacaggacaagtagttcaaaacaataatccagaaagtaaagcaaacattattcattagaattgatattatcattgatttagaagtaaattaattaaccgcgttaattaaagggaaattttaccaagtaattgactaatttgtctttgtcttttttttattattatttttatgcaaaacaaccattcattaaataaaaaaaaaaagctcaaagcagttacattagtagaaacaaagaattctaccccccttaaatcaagaaaatcagtaaagttggataaaatgagctacttcatttagagtactaaaaatccaaaaaaacacaaaatcaagtatcaagaataagtgaataacaaacaattgagtaaataaaattgtaataattatttaaagtcgcctaagactcattctttctaggaagtcctattgatggaggagttaatctcacagattgcttccataacttgtgtacggatgccaaaagcaataggaacaacctcttaatgataagctttattcttagccatccaaaggcaatgaaaaaggaaacaagcaaactggaaaaaaggtaaaatatgaggatatatggttggggtaaatactattttagactatgtattttacaaaaattactaattggactatcagttttgttaaatgataaaatagatcatgtattttttaaaattgtacaaataagactctgaattgattttttgtcaaa

SEQ ID NO: 112872 - DNA, 2475 bp, Cannabis sativa
ttcaatgctcagctagataagatgaattatttcttattggctttatttgtatactatactatgctggcctggatagattggtgaaatgtactttgtccttttacagttcttgattatgtggcccactaacaaatgatttaccttttcctttaaatagcgaagttacaccatgggctcctatcacatgctgacggtaatggagactgggtgctgactgtatttacagctctttctcttgtaagtgattgtaaaaattgttatcttatgatagtttctcctttatctttcgagtctactttgttaacctattttacatttttgggtgcacattatgactgagaattgtgtttctttttggatgatgatttaagatgaaagatcaggtctaagtaaattcttttatcctttttgggttttgcagattattgatgttttggaatttgtcccttcccatatcgcggtatgtttattttttatcaaaattttactgacctgtccattgaatcatattatccctgatttgcattccatgtacttgtgccatttttggttggatgggcttggctttgttttcttttttatttgtgttctgttactgaccctagagatcatttgtagattgtaaaatttccacctaaaatagttgtttatctcactaggaccttaagttttatgtcatgcatttatcatgggagaagaaacgaccaacaagctcattgaatcttgccatgttggactataacagacttaacagttactaaatgtcattgaaagttgtagaaagttaggaagaatggcatcaatatgttatattgctgggtcattttggcctcttgtttaaatcaaactttgtgaggaccctatatctcttttactaggttctgtctgcttctatataaccttcttttgtttgagaatcttttcacctcttaattggataatgtttctcatggtttcctttcttctttcttctaccctttttgcaggtggtgtttgaccatgacggtgagatattaaatcgggacatcttttactttctactttattttgtttattgttgctgtggttgaattgttatagttttgagttcttgtacgtatttttccttttgtcattctaagcttccttatgtttcgcgaagctagtgatctgactatagtcacttcaataggttgctaagggaaattcctaaaaataattgggaaactaagtagatctatgcgtttagatctctttctctctccccctcttcatttttccttattcaatggttgatactctcttcgattctcatgcaataggacatgaagatgtatcacatagttgagtcacattggactagcatcttataagaaagatgtcaagctgttgtctaataacccaccttctcctattctcactataatttatgagtattaacattttggagaaaatttggtgtgtggacctactgtttcctgtcaatttttgataagatagacctttcttttcaggatttccatatggtcaaacatataattcgtccaaagaaagttttatggcaaaaggtatgtttttaatcagtcttagttttgttgcgtgcacatgttaatgttgagaagagtaggccagtttttttagaactaaaagatcatagtttgcaggtaggaagttatggatgtagtgttttctagggtatggtagggcttgctgacaaaataagtcacagtgaatcctgaataaattttgaaagtgcaaggaactctagtgttaagcactccggagagcaagttataatacatacacattctattctattttctatgtggctggcttgcttttccagatgagggatggaattgtgcatgttttttgctttttgttttttgaaagcaagccaccataaaaagaaaacccatcatttttcgtctcttcaattttccaaatgcagatggctctataattcctctgctcttttggcaattgacatatgtacatttccacataggaaatacgaaacacatagacatactcctctcactagtttctccattacttgcacaaaggtgttttttgagcatcttgagagatttgaatgagttgaatccaggctcaggctcaagttgcaccaaaaattggtgctatgtcctctttcattttaaaaggaacttcaaccgaatccataaatttgtaatttttgagctctgaatgtgctttgtattcccatttagaaaaggtcttacaaaacattcttttattattttgtattccttggatagagttgaagattaacttttagacagatgattgttgctcttaacacttttttgtaaattgatttttttgtcattaaactatatgctgtgttggctgttttaaacttatggcttcttatatgcaaattatttattttaggcaggaattttcgtcatactctttatccctcatacaagagcaatcgacctcctactcctgatactatagttcagggacttc

SEQ ID NO: 112873 - DNA, 5397 bp, Cannabis sativa
  modified_base (1187)..(1188): a, c, t, g, unknown or other
aaaaaaaaaaaaagttaaagaatagtatatagagtaattttccaataactttaaataagtcattaacgggtcaatttcgtgttagtcatgtcaacccgaacacgacccgtttattaaacgggttagatgagtcaacccaaactcgcaaactcttgtgcgggtttcgagtcttattatcgtgtttgacctgttttgttggccctacccaaaccccagcccccgactcgaactactcttgtgcggatttcgcgtcttattatcgtgttgtttatatgttaatagggttaatttgggctatggactttatttattctaggcctttttcttttaatgttacgtcagtttataaccgacgaaaataagcttgcatcagttataaattgacgcaaagtactgtcaattaccaatcgatggacaaatttagagaccggtgttaacgtttattttggactttgacggatgccaaaagtccatattatagtagtgtctattatcaactcatattcgtgttttgctttcaccaatgcattttgtgtatttcatggtccaaatctagtttattggtcctcaagtaagaatgagagtatcaaagttgtactactgaattgttatggcttcattctctctttgttgatttgtgctatgctatgtttgcttctcttgtactaatttatgatattgataacattggcactactcacttgagctctaatcatgttctgcattctcagactaagcataatgttgaattgaactatcactttgtcaaagttactagcaacaccctggctattcattagacactctcattgaacaactcattgatgatcttactaaacctttggcttctcaaaccagtggcagatggagaaatagggggagtgggcaaattacaattaattagatataattgttttacctatttaataaatacaaaaattcataatttttttattgggagggctacaatatttttctacttttgtaagtagctctgtcaatgttctatcgtttaatctctttgcaatcaaaactcatcgttcttccaagaccaatgaacatgccggtccgggaaagggggtttaagattaattaagtgttcattagtgctttgtaattagttcccttcattacaaaaaaaatattacatatatacttttattgacaattttttagtcacaacatannttttttgtgactaaatgtaactttagtcacaataaaaggttacttgtgactaaaatatagtatttaaataaaaaattatcactaatttagttttagtcacaataaatattgtgacggtaaatatattaattataacaaattagaatttttgtgactaatacttttaattacagattttttaataattatataagaataataatttataattacttacaaatttgttgtcactaaaaagaaatttattgtacctaacaattttttattttatataatatagcataaacaatctaataatgtggtgggctgccgattataactatatcaacatttttttttcttttaaagtatagtttctatgagaacaaattgttgttattattcaatacatactacatgttacaagttgtgaaaataacaagagatctcaccttgaaattatcatcttcaatatgaattgtttcactataaaaacaactaattaattggctttgtttcataaacacccatatcatcaaactaattattaaagagaaaatcatcaccatgagcaaaacaagtagtgatgaagtggtaattttggattgttgggcaagcccattttgtgtaagagtgaaaatagctttgaatgagaaaggtattgaatatgaagcaagagaagagaatttgtttggaggaaagagtgaattgttgcttaattcaaacccaatttaccaaaaagtccctgtcctattgcacaatggcaaacctttgtctgagtcaaccattattgttgactatattgatcacacttggaattctacttctccattgctcccatcttcaccatatgatgtagctcaagctaggttttgggctgacttcattgacaaaaaggttaattattatttatttgttaatttaactatatataatatgtatgtgttatgtttggtatgtttggttggagaccatagaattggaaaagttaatccactttcatttcattattcatttgctaattggtgacaatttattaaagtattccaattgaatgggttttttttcaacatataagaactattctaatatatccactaagggtctgtttgcatgtaagattaaattggattagattaaattagactaaataattttattagttcactgttcgaccttgttggaggactaaattaattcagttaatctcatctgtgtaagattttttattttatttaacagtaattctatttttacgtctataatttaaaattaaaatatatatatacctatttctataaaaatacttaaattaaaaatcaattaataattaaaaaattgcgtaaagttaaattaaaaagataaattattattttttaattaattatgtacatgtggtgttgatataatattttgctaagcaactatgtcatcattttgtttgtcacgtgtgaaaaacatgataaaatgatcaatttactgcactgtgaatagttcgaaaactatttttaacaagctgaaaaattcaaggggcacaataatgcatatgtcatagttcaggggaaaaaattctaaatagccaatatatatttatataaagttaacaaattgtaacatttacaactaataacaataattttagccacattagagttacgatataattttttattttttatttttagtcacaaattttaatattatattataatatcgtgatgagaaggtatttgaagcggggaggaaaatatggaccggccaaactgatgaagtcgtagaagtggctaagaaggacttcatagaaattctaaaacaacttgaagaattagccctagctgataaagccttcttcgggggagagtcgttcgggtacgttgacatcttggccgtagccctaacaagctggttctacacttttgagcaattcggaggatttaaggtggaggatcactgccctaaactctcagcttggatcaacagatgttaccaaagagacactgtttcaaaagttagtcctgacccaataaagatctatgagtttgttgccatgttgaggaaaaagatgctaggaattgaataatttatatatatatatatatatttatatatttatatattctcagcatttattattctcccaacaatattatatttaatcctaatatgtaatgtatgccttgtgtccttgtaaaatccctagctaattatatatttatgtaaaggacacaaaataatataaggcaattaattaatacttactatcttgtatttcacaaatcaaatacaaaaatattatgaacttggatttaatatgattccatcataattacataagtggatcgatcttaatgaactagataatacagtgtgttagaaaatattgtcaaagaaagaatatattacaatcaaaatatttcaaatataaataaaaatattacatcgaaatttgagaagaaaaataataactcaaaataaatttgaccaagactcaataataatttttgtcttaaaactcatttcctccctcgtataggcacttaagaaaattctaaaaatactcttaagaatttattaagtttcatatgctcagtctagtgtctaaaaatgagtatattctcacaaggttctaaccacaataaatgatttcaactatatctatcacaagtgaacaatatagtctctatttatagaattttcactctcatattaacataaatgaccatcataaagtccttaaatgttactaataataaattgagcatttatggtattaattgagtgatttgaataagttttgagctgttaaaaagactctcaaactttcaaaaatgtatgcaatagtatgctaaaaaaaaataataactagttatagctaccaatttttcaactttggccaattcttctccaaagtatttcaaatcacttccacttgattttgaaccatttatacaccttataaatgaataaattaagtctccaacaactatatttttaatagctatcattcattcacattcataagcaattagtaacatcttttttactaatttaagagtgacaaagatatgagggttacatattcaagtgatcctcaaactaaaaaatttgcaattcttatttttttgatcattctatagatattttgtaactccataatgtatattttttttttgctgaaaccaaaacttcattaaaccaaagaaagaaaaccagacaaaaacaagatcagtcaagagtagcaacaaggggtgctacttccccagcacaaagaaatcgagcaatgttatgggacgtagcccaagcaaccacattgtgagttacgaagttatccttacgagggatccaaaacacacaactcttagcatcaaaattcagagaagaaaataaatgcataaaaagattagtaagcttccaagagggggtaaaagactctctcacagcacgaactatagattgaggcaatccaagaagaaattggcatccttgcaattcattctcgtacacagggagaaagcatgacacagagcctaacactcaacctcaaacgcagaaccacaactgtaatatctcgaaaagtataataatatttaattaagcatattttaataaatttgtggttatacgaatattggagtaaaattataatcttacttaagctaattataagttaattagtgtaaatctagtaaatgaataattaagcgtagtttatttatcacagaaattttattggattatgggggtattgtaaataccatttttgaaataaaatattttcgagttcggcgaccgtggaaatggacggagtgattagaaatgtcacgacattagaaattgtgttatattggaattgtaccggactattttagaattttaagtagtcggtttagtcggaatagttaaaaataaccatagtgcccttaaattatgttttttttagcttagtagtcttgaaagggtaaaatagtctttcggaggggtttaaattttggtcttattttgacttttttaggctgaaatggaggttatatcattagatttatttcttttgttttattagttaggttatataaaatttaagttaatcattaaaaaaaaaaatagataatcctctttctctccttccctgctttgagctctagaaacccagctgaagcaagaagctcttagttgaataatttttttttttttttgatgaataagaattttattgctccaaaccaactatta

SEQ ID NO: 112874 - DNA, 1131 bp, Cannabis sativa
  modified_base (1097)..(1098): a, c, t, g, unknown or other
aatagttcaaggagaattttcaacagccagaaagtttcaggggcataatttagtacatgttaaagtttaagggacaaaaatcttaaatagctttttttttctcttaaagtccatccaatctcaggcccggcctgggatgactagtttagtgttgttgttgatcttggtgtgaacaagtatttcaagttataattaattatgattggatttatgttttgattaggatgtgggtcattcaattctggaaagctattcaagggtgttggaaagcttagccttcaacataatggcaagggttgatgatcttctatacatagatgatgccactaaacgacgtgcaactatagactcaatgtgtttgtatgaccctggagctggaagggttggcaatagtaataataatgttgttggtgcactaccttttcctagacagaagcaggcattaaccagttccagctcttttgcctcatcacgaccaaaacacccaccaacaccaatacaagcgttccattctcgtactcagatgggtgtaaacccagttagaaggaccaatagtctttcaatagataggattaattcgactagtgatacagaggatgagaagtttgataagcattatgctcacattaaatagctgttattctgatttgtaatcacgtttttatatacacacacactttttatttgtttgcctcaatagctacctagaagggttatgtaaatagcaatatgaggtaggcacccgtgccagtgccacttcttttgctatatataactaaactattggggcacgggcctcactttgaaagacaacctactcagtagtttttgttcgaatgtagacttgtaccaaattccaatttgcttttttgagttttattattatttgtttggtaagtgttagggcatctccaaccacattgttgtctaaaattttttaaatattatatctaattataagtatccaatcacaagtaagaaaaataacaaaataatttaaaaaataaagtttgagaaatttttgttgaaaagtcaaactaggaatgtaattggggcgggatggggctagtaggaatgtcaatggggcgggtcggatnngatccgactctgatccgacctgatccagatcat

SEQ ID NO: 112875 - DNA, 5581 bp, Cannabis sativa
aaaagaaaaaaaaaaaaaaacagatttttttttttttttggaagaacctgaaactttattaaaagtaaacaaaaatacaaagttttgctcaagaaagaaggcacagaaccattctaaatatactcattatctaaccttagacctgctctagcacaactatgtgcaattttatttaactctcgaggtacatgaacgatgagcaaattaagactaaacaacaataaactcttaatacaattaatgatatcattgagcacaaaactatgacaattagtagcataaatcttatctacaacacttttacaagcaaccaaatttcttgtcactgttattcaatcggattgtaaaagtgtttagataagatttatgctactaattgtcatagttctgtgctcaatgatatcattaattgtattaagagctcattgttgttcagtcctaatctgctcatcgttcatgtacctcgagagttaaataaaattgcacatagctgtgctagagcaggtctaaggttagattatgagtatatttagaatggttctgtgccttctttcttgagctaaaaatttggttgaataacagtgacaggaaatttggttgcttgtaaccagtagatagcagccaaaatcaccttagcttcagcaacttcaggaggaactaagcccacgattagaacaaccataccagccttaacattgtcacaatcatccctgaccacgactcccagcttcttctcaatgctattaatagcagcatcaatattgattctccagcttccaacaagaagggtataaacctgctcatcacgctcttgaacacaaatatctgtcttgaaaccagaatgataagcacaatcatattcaaacaaatatttagaagcttgatcagaaagttgcaaggaggcaggttttttgttatgaaagagattatttctttgatcccatatcatccatacaaggcgaacaaaataggtgtactatatttatcatgaaggtcaatagccttagcaataaactcattaatatttaaatttttattacaagcatagaagtcaaaaaattgagaatgtttccaggcttttcttgcacttgagcaatcaaggatagcatattccacaatttaaattggagaaggtataatatgtcgatagaataaagaagaagccacagggatggaattagaaagccacatcaggtgtttaactttcggatgagcaaaagaagaccagatcttagaccaaaattgcttacactaattaaaagatgatgaagaaggaagatccccggaattaagtgcaaagtgatagacagttttgacactaaaaagaccagaattgtcctgactccaaacaagatcatccttacaattattaccagaaataggaacattgaggatgtgatcaacaagttgatcatcaaaaaactggtggagcttaagagaatcccaagccccagatagggaaataaagaaggagagagtagactcagggagagagaagcgtataacttgaatttgaaatgagggagccattgatcctcaatgttgcgaatattgctaccattaaccaccttccaaataagaccctgcttcatcaaatctcttccccataaaatactgcgccaagagtatgaaggactatcaccaggagcagcatcaaggatagaagtattagggaaataacgagctttaagaattaggctaagtagagaatcagaatgtaaggactctccaagcttgcttagtaagcattgattggttaaaatggactaagaatctgaagccaaggccaccaacaaacttggattgacaaacagatctccaatttttccaatggacttttcgaaactctagagaggaaccccaccaaaatctagatataagagattcgagttccttacaaatcttggtgggtatacggaaacaagacattgcataagagggaatggcttaaaggacatctttaataagagtctctttgccttccttagagaaccatttgtgatgccaagaatgaataatggatgaaattctatctttgagaaaagtaaaagattgatatttggcacgagagagacattgtggcaaaccaaggtacttagtgataaaaggcttattctcaagttggaatgtttgaaagaaaagctctttgattacatcttgagtgttaggtgagaataaaatggaggacttagcaaaattaatgacctgcccagaggccttagaatatagtgaaagaacctgttgcaaagcatgataggaagcttgatcagcagagcagaacaggatgccgtcatcagcaaacatgagatgagaaatggaatgagcatttcgagaaacagtgatgccacgaaggaagcccctatcctgataatttctaaggatagttaaaagcccctcagcacaaaggatgaacaaataaggggatagaggatcaccttacctaagccctctagttgccttaaattaccatgatcctgaccattaatagaaaaagagatggatgcagtagaaaggtacttaagaatgagagagacaaaacgaatagggaagttaatgaaacgtcatactattaagaaagttccactcaaccctgtcaaaggctttagccatatcaagcttcaaagcagcccaacctttctttccaactttcctattattgatgacatgaacaagttcattggcaataataatattatcaaaaatgacatgacccgaaataaaagcactctaaaaaggagagataatcctatcaagaatcattttgagcctataagcaaggatcttggagataactttataaaaagtagtacaatgactaattggtctgaaatcccctaacctcctagcatgctgtttttttgggttgagaacaattaaggtagagttaacatcgaaattttattcctttgttaaggcaatctaaaactgcattagtaaagtctctacccaaagtggaccagttttttttgataaaaatatgcattaaacccatccaaaccgtcagccttatccccagacaattaaaaaatagcccacttgacctcatcagcagtaaaatcttgggcaagaatcctaacatcagagtcctctaaaccaaggcccaaagaagcaaaaattgaagctgcagcatcaatatcactacccccaggaagtaaaaagatcagaaaaataagaggtgattagattaacaacaccatcctcattgctaaccacatttccatcatcatccttgaggtacttaatggcattagttttcttcctacgggtagcatgtttatggaagaattcagtgtttttatccccagccttaagccatttgaccctagccctctgcttctaataaattttctctttatacaacaaaacatcaagcatcaattgtaatttgttaagatagagcctatcagcctcactaagattaactttattttgaatactatcaatgtcatgagtaagttgctgaattctagtcttgaaaagattattattcttattccaatgcttcaaagaagtgatacaattagctttcttagaaagaaagctatggaaataattactaggtgggcttggaataggacagtcattttagttattagtaacaagattataaaaattagggtcttcaagccagctattttcaaatcgaaatcgcttattaacaaaattgataggattagaactagtgttagcaaggagaagctttaaggcttgatgatttgacccatagaaacctaagtgatgaagactattatcaggaaaaagatcacaccaagactcagaagcaacaacccaatctaaatgttcactaatagttttattcgtccaagtgtatttgttacctacataaggaaggggaaacatagtaaacctactaagaaaatcagagaagaaagacatatgagcctcatcaagtgcttgaccaccgatcttgtcactactaaagagatagctattgaaatcccccataattgaccaaggcagattagaagcattgtaaaagatattgtgcaataattttccaggttaaatgcttttgattactaataggagaaccataaaaataggtaaaatgtcgtaattcattaatattaaacccaccaaaagcaaacccccaccaaaatactgcctagggacctctaagccaaaatcaaaacctaacaaggtcttaaacctatcaatagagcaaggcttaagcctggtttccataaaaaaagcctggtttccataaaaaaaaaaaaaaaaaaaaaaaaaaaaagatctggcttgtgagtcttaaccaggaggaaaagttgattgaatgctcgagggttccccaaacctcgagcattccaacatgaaaaaggctctcatcattttttttctaggggcgggggtgtgctcagcatcacccgcctgttcaaagacttcaactgaggagggaacttcaaagtctatttctctagccctagcccacttaagcatggaacgcatagaacctccaacattagcttgatacatttgaaaagatagtctcttgactccagaggcacatgccagccttttacccttaacttgaggatcaggcaagggagcctccatcgtagagacagggagatcagtagtattctgacccaaaactagagatgggagggcttcagcaagagaatgagcagcagtaacaagctcaggattagttaaagttgggctatcattaacaataatcgagtccgtggacatcgaggcagatggtggtatgtttgaaatagagttaaaagtattgcaattgatggcaggggacatgcattccatagagttgttaggattaataggagtggggatcataatactgtgagagtttcgcggagcacttaaacaagaaacagatgccacattggagttaagtagaggtgcaaaactaaaaggttgggtcaagaaagggttcatcatttgactaccatgaggaaagttagtgaggtccatattagttatggtgatggctgggggatgagggtattgaaacgaaagaggtttttcagcaggtttctccttccctcgaaaaagaaggtcattaggacaagggggtggggtaatggactcatcacacttctgaaagtaagaatgacagtactttctggtatgatccaattttccacagtagaagcagaatcaaagagttgttcatatttgaaatcaaaccatttagtaaattccctacccattttaaggaaacggatgtggatacctcgcctgataggtttattaacatcaataaggaatcgaaccctcagataaggtctagtcccttccccaacagtggtgttatctacctaaattaactcacccacacctgaagcaataagcttagccaaatcataagatttgcaacgacaggaaataccatagatttgaacccataatgggacatagtgcagatgattaggggtgatgggaaaagagttgtcagggatagcaaagatggtaagactctgggtaaagtgccaaggctgtccatcaaggattcttctcttattgttgcgatattttgcacacgcaagtgtacgtatcgttacaagtagtaaactcaccaggagtgaggtcgatc

SEQ ID NO: 112876 - DNA, 1596 bp, Cannabis sativa
gcccaatatttacacacttaatcaattgatcttctttgccgaggctttaagtatgagagaggccttgagttggctcaagaataaaaactggcagtatgtcttccttgaaacggactgtcttgcgattgtaaaagtgattcgtcaagtagaaatgttatcttgttttggtattgtaattcgtaactgtagagatttgcttaaagagttgagaaatgtctctttatgttttgtaaaaccgtccgccaatatagtagcttatagtcttgctagagctttcatttgttattatcgtatgttcagtttgggaaatgtcccaactgttgttctacttcatttggtagctgaatttgaaggttaataaagttgattttcctttaaaaaaaaaaaaaaaactgaagggccactctttcaaattaataaattccaaaggtgtgtacattattgtacataatattcattttataaacatacccatttctaaaaataaaaaatacgtacaccaaaattaatattaatatgcaaagaaaatagaagagaagaggaagggaatgtacaatcattcagttctcatcctttattagtcgatcgatagaagaggaattccaatcattatgtaactccccaactggcttattattacctatatagcttaacacttcaatagctttctttctttatatatatatatatataaagtgattctttggcatattattccatcacctttttcatacactcctgctataaaaacatttctctaagcccttgctaataattcttaactatatataaatcttattctctgttggtgtactgagatagtgatgatgatgatgatttgtgtgagagagttagatctaagaaaagatagcatggctgtggaagagttagagagtaagtgtgaaacaacagtttccagtacaaacaaaatgtgtctcttcactcatctcttgggtgatcccatttccagaattcgccactccccatccttcctcatgctggttaattattattcctcttctctcctcaatttacttattaattaacgttcattttcttttaatatataaacgttactaattaagttatgtactattttatatattcattcaggtagctgaagtgggtgttgagaataaagagattgtaggtatcgttagaggttgcataaaaactgttactactagtacaactactgataatactactccaatttgcaccaagttggcttacattttgggcctaagagtctccttttctcataggtacgttaaatatttcattggtatctaacacttcctatagtagtaactcgatattttctaaatcaaaaatgttaaaatgctctagtggtgcttagcacctttctattctatattgtttaataaccctgctattttatattgtttaataacttttaagaattattgttagctaataataaattgatatatggaataattacatacggcactattttttgtaaaatatttacatttttatgttcaaagaatgtttttttacatttttacggtttctcaaaaaaataacacgaaaaaaccataaaatcaacaagaaaacaacataaaagtaaca

SEQ ID NO: 112877 - DNA, 1695 bp, Cannabis sativa
ttttattatttaataaaataaaaggtctaattggtaatttttgcaaaatacaatatccaaaatactatttacccgatataatttttaatgagatttgtagtagcaaccttaattttcttataaaacaaataaaaatatttccaattaactatatgtattcatagacaaaaaaaaaaaagagttttagattatgtgttttgtattgttatctttttgaacactgtttttttattaatataaatatatttttgaatgttgtattatgtaaaatagttaaaattatatttttggacttaaatttctcaaaatattttttttgatatgactaaaatattttgtcgattatttttgcaaggacttctcaaatctagttatttttctaaaaaatatattttgactaaattcgagtccaaaaacttatctatgctttttaaagaatgtgtaaaaattaattttttaaaaataaaatcttaataaataattgtacaaaatatactctttaaactctaagaaaaaaaaaatcctacttaaaaataataatggtgaaagtttgaaatataattccacatcacaaacttactaagaccaattcatatatgctaacatattccatgaatatttgttataatattttagttttaattaagattgtaatagaaattattttattttattttctttataaaaaaaagtaataaaacaaatgtataaatagttgtcatgatagtacattatcacatatgaataaattatattatattgtgtattatgtcaattattatattaatataccttggagaagctaattaatatattatatgtattttttttaaaaaaaaaaagttgtcacatatcacattataattattaaatattttatgtaattaaatctatcaaaaaaaataatattttatataaaaaatattatttaattaaggtgtcacattattattatttaaatgttaaatactaaactttttatattaaaatgtttttaggctagctaaattgttcttgataactacaaaaataaatctgtacttgataattacaaatttatcatatctttttggtaaaacaaaaatatctataactaagaaataataaatcacaagttaaaaaaaatgatatatgtaatcatgttactctatgcactaaaaaaaactatattattattattatatagtgtgaacacatatagatttatttattgatttgtttaggattttattaaaataatttttattaatttagccaataaacctgaaacaaccacgagtaattatgactaaattattttacctaaactagattaatattacgtgcacatatatttttataactgtaaattttattctagacgaacttaacctcaataatatcagtaatataaaatagataagaaaaaaatacgatcagtatataaataagacgttttaaccataagtgagcatttcaattttaaattatcatttaataaatagaagagcgtgttaatcgtttttgtaaattatagtgttatactcatttttcgaagcaataatgatcaactcgaataatgtcaaacatgccatggctaatctattcgaaattgataaatatgagcattgttattgggtatcagtggtgcctaacacccttaagacgtgtcaccttgcgattggctagcaatatactctctaaaaattattatat

SEQ ID NO: 112878 - DNA, 2378 bp, Cannabis sativa
tggttttttattttttttttcctaatgtaactctatttagttataacctcccaattagaatataattaacttggtcccaagtatattcttggatagagactctattgtaatatgtagttgctaaagcgttgtcataatcaaattgttaatagaaatagcactatcttagctataaaattctatcatctcgaaatataaacttttgggttgatgatgacatttttctaatgtatcgccatctaaaattatttccaaaataccatatataagaactatcaaatgatagaagacctaatttacatcttcataacacttgaatagtgccccactatcgttctaaaaaaatataaagagaactggaattacaaacaacatttacaatttgattgttatcataaatgtttctaagaatagattgctaagcttcatacttagtacaaatttgtaacagaaataagttataatgatagttaatatatagggtatccttagaaactacaaatccagttcagaatgtcattatagtaccttaccatatggtgggagaatttttaagaaacccgacacacaatgatttggatggtgaagtcgacttggtggttggcgacacaggaagtgatgacaagttgttctgaaaaaggattttttgatgaaaagccttaaaacaagaaatggagttcaaacatgcactctaaactcaaatttggaatcttgtagatgcaactagtaactttgatcttattagatgtacaagacgaagagaagagctggtggatatgtcgaggctttcgtgactcaaacattgggtaattagggtattgcccaaagacaagaaattaactttatggaaattttttctacaatagccataataatcgattagtaaacttttttaaattatggtcagattttgattcaccatacatttgattatccgatatcattatctctcttattaatatgtgctggtccgaagctcagtactattcattctgtgaaaacagtaaattcatctaagagagtaaaagagagtttgaatgcccgtacactcacactaactaagttttgttttcttttgtagatcaaagtttgtgtgggaacaaaacttaaaacaatcaagaacttaaagtattttgatgctttcttcgtattgcatgtatgttcatatttcataaacatgctttatatttttcatataataatcttaaaaaaaaaagcaaaagttagcataattaatgtcagtatttagtattggccaaagttatcatgtgtagtagtgtctattattttggttgttaagcatggtgactgcggttttctaaaactcaataatatacaattgtataaattttttttttattgaaactgatctaataactggttatgttattgtgcagctttgctgttatttaatatgtgctgtttgggtacgcttgacctgacatgtgagaccatagataattaaatcaattaaagcccttatattctttcatatatattttattgaaaatgaaaatgtatatcacaattaagcgttgacaactaagttttaatttggaaattcttcaatcttgacatattatttatggcttaggtctctgttgttgctgttatttgatgatgctactggagagcaaaatctggtgcagttcagtttcacaactcctttgggattattattaattaattagtggcaattaagcttgattatatttcacctttcataacgggttgcacccatataattaatatcaagtaataaacatactaatatatatacctaatctcacaacaaaaactttcgaatgaatatgcatgtctttgtatagtgaagaacaattacaaaaattttaaccagataataaaaaaaaattaatgaaaattaaaactattaaacttacacacaacacagattaatatgatctaaaaagctatagtcccacccagcaacaactctcaaccaaatttatttcagtgttattattaaaccaatatatcccagccaaacaagtgtacaaattaatatgaacaagaaagataataaatatggtgcaaaaaaaaaagttataaaattattccttcatgcaaccattaactgtgaataacctaacattggatgtggagataacggagaaagaggcggaacattaaaaattcccttcccttcctcagactcacaaacagccgtccaatctgacggcgttaacggcatgtcctttatataactgattgctcatcaaactccgttaacttctccttcttcacaaccacaacctcatcttcatcctcacgacgtcgtttaaagtttctcgtttctaacggaaagttgagtatggctttggagccacgaagcttaaaagcggctcggtcgtaagctt

SEQ ID NO: 112879 - DNA, 1893 bp, Cannabis sativa
  modified_base (37)..(70): a, c, t, g, unknown or other
acaaatgaacaaaatttcaacataaaaagaccgtatnnnnnnnnnnnnnnnnnnnnnnnnnnnnnnnnnnatttaaaattctgtaaaaccgtatatttgttatttctttgttgtttttgtgcatttgtgaaattaaccattttttttttggtccagattagctgaactaatggttctgacttctgatgtcatcagtcagttgatatattaattcacaggaaatttaaaatttagaggacttgaattgaatagacagacaatcaagtgcaattgtaataactttgagcaaattgtgctcaagtaacaacatggatggtaaaaaaataatttagttgctattagcatctcaagcaactgtcatgctagtgaaaaaaatgtaacaaaatttctaatgaaaaccttcaagagaatgcatttctaacataactagagcccctaaactttcttacatttaggttaaccattaatttcctcaccctttctgcatcatcccatttcccacccaaagcatacaaatcacaaatgagagtatacaccccgccatcgttctctggttttacaatccgcaaaaccttctcagtcactctctcagccatctcaaactttttatgttccttacaagctgacaagaaagaagaccaaacgacaacgttaggttgtagtttcattgtcataatgacttcataggcttcctctacaagcccagccttcccaaacaaatcaaccatgcatccatagtgctgaattttcagctccaatccacattcttcaatcatcttgaaaaatctctgcccttcttcaactagacctgcatgtacacaggcactaagaatcccagtaaaagtcaattcattggcttttatcccttctttttgcatcaactcaaacatggataaggcatctttacagtaaccgtgttgtgcagcgccgcagatcaacgccgtccaagacatgacattcctttcgcgcattaactcaaacacttgacatgcgctcgtaataaccccgcacttagcatacatgtccactaaaactgttcccagttcaacattcagttcccatgcattctttgctataaagccgtgaactgatttccctagtaaagatccaagagtacccatatgggcacaacctgaaagaacagatcctacagtcacttgatcaggtattaaaccttctttgttcatcagcatatctcgaaagagatgtaaaccttgctcattgccacccctatttatgtgagctgcaatcacagcagaccacgatacaagatctctctctggcatttcctcgaacacagaactcgccttctttacatcaccaagccttgagtacccagtaatcatagtgttccaagttgtagtgtttctcacaggcatttcattgaacagtttacaagcatcatcaaacgatgtaactatatacgcatatagaagagaagtggccacgtagacatgagaactgaagccaagtttaataatgtgggcatggaggtgtttgttgagtactaaattatgcaatctggtacatgattttagtgtgaaaagtattgagaaactatcaaaaggaacagacttctggtgcatatctgaataaagggacaaagctttgtgaggggaagaggcatttcttattgccaaagcaaaggatgtaaaggttttgacaaactgaaaaaatgagtggcttgtgggttttgttagacgcatttctaatagatggattagacattggcgatcaaatttaattgacgaattgagctttcccgttatagaggaaccactttacttttaggaggcgtttggtcgggaggaatgaaaatataggaataggaataggaataggaataggaataggaatgggaatgggaataggaatagaatagaataaaattta

SEQ ID NO: 112880 - DNA, 4740 bp, Cannabis sativa
ggacagcatgctccatgataagctgttcagagtgatttattacttataaagaattaatttgaagaggaaactcaaataatcggttagagtatgctacactattcgaccagagtaaatgtagacagaatctcttcaagagatattctctaaataatcaagcaatctcgaccaaggccctgattttgtggaattaattcacgttggcagaagaaaaaaggaaaccatctagtttttttttgtttattattattatttctcttgatttaaagttattaagtttccttatttatatgcaaaccatgaaacatattgtaatacctccaactattgatcttttgagcttaaatcccagtataattcgaattgggtaatcgaacttctaaactctctctactctctttaaatgtaatttactattttcacataatgaaaaaagagctcgggtacaagtactctaatttataattaaaatattcaatttgtgtcatattaattgtcaaaatattttaataattaatttaaaaaataaatatttagtaaatcataatctaactacatatggaatattaatttagaattaattataatgaatatcaatttaatctgtgagaaaccaatcttttgatttcaattacgtgtgaaattaaatgaattgatttcataataaatattaaaaatattctaataacttacttttagattttagaattaatggcctatattttttttaacattgtaaaataataataatgtacattatatccaagttgtcaaaaaaaaaaagtatcctcatagaaaaaaagaattaaatacctaaaacatgtatttacatctctggtgtactccttagataacaattaatgtaaataaaaaatatagtattgaattaaaaaaaaaaaaaaattaagtgtctgcaacattattatctctcttgagttcagaagggggcaaaaaacaatccatagacaatccagaaatgttaaatccaatctcttcaatcttccatgtctcctcaatccttctcttgtgattatgagcttctccatacctataaagcatggctgaggtgttaccactatgagctatgttaatcccatcctcgtatctgtaatcctctatggatgatatcattgttgtttcccaaaatacactactactttccttgttgttctttcccttcatgggcttcattctaactagttttgtgtcttcaaactggatcagaagtccagtgcgttggctgaagtaaccccacattgtatgccgtgatatctcagtttgggccgtgctttgggccttgaggatgtttggggccgtttctagcctcaatacaaaacagtcatcattcttaatggttttctctcctacacatacaccttcaagaaacaagttggctatgcacctggggtccaatccctaataattaattaaaaacacatatgacttagaaatagaatacaataaggtcactgactttttctttaaattattatctttattattattaactatgctattattgctcacctaatttattattcctgctgaaataaatagctcatatcaaatgttaaaggtacacttaaatttcaaataatttctaattagacaaaagtgcttaaatacaacaatctcaataatttaggggcatttttaacaaggaacatgatttggtacatgttaaaatttgaaaagcaaaaatcctaattaactttattaatatattgtaatatagaatttttcaaatttaaatttaataaattatataaaaaattactaataagtagaagtgtgtgtttgttacctttcaagttcagtataaaagaatgagaaatccattttcacttgtgtgggggtgaggtgagggtgagggatgtttattagtgtatatgtattgtcggactacttttattttctatgaaaaaaatgctaataacactcctttctgtattagattattattaatgcaattaagtatcaagttaacatataataattttgattagatatttgttacatgagtattgagttagaagaagtttagactaaaagaatatgaaactctaacgttggaggaagctaatattacatcattttaatttaaaaaatgaatttcacttgaaaatacaaattttttagtcattaaaatttaatttacttaagtttgacattctcattcacatcaactctaatctcataccaaataccaaatatcgataaccaatcataaaatgccacatttaaataatgctagcgactactaatgtccactaacaattttttttttctttgtgactatcaatcatcattgggtttatgtattttgatcattgggttgtttcaccatgatgtaatatgatataatatatgtaattgtttaggaatggaatgatccccaaattataattacctggaagaatcgacgaagtggtctaggagggcctttgttagcatgagaaggttgagaagaagactgattccaagcgagtttgccatcactgccggcactgactttgaagccagaaaccacaagttctaagtaccacaaatcaggattcatttgccaaagcacaaacccaccaacctcatgaccttgcttccctttcgtctttacactaacaacactatcatcaccctctttcatttctgaccccctcatcttcacctgtcccactgcgtacatgctattgatcgagttcaacgcccctaatccccctgttgctgccaaatattgttgcaatatatactttgccgaagaagtttcctgcattttttattttatttttaaatcatattaacagttgatgaggaaagacattaatttattgagacttacaatggaaccagttttaattggacgagttaggagaacgttgccagattggagctgaagaggaataagaggagaaccaacgagtttaagcaaagccataaactcgttattggatccagaagagagatgggatttatcattattatcattattattattagaagagggaagcttattaatattgtcaatggattgtgctttcatcaaagaccgtagattttgccaccttaaaaccgcgttgctccccatactggtgaacatttcttctgggataggaacctccaacaccgtatccagcccattttctttgtcaaaattcggacaaagcttcctcatagattagaaaccaattcctatatatatataaaatgaagagcaataatttttatttaaaaaaaaaataataagaaagaaagaaagaggaaaaaaggaatccttgatataggtaagagtagtattatgaatatgaaccctttcccctctttctctccggcccctctaaagtggcaacatcctattaagaacgagtgatttaatggtcagaatatgcaatttcatagagtgaaggggctagagtcgatcgatgaacaattgagagacaatgcaaaagaaaaaaaaaatgagagaaacagagagagagagagagaggctttccttgtgtgtagataattttgtgggcacgattttgacggctttcatctttttatagatatatattactaacttctatatataaagagccatttaaggcctcttataattggtatctataaatataataatgtctatgattagtcacattggattagttggggaaaaaaattatataaattgggatgagtgagtttataattaagttgtgggtggttgcgtctcttttaatgaaaatgcttttaattattaggactatattattatattatgtatatatgaaatagagaagagaacatgctatgcatacgcataacgcaacaagttccccaaaagaggtcaaagtttattcagcattgttattttgacacctaaattctgtttaaagctatatattctgattgaatatctcattgacaggtctttgaacactatagggtgccccttatttgactagatgagtgatcattttttagaaataatctagaaagataatatcatatataatataaagtttataaacgacctattttacacataccctattcaatctatctcaaccatgcacttcacattctaacatcatctaattcaacacattttatcattatgatcttttttttcataaagaagtgtaattatataaatgaaatcaaaataagcctaatgactattacaaacagtgttatttggtattgagaaagacccaataatactaattgtattttaagtaaaatacagacttaattaaattgtgagcaacaaagctaaaagatctaaaactctgaataattacatcccaaaaatgaatttataagacttttacaattagcaacaaagttgtcaatttctcacctcgagttggcaattttagagcatttctaatagcgatatcttttaaaagtgtcaaaaactttcacattacttaaaagtataatattttattttatttatctttcacattatttttagtattttttgttctacaatattctaatagtaaacaattttaaaaattattaaaataatattttattattatttaatatatattaattaattaaattttcttactttatgacaaaataacgataaataatgataccctcagttattaataatgattaattggtcccttatgtttttaaaaattaccattttagtaccttaagtgcatttaaaattttaatattttcaaaataaccctattttaaatatttaaattattatacattcaattatgttataaatattaa

SEQ ID NO: 112881 - DNA, 2326 bp, Cannabis sativa
gctgagaaattaatgggagcccaattgatttatgtcatgttattaaagagtgagagaaaaactactacagtactactctccaagtgtattaggaaaatttcatctcttcccatgagattatagattataatataatatgatttggatctttaaagaaactcttgtataataaacaaataaaaagtttttaaagcttccaaccaattgccacttttgaaatttactaataacactccacatataggatagaacataaatctttatagagctaacaagaaaatcatactagctaggtggtgatttatatgccatatatactatacaaatacatataaatatatatatatacagatagatcggtccccaagatattgaccaaagtatttgtattatagaacataaaaggaggttccatatagcactgtcttcggatctaagacacctgaaagatcaatccagaagactcttaactaatttagctaattagctccaaagaatcagtatctaccaccacacatatatacacatattcttaagcttagccttacacgtgttacatgaaaatacatacttttatttatttttaattactaatataatactccactaaacactacttattatcaaagcaaagattggtagatcttttttcagtaaatatatatatatatatatatttatataaataaaaacagcatttgtatgcatttcttaggtagtgggttaccatgtgcaaaagctagaggttggtagtcgacataaggatagagaaaacccaattcttggaaatccctaaacagagtgtgtgagagaagatcaagtaattaattaattaattaattatgattaaaagctgattaaaattttaattaattaattaaatattgaattttaaaaatggagggactatggaatgccacctcccaatcttgtcaacaatccacattttgtacaaaactctttcaaatttaatcattaattaagtctcaattaagtactataatagaatctttggttattgtttcattaaattataacccctcaaagatactgacttagctgttggagattttttcttagaaaaactatatatacattaaatattgggaataattaatatattttttttttaaaaaaataaataattatataaaattaatatatgtgaattttctcatatggaccttaactttactgaaagtgacaagctatgccatagtggtgtttggctcccaatagcaaaaattaaaaaagctaactctcttttatttatttatttttgtaaatattaatattttaattttaagtgtatttgatttgactaccatctttttcacgacgagtgaggttaggtttggtttaatcactattttttcagtgtgtcacaacataattattataaattaattgagaatagaagaatcaagaaagacaatataaataaatatatagggtagacttacatgaatattgtgccctaaaccttgagtttggagcttatattgtaattattataataaaataattaatatcaatacaaatgtatactgtatagagactagttgaagtcataatccaccaaaataataatggcttaatttaaggcgtaattcaagggattggtgaaatctaaggtatattttaaaattaataattttaaagggtacgtattttgtaattattaattatttacgtttatctcttacaagtcataaggtgatcacaaccaattagattaactagtgtaattaatatatattaagatgggaattagtaatataagcacgcaattagaggtgaaagcgtgatgaagtttagtatggtgggagggaaacatggaagaagactgtgtggcatttacaacacaaacaaaacactacatacagaaaaagtcaataataaattaattaggtcttataatatatgtatgtttttaatttatacatataattaatttttttttaaaaaaaaaaatactgaaaagtatgtagtagtattggtagtggataatggattatgatgtgtatatatgacattgattatatacacgtatccctaagtatatatgtagaaaaactttatggtttgataataggggagaagggaaaatatacatatttatataaagacactcttttaaaattattataaggttgaatttatatttatatatatagataaggaataatattttgtggcatataacatatacatataaaggtgtattgtgggggcctggtggactagctaggtagccataatatattggttttctcctgaaaattgaaatgtgatatgatgcactatagtacatatatatatatat

SEQ ID NO: 112882 - DNA, 3244 bp, Cannabis sativa
  modified_base (2877)..(2894): a, c, t, g, unknown or other
tagtattactaggtgttcacattgtattatatataccctttgtatacactaaaagagaccatcagaaataaaaatcattttccctcatttttctcttttttctacaattgctgccagccatttgggattgtttaaagcttctttaagtgttcttggctctttgggaaagagagcttcaggtaaagggtgtttagaagctaaaaacgacttgggtttcttgattccattaagagcacgagttgtcattggatgagttctttggacacctgcagcagccaaattattcaaagcagttgggttgattggaacaggtaagtcctgtggtaaatgaggttgtgtttgagatggtaacaggggctgtgtctgaggtggtaaagaggattgtatctgagatggtatagcaacaggtgtagaggtattttctgaggaaggttggctagtagttggaggttgtgtggatataataggattaggttaagggtgtgtttgggaaacatgttgatgatcgggtgagggtgatatagtagcaggtacatgatggtgtggaggatgaaaagtagtagcattagaacaggtcacaccagtaggaaaataagaaaatgcagtaggtaaagcattggaagaaaacaaatgtacctgtgaattggagtttgatgttgaacttgtggtggcagggaaacaagtttcatcaaagacaacattacgtgctatgtaaattcggccttgagaattctcacaaagatatcccttatgatgagaggaataaccaacaaaggtgcacatttcagatttgtaatccatcttatgagatcggtatggccttagatggggataacaagcacactcaaatgtctttaaaatattgtagtcaggtgctctttgaaatagacattcataaggtgtgagaacgtccaacacagcagtaggtaacctgtttatagtgaagacaagactttgaaaagctaaccaccaattagacaagtcaagaccagcctgagcaagcatggtgagacccgtttctgtcacatgtcgatgtttccgttcagcacgaccattttgctcatgatcatggggacatggatgcgaaaaatgaatcccttgatctcttaaaaaccttgcaaagggccggtattctcctccccaatcagcttgaacacccttaataggttgattaaattgcttttctaccatgctcttgaatttgataaaagtatcaaaggcctgagatttgaaatgtaagggaaaaatccatgtataacgactataattatcaaaaaaatgaacatagtatttgtaactttctttagacaaaacatgagatggaccccatagatcggtatgtataagttctaatggctatgaggcacgagtgaaagacacagaatatggtaatttgtggcttttaccatgttgacaagcattacaaaagttgagatcttttattgtgcctgagtgaggaacatgagaaagaattctgcttaatattgcaggagcagaatgcccaaacttgttatgcaatatatatttatagtatttggagtagatgatagcaaggctaaaggagaacaagtacagacataagtagaatttgtatttttattattatcacagtgattacaattgtcaactaagtcattattttgtgaaatacaggaggtattacaacaagaatgagaactagacttagtagatgtagcaagaagacactgaagagagtgagaagaacagccagtggaatcatcgccaagttggtacagaccatctttaactcgtcccttgagcaagactatcccagattgcttgtccttaacaaaacagtaatttcggtgaaactcaagaaacagatcattgtctttagtgattttagagacactaacaaggttctttttaatattaggaacttgaagaacaaatttcaaatgcaaaggacaagaagaagagggtaaagaagcagtcccaatatgagtaataagaaggtgcttaccatcgccaacagcaagcgattctgtaccagtatagggtgttgaagtttcgagtttgtcggaactgtttgcaacatgactgttggcaccggtatcagcaaaccatgcgtgatcatcaccatagtcaggcaccaaagtcgtagaataggcttcagggtcagttaaaggctcggcctctgttagaaaagcacgagagccaacagtaccaggctttggtgtgatccaagatttatcgaaacggtagtgacacacagcagcagagtgtccaaatttaaggcatacttgacacaagatccgttgagagatgaagtaccacgaccacgacttggaaatcttgataaagagtcagtggaattacctcgaacaggtggtgcgtgtggcctaaaattcccatttcttgacgagccaaaagccatatttgcttgtagtttgagagaaagatcggccatggtgctgtgatgttccaaccgactttcgtgggacatgagcaaggcttggacctcagcaatttcaagagaatcactgcgagaagtaataccagaaaccaccgagtcataatcgggtccaaggccatttagaagctgtaaaaccaaatcttgatcagtaatagtagaaccagctacagcaagagcatctgcaagtgattgaactttgtccacataattggagatcgatagatttcccttctgaacttgggagaattggcccttgagttgtaacaaccgtcaacgagattgactggaatatttttgttccaaggcgcgccagacactaaacgaagtggtatgattcgcaaccgaatctaggacaccctctgtcatagatgaacggagccaagatagcaacaactgatccttctttttccattgagcaaaggccggattagcagcaccannnnnnnnnnnnnnnnnnggtggttgaccagtgaacaagatttcatcaagttcatggccaatcaccgtaggaacgacctgtgatttccatgctaggaacttttggcgatctagtttgatggtgaggcaggagacgagggagctggaaaatggattccaagttgaaggagaataattctgagaagcagcaggagcttgaccatttaggcctgcaggatcggagttggaggtgtgtatcgatgactccattggcaaaatctgataccatgtagaaatggaaaccagtagacttaggtaaaaaccagagaaggtaaaaaccagggaaaacttattgtaagaaacagagaaatgcaatggaatcattgactc

SEQ ID NO: 112883 - DNA, 6757 bp, Cannabis sativa
  modified_base (135)..(140): a, c, t, g, unknown or other
actatcatgccatcaaatcccaacgtcacacacactctctccatctgagaacgattggatagagtctcacagagaaacacaatactgggcttcttttctatcataagatccttaaggaattgtaaagtccatggnnnnnnaagcccatggcaattccaagataaaatattcataataattggtgggtctagacaccagtacccaccaaactcgagttctttgaagcatttacctcttgacccgttgccacatcacccctcacatgggccccatcaatatcttccaaagttgttcttctccctttcgtgtcaagaaccaaaagacaagcctcctcattgatatcattagatatttccttattcttagcatctggtaaaatatcttccacaattataggatccccattaacaacctttgatgatcctatccctacctcgcgttgacccaaagtttcttccactatcatcggatctgaccccagcacatcacaattcccctcaaccattgcaatcgtcgaccgagacacctcaccacgagcaatggtttttgttgcagaatcatcgtccatggcagcattaaactgcttaagccatttagctctgatcatgtggtttctacgtataggtctcactcgcatccattccccatacggcttgattatctgaccctctccaacctcgaaacgtcgtggacaaaagctttcgcaatgccccataattccaaaaataaagcagaaagtggggagatgttcatacttaaagttagtccagaactcgatcccgacagtattgcgaagcttcatacgtctctttaatggcttcgtaacattcaaagtcacacgaacacgaagataatctcgccataagcccatgaaatttcttacattaataagtggcaaaagagtaaaaaaagaaaaagtaatatttatcatgtggtgtaaaatttgacacaggttatattttgtgccgaatttggcataacttttaacatgtgctaaatttgaactagtttatacactattattggagttcactttaatgaagatagactaaaatttacatataaaccactagctctatattggagatgttcttaatatgtacatatatttattcacttaattttttttttttcaattataaataatttttaaagttttttttttacttattgtgcatcgtttaggtgaggttttcgtaatttatttgttcttttatattttttcaaactaaataagattattaatttgtattttttttatgttggaagttgtgtgttttattttatttgtaccgattattaagtttttatcctttttttaaagctcacatatttccccatttctcaaaaaatctctcattttttactttattctcttttttaaaatatttttttaactctcttctacaaatttttaccttcctttttctcctttgttttttttccattttttttttactttttttttaaaaaaaatttcatcatatttagtaaatatataatagtgtagaggattgtacgagcatacatatgctattaatttttttttgttgttattctttttttttaataaattttagttaattattattttttcctcttaactttacctattaatcgatgatagtagagcaaagcacatagacttacaattacacaagacgactgatgatcttagtttcaataaatgaacctattcacactatgtcatcgcttaaacataattttttaaacttaattcatgaaagtaaaatatatatgattatactcatggattttgaggggagttaggtacatgtggtacgtccttcatacctagtatatatgtatatataattgtacaatgtacaatctatattgatataaatagatgtgaaaatttctctagtagactcttataaagggtcgttactcttattaagggtcgttcttgtagactctttatttgtttcgacatttataattaatttttaatctgattattttatgattgcgtatgttgtagctatttaggacaacttgtaaattttaatcaaattttaaattgtttatagtactaaaaattaggtttgaaaaattacttaccacgcatataaaaaaaatagttactcgtccaacaaaatatttcaactttattatcggcattgtaaactattttggatttcctaaaaaatttatagattgccttaaataactataacatacacgatcatgaaattttttttgacttaaaagtttttttgtatgtagaaacagatagagggtctatcgaaacacttttttagggagtgtactatagacttactcaatagtcatactaatttggagctagttttatcagtatatagtaaatagtataggaaatctctatagtagaccttcctaaaggatcgttttggtagactcccctcagttctcggcgtgggtcgtgccttctctataacaccgcccgtctggaggctggaggcatgggagtcagcttcctccataaataagtcgaatggagttttcttgttggtgttcttttgagtattcaccatagtcgaagtgaggcagcaactaataaactttcctcagctctcaataaatgtaccaaaatatttactgagattttcaaaaactgattattaaaagcttaaggaaaatgcaaaacaataaatattagacaaattgatttttgacgtggttcgggcattaataatccctagtccacgagttagttgtatcagccttgtcgagagtatctgagtattataagtgtttacaatggtaactttgtattcctcttatttctcttaaaaaaagaaagctctctaggaactttaatagtgattttctaagtaaaaaattgttcacccttttgtacatgaaaaataagggtatttataggcacacatgtgggtaagggaataccctttacctacctacggttctttactcaacacaccacaaaggaaaatattccaacaagaccatctgatcgttggtttggtaggtaggtttctaattgtgtggtgctcgatcagtgcaagatattttgtaagggtctttacatgcatcgttcaaaggtttctcaatccgttggacaataagcactacagaagcacgtacgcgcactaccacgatctgacgcacgagacaaaatttgatttggtgtcggaagatatgcaacttttgggtttaactctagaatagatatcatgaagatccaagaaaggttaggctaatatcttccttaaccaactaatgtgctatcatgatggagcatccgcgacttcgcttacttccagtagcaacatgatagatgagaattgtgaaaccattcccacctttgctagaaaggagggctttcgggtatcatagcaccttctgtaatcctggcagagggcagaaacaaggtaacagtatttaatccgacatggcactcttctatgatttccacgtacaacccatccagaaataaggataacacatcacatctagattatgatataaaaccaaatgcttccattattcgagcttaaaaaatattgacttcttctttcatggcccctaaggttcatttgtaacaacgtaacttttctcacaccgacattttcttttctttgaagtcacttttttctttcaaaggtggaattgaaccttattcaacttttctaacaattctttgccttgcaaaggtgatggtggcatttaaaattccttattaccgtcgaatgcttttttctaagtcctaaatatatatttgattggcaaaaacctttagtatcccatataactcattttattcgagtgctttaaccacgtagaacatgttttctcgtcacaaattgggcattcattgtaccctttcacattgtatctagaaagatttctaaaagctgtaaattcattaatggtccacagtaatatggccttaagattgaattctttgttcctaaagtcatcatatgcaagaatactctcataccacaattgactgaaatcatcaactagatgggctaagtacacatcaatgtcattaccaagctgtgaagggactgatatcaacagtgtaagcatagtgaacttccacttcattaccaaccaaggcgaaaaattatacgttataaataaaactggccagcaactatacctactgctaagggtagtatgtagattgattctattcacacaaaactaagacgcatattcctaggttcattgtcaaattcaagccacctagcataaattattttctaagcgggagagtcaactggatgtctcatcttaccatctaattttctatcactggcatgccaagtcaaattttctacatgagacatttcaaaataaccgaactaaatgaggtattgggggtaagtaccataatacctttgtaggggcacaaatctttacctcgtcagaattctttttcttttgccacctagactcaccacacatgggacacgatattgcgtctacaaacttctaacgatataggatgcaatcatcacgacaagtatttattttttcatatttcatgcttaaggaagatagtgtcttcttctcctcgtagaaagacaaaagcatcgtattaccttcaggtaataactctactagaaaagctaataaatccaaaaagcccttatcaacccactcgtgtttggcttttatattgtataatctaacaagttttgataatttattaaacctattacaattagggtaaataggcttctcagcatcctttactagactaaaatttcaatggatcagcattttattcaaattttgcatctcctatcatttctagaatgtgatcattctcataatccaaattaatatccttaaccttcttagacttagacatttcctcgcccgaaactctaatcttttccccgcggtgaagctaaatcttataactcttgtttattctgttcctaaatatatgctcctttgtcttagtaatattaatactctccatgttaacacatttaagccaaggacaaagaaacaacttaggattttttacattcctctgataaaatttcaagaaatggtcaacaccttttttatactccactgataatctatttgcactcatctaatttttatccatttcaaaacttttaaaaaactatattcaaatattatttgtttgaataagtgtagtaattaattagtaaaattaattaccacacatatataaattttatcctaatacttatgtatttttagtgatatttatctaattctaccaaagttttggcagcataacgactataatcaggcgttctcaaaaattctaaataaccaaaaaaaaaaaaaataagaaacaaaacacacaaacattactaaataaaaaactaacattaaaattaaaaagtaatctacccatccagccacagtaatgtattcgcagacctagctcagtatcgatgaatatttaagatactcaaactcatctaacatgcatattctacccattcgactgtactacaattaatagtaaaatctacttcactaggataaatatctaagatattataactctactaaataaagaatggaaaagttttagtgattatatatttctccaataaagctagctacttttgcgttcttcaatcaataccaaaagctcgatacctataaatgattaaaaataatgacatagattaaattttaaattttataactattatcaacttgtattgatatatatatataaactaaaagtacatatatattatcgagaataaggagcttttctcgaaagaccaccgaaaaataaggaggagctcaaccaagtttggtaacagctaaaatagtaaatgatggacaataaaaaaaaattaaaatttcttaaaatcattacctaaaaaattttaatctaaaactaaattgaatattactgaggaaaataaattattattaattatttttttttgaatttattaaattttatttacaattttacactttattagattttagttacaattttttcaacccttcttatttataaatatatatatatcaaccaaaaatcttttctattctaaaatttgtattcaaataattgttctattactaaaattaatgcctaaaaattaatgcaattcaaattctaaataaataaataaatagatctaaaatacatatgtataaataataaaataaaataaatatatataatacctaagggtgatggtggtgactcggtggtggacagtggtcgtcactaaatgagagaggaggagagatgggacgaagagagagagagaaggagggacagagagtgaatagtggtggtcgcttagaggtggacagtggtggagcttcgataggcaaaaggaaatgagcacaaagcgaatgtgatttgtgggcactaattgcggggacggaggctcaatggtggtctggagcccaagacaccgtagtggaggtggtcgtcgaacgagagggggagagagtaggcggagagtgggaagaggaggagagagaggttccgtgcggttggtgaaatgaatagagtactaaaatgaaaaaaaaaatgggttttattctaaacccgctatagtgggggtgagcaaaaaatccaagaaactgaccaaaccgagtaaaccgaccgtccgaacaccgaaaaaattgaaaacctaaaaaaccgccttcgattaaaaccgtcttaacatggtcggttttagtgtcaatggcaaaccgaccgattaaaccgagaactgaccgaacatatgtacatatttaatatacaatt

SEQ ID NO: 112884 - DNA, 5580 bp, Cannabis sativa
  modified_base (5222)..(5222): a, c, t, g, unknown or other
caaatgtattttttattcttatatataatttttttttctgcatacaaattaaaataaaattaaacatttcttaatacatacaattttttttctttctttgaatttgtaatctgttattttatatattttaatgtgttgttgaagacataaataactataatctattttattttgttgctagttatgtaaaaaaaaaaaaaaaatttataaatattaaataatgtaatattaaaaaataaccaatccaaaataatcgattcaatctgcacttttacggattggattggatttgaattatcatgcggattaaattagattccaaaaattagctccgcactgatataatatgaacaaaatagtacgaattaaattggatgaacaccctacatatatcaatgggataaaatcacatctcacgaatttcttttctgatattaaaggttaatattgctgctcatgaattaacttaacatgctcttataacagacaataaacttttctgaatggaaggaatctcatctaatttgccttttgattttttttttaaccttaaaaaaaactcattttaaaattgatatttaattatagttatttttaaaaaattgccaagtaatacatattgagaaataatccatatatattttaaaagaaaatataatatagttaaatacaaatgaataccactaaaaaaaaaaacaatatagttttaatagaatacaaggtatctacgatttctatttttatcataaaaaaacaactctagatggttaattaacaaacaagaaacctgaaaaagtgaaacatgtgaatgaaaaggtcaagcttgtttttttttttttcataattctattgctttgttgataataagatgagcttaaaaacaaaagacaaaatgagatcaaattagaatggccgagtacaatcacaaaactcttattttcttgctcttaataggaagagaaagaggatgagttggtctcgaaatttcgtatccctcaaacacttgaaaccgatcgaaaactagtccctccaaaggcggatgagcaagaatagagtagtaagcgaataattaaagcaattgaatggcgaaaaatattttatgaacaacaaagctgaagaaagatttagcgaaaaacaaggaactatgtttacacctatttgcgccgtctgtttaccaccatatctggattgcctttcctcatcattgctacaaattcttcatagtttattctaccatcctgtaaaaaaacaattggggtctctagctttaaacacaaggtttactcgaaaaaaggaatagtatggagactgttaagagatagaacttacattgtctgtgtcaacttctgcaatgatttcctttattgttttctcatctcccatgttatactttttaagggcttgctccaattcttccattgtaatgtacctaatatcgaagaaacaacaaacgatttaacctcacctagatgtacataaacataacaatcatccgaacgattgtgggctgaccgaagttcatccaaaatttggtatgttacagatcattagataaaaaatcaacagaaaaggaatcatattttgctaataatggctttcgaggagcttacccgctcttgtccttgtcaaaatattcaaaagcagtgaataagtgttcctctctttccattctattcaagtgcatggtagctgttataaactcaatataatcaattgtaccatttccatcaacatcagcctgaaaatgacatgacaaagattagaggagaatagttgcataaatcatccaaccacacaaaataaaaggtacaaaaaatgaccacaaataagttataatacaaaatatcacaaggttctctaatctattcaagtgtaaagaagataacatgagaaatatcagctttggttcttcaattgtggaacagattcaaaacccacaacaaagaagaataaagtcaactcagtgtcataagatagattccgaaagaccagagacattaccgcttccatcaactgcctcacttcagactcagaaagcttggtaccaagttttggcaaaccggctttcaactcttcgtatgtaatagttccactattatctgtgtccatggatttaaacatttccttcaatcccatgatttcctcttcagaaagattttcagcaattacctaaagcaagaagaatggggaaaaaaatcaaaattaaaagtttaaaaccgtaatgatatgattagagaaactcgtctcaccttcaaagctacttttttgagtttattcattgctctgaactgtttcattctagtcaagacagcaatatcaagaggtttatcagatgcaacaccatcttctctcatccatggatggtctgcattgcattaaattgtattttcagtaagtggactaaatttctaaattaagccaaagaataaaactttagtacattcaataaaaaataagtgagtgataaaaaatatgggagggggagaataataagacagctgaaaaaagtatgtttattccgtcaaccttaaagactgctaaaagaatctagcctagccacttgccgttacaaattggctattcaaatgggaaccagaaatagaatgaacaacgtgaccacattataatagcttttctattgctctcagataacttcatgatataccgattttctagctcattaagatgatactattagatatttttttcttttcatatctggtgtcactacgagtacattatgtagccatagaacacatctcaattaaggcaaaactaaagaataatgaattttgtggttcacataaagagaagtgcagaaaagatttacaataacaaaaagcagctgaatttgtcatctattctttcattaacttaaaaacaaaattgaaccagtgggttagaatgtacttaatctctgaatgaacaaaaaaaccgaaaacagaataaaagcagtaacatttcagttccaaaaagcaaatgatcacctacataacatgcccgtttgacattcaagtttataggtatattcatgttagaataagaagcaaaaattaagaatacctatcaagcaaaatttatcataaaaatctttcttcagtgtggaacctaattctatgttatctattccataatgaaatagttttgaaacttacttaggacgtcaaatgctgatagccgttctttaggatcagaacaaagcattttcttcacaagatctttagcactactagagatggaaggccacggatcagatgagaaatccatatgtcctcgaagaacagcatcaaagatactttgttcattctctgcatccacaataaaaggtgaaaataacaaatgttatgaatatgactacagcaaacaccaacacatatcctaacagtaataacctcaaaccagactaatctcagttcttaacacagcttaaaacatgtaactcgaaatttcgatccttacacttctgaatcagactaattatatactagaacaagaacatgttgaaaaaaaaaacaaactccagttctgaaacaaaaacaaaaatacctccccagaatggtggaacaccactaagaagaatgtacaatataacaccagcactccaaatatctgcctcagcaccataattccggcgcaaaacttcaggggcaacatagtatgcacttccaacaagatccttaaacacatctcctgcaatcatagcacaaaattcaacaacattgttacagccaaaaaaagaaactttcaatctataaatgcatgaatcctaaaattaaaaatctaatctttaatagaataagaactaaacaaagctaaaaagccaaattagaatataacccacattcccaaaaaacactcaccaggcttgaaaaacacagaaagcccaaaatcagtagccttaagaggcgagtcctcatctttactaagaagcaaaaaattctcaggcttcaaatccctatgcataacccccatcgtatgacaattatgaaccacagtcacgatctgacggcagagattagcagcagctcgttcagagtaatgacccttagcaatgatccgatcaaagagctcacctccagcacaaagctccataaccaaattaacagagtgtcgatcctcataagcacctttaagctcaacaatattccgatgaccagtcatatgatgcataatctgaacctcacgccgtacatcttcgatatcatcgcgattgattagcttccttgctgcaatggatttacaagcgaattgttgcttagtctccttatgggtcacaagataagtaatcccaaactgaccccgacctagttcgcggccaaacacgtaggttgaccggacatcctccatcggccggcccaacacgcggccgactccggtaccagctggaccagaagaagaagaagtagatgagactggttttgggtttggtaaatgaggtctttgtctcggaggtgaaggtctagcatcgggtgggaggatctgaacgccgccgccattggcgccggaagggcgttggttgtgacctgggttagctgatccgccggaggattgacctgaactgcatgagttgcccatgggtgtggtcaacggaggtcaaaggagagaggtttgataagagttggggctgtttgggtttgtcaacggtggtcggagatgggaatataaaagcgggttttgtctgaaaaggattgaccttgactttatttgaaattactaaaatgggcctgtgtaatatggatcccggatttggttcttttattttattttcatctgtatctaatctaattaataattaaatttagaaaataataattagtatttttatcttcttaatttttggcactatttaatttcatttcctaaaatatacgatttattaaaaatttcccctaaaatataatagttatataatgagtaaatactattttggaccctgtgttttacaaaagttaccaattagacctgctattttgttaaatgataaaatggacactgtattttctaaaatggtataaataggacccttaatttaattttgacaacatttttttttaatataaccaacttgaaaatacaaacagatttagaatatgtaaacagttttgtcataacacttttagatagaattgttattaaattctattttgacaaaaagtgagttcagggtcctaattttaccattttggaaaatacaggctccattttgtcatttaacaatacanagagtccaatcggtaatttttataaaacacgtggtccaaaatagtatttactcttatataattataccatttctattaggttttgtttcttttaccgttaaatattagcatttttaccccttgaattttgaccaatataaaattttactctcttttattaaaaatataattttaaaattgtaatgtttttattttttgaaaaacaattataatattcaaactttactgaaaaaataataaaaattattgaaaaaccaaataaaaaataaataaattaaaaaatattaattttacttaaaaaacttaaattattcgtaaaaaaatattttcaaactttattttatgggtaaataccatt

SEQ ID NO: 112885 - DNA, 934 bp, Cannabis sativa
  modified_base (32)..(62): a, c, t, g, unknown or other
tttagaaagttcttatttaggatgttaataannnnnnnnnnnnnnnnnnnnnnnnnnnnnnnaaaataatttccaacactcataaggttcattccagataggcttttctttattctctaagaagctctgagcaggtttcatattgagatggaccacaaattcaagctccatctttggccttctgtccatgtatccgttttggtcatgctcaagtttcatgttcgaacttcaatagcatttctctcctgttcatggaggggggtttcatccaggagcaactctccttaaagcaactctcccttccctatgccttcttttgttctagagctctttcttcttctactcttcttctagttgctccattagctaaaagattccctctgctcgttctattacttctatcatcgtttttttggctttgagagtatgagctactcacttagcaaggataattttagcaagttcttagtgaaataattagctacatccttgggagtcacctcaatcacttggtactttatgtttaagaacctctctaagaactgttgaggatgttctccttctttcttttttgtgtggtagaggtctttccttttttttttctcttagcatttcccccgtacagtgtagcaaatttttgtgtgagctcatcgaatgaattgatggatccttttttcaattatttaaaacataacatagttggtcttgttaaggttatggagaatgccttacatctgatcgcatgattattggtttgtagcaccattattttgttaaacttgagtaggtgctctaatggattaccttctccatcaaacaattcaaaggtggagttcatgaactctctcagctttgcttcatgttaggttataattaacctatatttcgggtctttaaagttagcattatctcgtctattggtgtcttttggagc

SEQ ID NO: 112886 - DNA, 3094 bp, Cannabis sativa
ctggtaaaagttacttttaccaacacagtagcgaattatgctggtaaaagtgacattttttgtagtgtgttctgtttcttttattaaaccaataaatgtcattggtccaaactaataaagtctgaatttttgaacttattctcaactttttttcaatgaattatcaactcagaataatctttttgagaaaccttttctagttcttggatggactttattgataaattagccactgagagttgagctttcatgtaatatttagaagatataggtcttcaaaatttatgccaagactttagggaccacaaagcaaaaagattggaattactaccacctcacgtgggggtgggactggcattgatagaactaaaaacacaactacttgctcttaagataagtgtagaccacgactcaatccaaacaaggtgtcaagtggaactacaagtatctataacacaaaacttttcaaggtgagctacacgctctgtagaaacacgtgtagagagagatattcttgggatttagtccattttctagagacatttaactttggtgtgtttgagagtcttcttgattctcctctcctctgcaaccgatcaaatttttggctctcaaattcttggtttcttgttgcaaatggagaaaattaagggaagcccatcggagatcgacaggtttagatttctgggtctcaatgcttttttcttatttatttgctaacctttatgcttagttagttattataggtttgttctttgttcttgtactcatagtatgtaaacggattgggtcgttttaatgaaaaaggttattactaaaattgttgtttttttggtattaaatgtacgtacaatgtcgagtggtgcagatcccgcgctttaagataattatcattgttgacactaaagaatattatggactatcttgtgtgctttgattttttttttgatgatttcttgtgtgctttggtttgagctctaaagaattttttcacttatgaaggaagtgaagtattacacatgtttgtaaaaatgttcttttcagctatgctgtgttcattttgtgtaatgttcttataaattttcatatgtttcttatttctttcattttgggctctttttttttttttgttcacatgatattttaacaaatttgtattgaattttctattgaagcatccgtgtcattagtgctctaaacactctcaagaagagaaaattgcacgcagagcaattaggcttgcctacatcaaagcataaatgttgggatcgagaggttgcttctgatggacagctctccatattcttagccaaggaaaaggcaaagaaactaggcatggatgatgataagtcctctgaacctcccgaatcggtgaaagacagcaatagtttcggtgaagattatgactgtgcaacatcagcatacaatggagttaataaaatggaagcagcagaatatgaaaaggcatctgatatgccttcatcttcttctgtaagtcatggcactgatcatatgttggaaaacaacaagtctctttggaacagtttaaaggcagcgaaaggcgtcacttgggaagaagagaaactcgtattcgggcattattcttccgaacacaaagagagaatgcaagcatgtcttaatcttgaagagcagctcttagaatatggagatgaaagctttgagcaatgtactgataaggaacttgaagatattctctctgctgaaggattaaaccccaatgtgtatgtgctttcatctgggagatggactgtaaatcaaggtaagtaaaaagatctatagggaccccaacagatcttagaacactgctgattgagaaatggttattgtaattttggattcaatttgtttatgtttgttattgttttgaatgcagagactgaacaagcgagtaggaaaccaacaattgaccaagaatttgaggagtatttttcaacgcttatgttgtaagtaaaggcgaattgaatctaaatttgaattgtacatatgaaaacttaaataaattagaacgaatttctgaatgaagtttctggctgaatcgcggattatgtcgctttctttaagatttctcggagcccttccctaagtgtgtacgacagtctattgatcacgacgtcctcaggataaaacaagcatcgtatacgaattgctcttgcaatgaacaatagtgctctattacactctaaaaattgcaaaaaaatgtgatcgagaaagacgttggttcatggcaaaaaaatgtgaatcattgattgatcgcttttacttttttcttaaattaaacctttataaaattaattgaataataaaaaaatatttatcttattaaataatttttcgattaaagtaaagtgagaccacaaaaacatgctcgccagcttagcttggtcggctggacgatgacgagcttgtgtggtggtttggtgtgtgagtcctcacccatgcatacaaaactcgacattccttggggccccaactcaagtgccaaaattgcaccttaaaaaacgtttaactcgcacaatgattttgttggtttggttgggttaacccgtccaaactgattattattttttatttttattattattattagttttttgtgttcaaataattgatttgaaaaaataaatgcatatatattatcctaatttttactcgcatgacgtgcatgtccacgtaggcagaattgatgccgtgtgggtacaacatgtcaatagataagcagaatcacagtgcacaacttatcaataagggaccaaatgctagaacaggacaaagttacaatgaaatggctaaccaggagggtctgggaccacccctggtcggccaatggatggcatgtgttggccaaccctaagacaaagggtaggcttataacaactgttagaaagaagcctgttcgattggtgtttctgcagctttcaccttggacaaaccacaacttgttttcagctacgaagccacttcatcaacccacgaccaactttaagctttaactctcttggaagcagatattcacaagtttcaagcagctgcagtgaagaacatacatggtcagtagacccagaatcaacaatcc

SEQ ID NO: 112887 - DNA, 807 bp, Cannabis sativa
ataatagaataataactatttatgtgttgaaaacacgatatagatatatattgtataattatttttttggagtgtatttttaatttttctatgtttatatatatattttttgagtggagatagtttttaccttacgaataattaacagtgagaattaatatttaattaattataataatagtgatataatattttataatattttgctccatgtgcgcagcacgtataactttcactagtaataaaaaatgaaagatggatgcaattgctacaatgctactatatatggtgttaatattttactgcacattggagaagatttcctagagcaacttcaaatttaagattatcttggagatgctcttataacaatttattatagaaggctacatttcttgtggaactaaatttggtattcaaaaaataggtgctcgatattgctatcaataacaatgttatgtttaaaaagtttttttttttttttattcaacacagccaagcacaaaattatattatgctttgataaattgaacggctcccataccttattagtcattactccaggggatatgagcttgaggaggacacaaaaccaaatatctcttgtatgtagtatatgtagtacaagttgaattatccattttaaaaaagaatgtatttgttatataataatataaaataatataaagtagatgagaagaaagaagaagaatatgaagagaggaagaaaaagtgtatgagaatttccgagttgtttattccaatggggtgaactcctatttatacaaatacaagagtgaaatatta

SEQ ID NO: 112888 - DNA, 5271 bp, Cannabis sativa
atttattacttcacataatgagctttaccctcgtcattcaagagctgaaatcagaataagtcacaaagacaacaacaatactagataaatcacctccactatgaaacaaatgttggttgaagctcatataaaagtaatgacacaacatatgctctctattttcaagacctggtatgggatgaagttaataaagcaagtatatcatcagaatagaaagatttcaaaatatttaccttgcttcttgtaaatcctgttgcttcattaacaaaaggccatatgcaaaaagaacactggttttctctcgaactccaacaaaggaatccatcattctgtaaactggtccaatcagatctagtgcctgcacaaaaccttgttttcagggataaggatatatttttcattttttagctttgaaacaaaattataacagctaaaagaagaaatcatatgggtgtcacagtgaaacacttcacctgtgatgaagattctgcatcaccaatgcagatgtaagagacagccgcataaacttggcaaatggcttgcattgatttgctctgtgttagctgaatataaagaaagaaagaaaaaaaagatttagagtagattccttgacgaagttacaatagccagtgattcttagtacttgaagaaaatgttccattcatcaagaagcaaatcgaaatcactggaaatcataaaagaatccctttgcctaatcagagtatgaagattggataatggtcggttgacatctctttaaagccaagactggaaaactgtagaacaattacctttgaagcttcgatataatggaaagcagcttcgctatgacacccaacagaatgagcatattgccccctgagagtctcaattatgctctcacaagtttgtaaaattgttggaaagcgcatgaaccagttcctcatttgaatcagtgcctatcagaaacaatgggtttaattcataacagggtggtatatcaagcaagaataaagttgcatagcaacatatatagttcaattaattatttctagttcaaacaattacataacaaccaaacatacaaactgggaaagagcataaaaataacactaattagggcatagcatctacctcttgtgcctcaacaaactcagaccgagtaagatccacaaccactttgttttccaggaattgcattatcaacatcaaatatacacccgccatccaaatggcggagtgttgcaaattcacctctgttgagttaaaataaatatgatctattaggattggtgagccgcatactcgtaacattttaatcattaaaagaatgcaaatcttacctctcacaccatcagttattccaagctttgccagttcctctgcaaaattaaaagaaaaacaatactaacaaatggataccttatattatgaaaacataacaattcagaatccccaagatgatatcgctgatgatgatagaagacctcattcatacatcacaagcatcagaattaatatagaaaccagcactctgaataaaaaaaataaaataaaataaaaaagcaaagcggaaaaagccttatcatgcattctacttatctgaaaataataataataaaaaagatatggaccttttatggtacgcattccagattgaatacgtcttccacactccctaaatagcccttttggacgtccaaatatgacaaccataagattaacaagagcatatactgcactttttggtaaccactccccatcaataggtggcggtgccaacacaagcttgtccccataagtccgcttcatattcccaaagtaagctggttccagcgatccagttccagtttgatcattcgaactagtagtcaaacttgtcaacctctcttgtagctgagcttgcttttctgaaagtgctgacctatctcttttaggtagatcagaccgagaaagactttgattcaaggaatcaagttcctttgtcatttctttgacctgctccattttctgtgaatcagccttcacagcagcatccaatctgtctaaatgtggtgcagcatttttgtaatcacatatccgaagtcgataaaatatgtgcagaagctcattgtaaaagagtaatccaaggcagtgttgtctctttttggttgttgaggagataacaatatagtacaagacagaacaattattagcaatacaggaaatatttgttcagacaaagtaaaaaagccaatttttcccagttgcataacaatagaatgttaaagaaaatatggtacatacattttctggccgaatagtctcccagatctgatcacattgatcaacagctgcctcaactaaatccatatcatcccattgcatgaggtgcacgtgcaggatagaagcagcaaagaacatctggatcacataacaaagaatgggaaattgcaaatattattacaaacgatgaaactcagtccaaaaagaggtttcattttcttatcttcctttcttatttatggaagagaatattagaccttccccttcttacatacctaacggctgtgtttacaaatccgtaaaagacaaccattaagagaagaggtttccctccttttaaaatgtaagcaaacgaaataaaatttccatacttgtcttagtttttctggttcatttccaaaccttttcccttctgaattttattttattatgtattaaacctgcccattgaatcggaattacagattccataccccgtgaaccataccaataattggtacttagtgcccaaaagaccaatttacagcataaatccagaaacaacgaattttactaaaaaacagttcaaccagaaactaaatgcaactgctagaaagaaaccgtttatgcacaaacctgtaactcgggataacttatttgagaagcgcaatcataaccgcactgaagagccgaaattgaactttgaaagtctccttcaattatcagagcattcgcaagctgggtgttaaagttgcaagaccacaaattcactgagatccttcaccaccccaaataaagaaaaatgaaaatttcaaaccccaattcatagcaatatccaagtaaattcaaatctaaaaacaaaacaaaagaaataagcctttacgaaagacatactcgttgccagcagaagcagtaagctctaaagccttatggagaacctgcttctggggaggaatagtaccgacgagatggtaacattgactgagcaaactataagctctgcacttgagatcgaaacaagaagggatgttcttgagaagcaactgagatcgttcgaggtgagacttagcgtgattaacattatgagaatgcttgagaagtaaagcagcgattcgaagacgagtcttgacctcgacgatggggaagaaggtgacctgactctggcaaatggcttcgagacacttcacagctttccctacctctcctttcttctcgtggtagtccgctagtccccaaagcccctctgcaacggcttccatctctcgctctcacactgagtctcactacttctccattgaatttctggaagatgaagggccctgcttcctgcttaagactataaattgaaattgaaattgaaactaaatttaaacattcattttattttcctttatataagtcgcagcattttcaagattttagaccttcctaatttaaaggacgttttgtaaaattaaccttttttttttaaggtccactctattgaaaaatttaggggttttttttaaaaaaaaaatactaaattttgaggaaaagtttataattttactgttagaatttatatttatattggtctccctttttttattttttgtactgtaaatacaaaaaagaaaaacgagatctctatcttttacactcacagacagaaacaccacagaaataccagaacagtcggaaaacaaccattaattccgacgagattgagcaaaacagagagataggtggttggaggaaaaataagactgatgcttggagcagagctcttgtttgaaggacaaaacactaaggcccaggacaatgtcaatttgggtacctgatgatgcctgggagataactcactactcaaaaagtattttctcttaattccaagtctcatatcttgattttggagcaaaacaagattgttgcttaaagacagaattgtaatcgaatcaacgaaaccaccaacggggtgctatgttaacttgggtgcctaatgattggggtgatgtcaccttgggcgcctaactttttatctagggcgtagatggcttcatttgcttcccaaaagcacttgtattttcctcgtggacaaaaataagggaaattcctggataatttctctagaaagaagtcctaaagtgccctaagttgagatatatcaacctaggcgcccatagtgacctcaaggcatgcactgagcgcgcaggtgggggcaaaatcttcaaaattggtttcattaatgctcagtcttttgtttgcaattccaggaatcaaagctcctgggccaaatgaatttactagttgtttctttcaagataactgggaattacttagagatgacattagtgaatcggttctcttgttcttgcactcaggtcagattctcaaggagatcaacactattgtactaacacttattcccaaatggaagtgccctaatacagttagtgaatttaaacctattgcatgctgtaatgttatttacaaagtggctactaaactaatctgctccatgcttgaagttatcttacctgatctagtagctcagaatcagggggatttattacaggcagatttattgcacacaatatcatgatctattaggacttgattagacattatggaaggaaaagttcaaaagctgggtgtatgatcaaattggaccttcaaaaagcttatgatactcttgattgggactacttggaagaaattcttcaagcttttcaattccctagaaaatttatcaagctaataatgatctgtgtgcgcacacctaggtactccctcatgttcaatggatcacttcatggatagtttgaagggacaagaggtttaaggcagggagatccaatgtcactattactttttgttcttggtatggagtatctatcaagaataatgctgaagattggatccaaaccataattcaaatatcatgacaggtgtgcagaattgaagttgaatcatttgatgttcgctgatgatgttatactcttttgtcatggtgacttctgtaacaccccgatatttgccttactttacaaaaataccattttaaatgca

SEQ ID NO: 112889 - DNA, 5324 bp, Cannabis sativa
agttcagggggcatgatttggtacttgtcaaagttcaaggggcaaaaatcctaattagcctttatttttagtccatctgtctatacaattcaattaaactaatgggagaattacatccttttcatacctctacaatatcatattgagagtgttttcaaatgttcgttactgtacattagtgttctgagatagtgtacgatgattgtgttgttttattcttggggtgtctacttgcactagacaatgccacaaatgtcttaaggagagcgaactaactcgcgactcaacccataattttcatccggtaatatcttgaaagctgccattaatactgtgttgcgaccaactttttctaattgtatttagtcttatattttgatagatgtcaattaccaatgaaatttgttctgacctcagcccttacgttagttatatgctccaaaggtggttttgtagacctttttttttcaaataaaataataaaggagaattaccctatatactattttttttgactatttttttaaatttacggtttggatttctaaaatatttgcagcgctagttgcaataggggtttctatacaattttttgttgcaataagagtttctatgtagaattccgtcaaaaaaaaaaaaaaaaaactaatttgaagtgtaaaaataaaaatacaccaacaataaaatcaaatcactatttccttaacaatcttacaaccttgcgctgtcaaggaagcatcaatagctaatcattatacttaatcaagagattcgcaaaaacgtcctagaaagtctttaacacaacaagtcaagttaccaaaaagtattcaccaaaaaaaaaagttaccaaaaagttaagttacatgttctttgtttttttacttataaaagaacaacacgaataagtaagaagatagtagtgcttttaccataaatatgaatttacacactaaggcagccggttccagcaaacatatcagtagcattgggtggtttggtttattatgactctgaagactagagcagccgtgagaggtactttcacaaatttgagtatgtatctcaaattcgtacccttttcacatcattttcagggacacttaaatcatttcctttcccgccaacagacgtttgtccttggacctggagaagagatgcaagtattgtacaatgtcatttattttatgaacagaaactgaaaaatatccaactctctacttcatcttccccctctcaactcctttcttctcttttatttgctatgagatatctatgcaaaatgcctatgttttcacaacacaaattctaacctttctttcccattttacttcctaagaataccaaattggagaacttactttctcatctggaacaactgcatatctttctgaaggtgagacccagattttccctgtcaaatatgtaaagacatgccattcactttatatcgaacagaaaaaaaactcatgaaaatagacattaaagatacttagacaatgtggaggtacatacctgatgatggatctacttttgaagattctatctgctgtccattatatccatcgacactaagggcatctaccatctttggagtattcctaaaattttatagcacccaggggttagaaatgtgaccaaaatattagcagactctgaaatgtggtctcgtaaattctactatagctgtttatatacaataatacaagtatatataagttgggtataattggtattctaaaagatgttgtaaacttcaatttgagtaactgatttataaagggcaccctatgagaggctttatactccaggaatggtcattcaagattgtaggaccgtgaaaccatgaagcactgttgataagacctttgacacaacctaatactagttaagttgacctacaaagctcaagttggctcatgcacaacaaactcaagatacaaaacaaagttgcagtatcaaagagagcatagagaacattaccaggacaagtaataacctaacaagcaccaacaaaagaagaattgatctagagaaatatcaccaaagatttaatatgttccttttttaatcagaaaatcaacaaaggtagaaaaaattaagtattgcatttagttacagctctgccattgttcctccaaccaaaagcactctaccaattaggaagaccaaaataactagttcatagattaagaatcacaattctgtgtcaaagagctaatgttgactggacagcacaccaagatggagatgacgattaaataaccttttaccaattagctaagcaatggcttagaaatagaaggtgagagtgtccaacagcaggacagaaggattatcatgaagagatcaaatatagcatttgcaactgaaaacccacaaagcctcacaacaacactcatatcaagaatttgagacttatttataaaaggaaccactcaacagaaaacagagtagaaacaagattcagatgtctggaccctctaccattcagattacaaaagaaaaacagcgtgactggtgaaactgctgctaaaagagataaaaataagatagtttagttttcacaatttttaaaaaatgtcaaaactttctaaattataaaagttatgagatcaagtaagaggtatcttggaagaaccttttatagttctgcttacatagcctatcctttagatgcattcaacttcttcccgttttctattgaatatgagtattttgaccaaattacacccaagacatgaatgttttacttttccttatatccccatgtcctatttttattttcatagaaacacagtaagttaccaataaaatatcgcttgaattatagcctagaagctattaacatgtcctattaactctaatggagctttcctgaaggagctggtaaaatttaaagtgggaaatggtgcaactattcagttttgggaagatatttggattggagaaacaacattaaagagtcgctttcaggacctggcagtggtttcaaaggcgaaaaatacgagtataaaagatcttgttgccattgaaggagaggtaggaaattgcgttgcaagctggaattttaagtttagaaggaacttgatggagaaggaaatgcctaatcttatggtgttactgcaactattggaacatattagattgctcaatatctcagaggatatcagagtatggaaatcagatcctggtggaatgttctcttgtaagtcagcattcaaatggtttacttcagaccataatgttggcgagttattttggacgaagaccttatggaaaagaaggtgtccttctaaaagttaaagtcttcggatggttggtggcattaggaaaaattaatgtgcatcctatgatgcaaaaaaggcgaccatttatttacttgtccccgggatggtgtgtttgttgtaagaaaagcagtgaagaagcggcgcatttgtttttggggtgttgtcttgctcaaagactttggataaagctgctgaacgtctttgagatccaatgggtatttcctgaatcagtccctctaatgatggtgagcaaggtgggggtagtaagagtagatcatgcctatggaggacagctgttctagcaatcaattgggttatttggctcgaaaggaataacagaatttttgaagggactgaagcttcagctgatgacttatggaaaaaagtcaaattctggacagctgtttgggtttacaaaactaagagttttgaacatttttcgttcttagatttacatagagattggagattgctgagtaatgttgcttaatagtacctgaattgttttatgactttttggactgattttattttaaatattttctgatatagcacttgtaaccatggtattcgtccgccacaagtgaggttatctatatataacgggagagggtcagtcttagacaaaggcctctttctctttttcaaaaaaaaaaattatcaaggcagttaaccacccaaataccttcattttcaaggctacaaagatttccatatcaatggacatgaattctgtgtttaacttcttcaacaaagatttacaagcaaatacctttgaaatgcccaggttccaaatccttgagtcaaataaagaacaaaagtgcaacatctaaaagaattttttgaatttggaactctgtacaatgatgggaatctattagaaaaactcaaactccccagtccccactcataaaccctcccaaaattgaattctatctctcatacctggtttataagtgacataagttgagactcaaaatcatcctaatgaaatgaacttccacgagctcttgtaactcagtgatcatacaccaaataaaaaaaaaaaaaaaacacgccagagatctgttacgcactaggattaatatggtgtgttagcatatattaaacaaaagagtaattgagtctttgtattgagggtagtgttttggagggaatacaatagtatatatagaatattgaggggaattggggagtatgcattgtattgagtaaatctctgtttgcatcaaagaggcctaagggctcccatactttgtaattgcgtttctcatacattcaacatacatttcctactgttttgctactgttctactcctattattgctactgtttcattgtgttcttgagtttggagttctcggggcttatcaattggtatcagagcaccgattcttcggatgccgataataagaatggaggagaaattagaggaacaatggaaatcagagtcttattattatcattctgaatttaatacactggaggaccttgcgttgcttctggatcaagtaattcttgggcaagtaaggttactccacctcgcccgcaacctccgaagtcatgtcgcaacaatatcggaggacaacgatctcaatgagtggatccaccaagctgtgcaatcagtatgggttcgcaaccaagaaggaatccgaaatcgctacgcggcgaacctaatttctggaactccttcaacactagagacgtatattgaaggtgataaagagatagaaatggcaataagagaacacaaacgagcctttgctagactcgacagcttcagagaacacaaatggcaagttcaggaagtaggaccatcgattccaggagtgacacagtgggtgtcagatgttgacggtgatgaggcagctatacaatcggagctcttaaatgaatattcccttccatctgtggcatcgcctgagatattcaaagctgcgaagatcatctccaatggagaagaagataaatggctagagaaaaatcagcagcgagattcactgcctgagaggaggaaggaagaggcgtggctgctgg

SEQ ID NO: 112890 - DNA, 2292 bp, Cannabis sativa
  modified_base (2242)..(2261): a, c, t, g, unknown or other
tttaagcgtttatatattatatcatgttttacttggaactcgaacccaggacctctaatactcacacacctatttacggccacttgagctaaccccaagtggttagatttaaaaatgtcttaataagtcatctttgccattatcctagctaaaaaagagataaaatattttagcttttaggtaactaaaataggtaatgatgagcatgtgacattgactacactaaaagttaaaattgtaatggaaaagaatttatatattggtttggattagtgtggtggccatcttttattcctagttggatcccatccgtccaatagatactaataatacatcaaagtttttcttttcttttcttttcatttctacaacaataactatttcactcccatttcacaattccaaaaacccctctcttctaaaagagttttgagctctaaaacaactgattaaactaactcattattaactgaaaattgaatctcatctcaaacccatatcgatgcaatctgggcctgaccaaatcccaccaaacacggcccagattcttccattttaatcaaactcaaatttattattattattattattaattaactaattaattaattaaattttcatttcatttctctctttctctctctttagtctttacttatgttcttctttagttcttcttacaaacaattaccaagaaaaactgaatcttcagttataaattagttagttatgtctgagatgagaaggagtagtggtggtattattagtgggcccaacaaaatagacagcccaccggttccgaaaaggtccaaaaccattgccggtgatgggcccaaccggaggcccactacaactcaacccttctccgccgccagaaccgatctgcgcgtggtaaccactcaccacaacgatgatccaccttcgaatcgtgactggttctacccttcgttcatggttcctcaaacaacgaagcgcgtggttcacaaactcccttcctcctccgattcgcgacctcctcatcggatctctgctccgtcgtgtaagaagagtgagaaggtgaaactcgttcctaatcgttcttcttctactgagtcgactcagtctaagccctggtgtagtaggatcacctggattcggaagctgaagttcttggttagttactcaatcactcactcaaattttgcttacatataatataactatatgtttatatacactgatgaatttaatataatgggaaaagcaatgaaatattaattggaaaaaaagtaaaaatcaagctaatctcttcttaaaaattaagaaaattctacacattttattttgaatctgtatatgtgtattatatatataatatattacaatatacattttaataagagaaatatatgtatatatatatatatattaatttgtattttgtgctgttttttttgttaatacatgaaactacttttatgtcttttcagaggtgaaattctacactaatgagcttaatagtaagaaaaaccatgaaagattaattggagaaatatagaaaaaaatcaaactaatctcttctacaaaattaagacatataaatagcttattaggatttttcttgaattattgagattgttagattttaaaatttttgtgtaattttattcaattttactaatgtgacgattgtcgatatactaaattgtgccctcaaaagactttgacatgtaccaaattttattctctaaactttcattcatgtttattagacaaaaattcttaaatttaacaatttcaataatttaaagagaatttttatcgacttaaaaaattcaaaaaacatgatttggtacttgtcaaagtttgtgggcaaaaattttaatagcccatatatatttaaaaaagtgaaaaacttctttaactaggatcttgtttattattcaattatgttaaattagcttctaatctaatatcctaatatgaaaatcctaaggttaagaaaatctacatagtttttcaaaatatcctaagtattgtcttgatatgtgtatgcaatcactcaataccaagggaccacgaaatttaagggaccacgaaatttaagaaaaaatctatgacaatttcaaattacactaaagaaaatactagctctctttctctgattctatttgtttgacaaaagtgagtcaaaatgtgttatgaggtgaagagttatatttaggctaattagcaatttttctctccgaactttgacatgtannnnnnnnnnnnnnnnnnnnttttttggctgttaaaaattcttcctgaact

SEQ ID NO: 112891 - DNA, 1466 bp, Cannabis sativa
  modified_base (41)..(64): a, c, t, g, unknown or other
  modified_base (1429)..(1434): a, c, t, g, unknown or other
caacatagaatgatttcttatcttttattaattagtaaatnnnnnnnnnnnnnnnnnnnnnnnntttagggcagaaaacccaacaaggaataccactagcattacggattgttacttgcaactgcagcgagcaatctcttctctggtgaaccaaccgcccacacaggtaacaaaaattaccaaatttttttatatttaacttgcacctagcaaccattcatcagtttgaagaaacaacaacaaaacaatgggtttttaacctcgatatcaacttactctaatctacttgttcttggaaacaggtttagattcgtccagctcaatacatacaaccttaccagctcgagctcccaacacatttgcattaactctggaataataatcatgtggcaggttgtgtatttgaatccataaacggattgtgtcaaaggccaactctttgacaccaaagctagaagatcaagaaagaagcacaataatctcccctttgatgcatcaaggaccatgctccagaacccgtttcctatccgacaccttttcaaagctaaaacagaagacattagaaaatgcttcgtcagcaaaaagggcatcaactttcacctgtgtattccatagttttgcacaaacacttatcacttccttttccccaaagatgaggaccttaccaacaaggcaaaaattagaaaggacttgtgctaaagatgcactaggggcgagagaaatagatgcctcattaaatgagatacatctacctctcttaacccccaagacaatcaataactccctccatattaaagccagccaccaaacaaagacaccagataaaacacatgtgacaaagactaacctacacccaaccccacagaccacaggaaagatggaaaaacaagggacacaccaaaaaaaaaggtcaactcaaaggaacaaaggaaaagccaaagcaccacacacaaagcaagagaaacaaacatacaagacacacgacacaggggaagctaaagcacgatcaacacaacaaaaggtatggaaaagaagtgagaagacaaaaaataccaagactgagagaatagtagatgactattctctctattagacagagagaattagttaggttggttattattctttggtacaacccattctgactatttccagttaatttgctaagcttaagttgtgtttagctacatattgtacttaaaaggagcattgaatccattttcattaatgagaaattcatttacattcttcgttcgttttctctcaattcaacaaaaagtattgaaagtaaaataaaatataaaataacatcatctcaatataaagtaatgtcaccacaaatattaaagaaaagacgtcaaaatttttcaggtgtttttgagaaaacagaaataaaattgttaaaactgcaaaattccaagtggggccnnnnnncaccatggccggccacttggatagcttttttc

SEQ ID NO: 112892 - DNA, 6853 bp, Cannabis sativa
atggtgaccttgaagtcactcggccttggcaagaagaaaagtcactcagccatagtgaccttgaagtcactcgaccatgacaaagaataaagtcactcaaacatggtgaccttgaagtaggggtgcacatttacacccaaaaaaactacccactcggcaaacccacctagcccgaaaccttaaaaacctaaaaaaatggattttaattttagtacaccaggcttgggtgtaacacggttctgtatcaagtcaggttcgggtttaatatttttcaaaacccaaaacccaattatcattttttattttttatgtatatatattatataattatattatatatatgtcttttttttaataataattttgttagtgtgtgttaaattggtaatgtgttagtttatgtaatatgtacatataattatatgtaagtattttttttttttgaaaaagtaaaaaaaaaattagattgtgtgtaattaatgtatttgtgtaaaatagaaattaataatacattgtattattgtgtataattgtgtattgtgtttgtgtatgtgtatgataataatatattgtataattatattattttttagttttttcctgttaaaaaagagatattaaaaaataaacctagcccaacccgaaactcgacctaacccacccaaacccgtcccaacccaaacaatataaaactcttctaaatgctcgttagggtcttcaccgagaaacccatgaaaagatggcagcaagtgaataagggttgatttcagttcaaaattaacatccgaaggtggataatggatgcacaatgattgttggtcaagatttggcgcgaccccaactcttttagcatcctattttgagccatggtcttgtgagaattgaccgagtcatcagaatcaaactctggatcagttgatagtggctctttcacaggaccaagagattgaaaaagtgggttgtcggtgatattcttcaatgatcgagaagcagatgatgactcaagatattgttttacccttgatagtctctcttgagtcttgtctgcactagacatgtacacctgtgatttttaaagtgaaaacaagttagtaaaataaaaattaaatatgaataataaaataaaacaatagtctctagcaacggtaccaaaaatttgatgtgggtcgtatatccaatcaaatttactattatttttatttcgatacttctaattattttagtataaatgtaagtaagagtcgatcctacgaagactatgcttattaaattattcaataattagtgtcaagaattagaaaatggagttttaattatgacaataaagtaacataaattaaaaagcaaattaaatgtgataaatagtcaaaaggttattttccactgtcaacaatcattcttaatttttaataatgaatgtaattttagatttccaatcaaattattaatcttgcatataattctaaaccaattaattatcccaatctctctactacatgtattcaatgcgaagcactcaattattaacttttttacctaagcactaaattcacgaagcatgtaatttatttaacttagataaaactttaagtttaatggagataaactaatttaggcaataaattaatgaagcatataattcatttagcctatgttctattcttcatcacaattgaaaaaacctttgataatattagaaattacaatttatcacaaaaatttagaatcctagactattaggtgaataataatcctaaaatgacaataaattaaggtaaaacctctaaacaagattaatataattaataattatgacattaaatattgaagaatagaagcaattcaatataatggaaattaaaaattaacattcatcactaaaattaaaaattcatgtttcgagttttgaaataacccttaactaaaaagaagtactcggaactagacattataataaaaattataataaatagtaagagtttaaggtgaagaaaaaaaaaaactacaatgtagaacaactaatgctgcaatctccgtcttcttctttctctctctctctctctttgaatttctctctcaatttcgtagttcaaatgtactaaaattcgtgccctaaaagcctatatatagccctaaaaatatctcaacttaaaaaaaaaagataagattcaaaatttcccaattcacgcatgctcgcctctgccatccacactgcggcgagagagacctgcccaaaaatttttttgcttgttgcggtgagcctccaaccttcgctgcagcgacaacccacgggttttgagtttcaatagactttcgaaaccttaagaaaatgtcattttggcacgtcatttcatccgctaacatcacctagtcataaaaataccaaatctatttttttttactcataaaagtcaattttctcccaaaactcgaataattcataaaatgatgaaaaacactaaaattaccaaaaaaacaacatcctctaactatggagaaatcaataaatttagagcctaaaaaactttatcaatagctttgggaataatcaagcattagaattttttagcaaactactttgttgatagataactagttattcaaagtgagcattttaggtatctatttatagtgtttaagatcacacacttttaaatttatacaccctacacctcattactattactatttcttaattgggtgtaaacggacttaaataggtaatttgaaggttatgagaggtgttaaaaattatccccaaacattcaaatgttgactacataaaaatacagtaattggttactagttacttacccattttttcagcttttttcaattactctccaaatatttcaaatcattctcatttaattttatatcacttatacacattgtaaatgataaaataaatcctcaaacagctataattctattataaattttaatttcaatgtattaagctatgtaatctctatatacacttaattaataatattgtgaaagttacaaaaatgtaacttcacctcatacattacaaatatttaaattaatttgttacattatatatttaatgtgtacaatatatattatttatttaaataaataatatagcagaaacatcattgaaagcgaaaaccaaaaacagacaagtctaaaacatattaacaagtgaaacgatgaaaacctttatatgataaatatttttttgggtagactagcttcttacagcaagtgatgtgaaacgttgaaaaatctttatttgagaaatatggtgtaattcatagaggagtaggagagtaggagtaggttaaacgaaacaagttccgggtcaaaaacatagtgtctgtgattaattggtccaaaaggtacgaaaaaagaatattaatgtgagattttccataatcataataagttgcactgaaaagaaaaggagtagaagaattcaacaaaaacatggatgatacatctgaactgaacaaagttatattggacagatctacaccaacctaatttggaccatttatcatataactattattaataatgcgctggatcaagataataaaatacataactatcatgtcaatcgggtcggcgcatatgaactaaagctacttctttagctaccaattattttaaactttttttatttttcttcctaaactcaattattttaaacttttgaatcattacttttctacacttttgtctccttccttttggaccttattaaaatgctaatcaatgggctgcttttttttttaatcttttttattttaaagtactcccatttaatgttctatgactttattaattaatagagaattgggtgctattttatttcttaaaaataaaaggaatggtcgatgtttggaagaaacctttccatgcttcaaagatcaacagatttgtcgtcacagaaaatttaattgagaaattagaaaactaatttgttgattatgattacatttaaattgtaaaataaattatatatcataaaaaatatgaaacatttgaatgaaattatttaatataaaaaaaatggtgaagaagaagatcaagtgcattaaagatatcctttataaactcagaaccagctccttcaaaatcaataaaagtaatgaaaaaagtgtgataaaaaagaattgagtatagacatagagatatgattaaagattgatgataatattaactcttcaactgtacttctaacgagagctataatcattagcaaagaggcttagtttacaagaaagtgaacctttgccaaaattaaatattgcttcgggagccatccagaccgacatttgcttctttccacatacatgtttttaataaataaactaggtacatataaatatatataatatatcaaaagttgtgcattttgcactttcaaagttaagcaactatattatgactcgaatctaaattctcagtatttatttaccatatatccttaaagcatacatcacattactttgttggtgttcatcttcttaggcaaatctaacatcaaattatcattcaagtcaaacctcacacacagctctacggttttgatttttcatatattagtaacgtagtccatttgacattctaaaatacataatgaagtcctaaaaagcgaatcgaagaacaaaggtgcactagaaacaaaatagatacataagtaaatcaaagtaattaacaaagtattgacataagataagataccattagattaatcaatctactgaaatattataaaggagccaatatcagtcaatcaaaaactaaatcattcaaaaggctgtatgaagattaaaaaatggcacaaaaaggaggaagctaaaaattatagcccatcaatttcatcaattaatgtaatcagtacataagccagcgtccaagacaacaacctttcacaaacttatttcttctcttgaagacaaaggcaataaattaagaagaaaaatgaaacccatatgactagtttctgtgtttcttaaaaatagctttcagcatccagtattgtgtttgttactccaaattattgagcctattcctgtgctaaaatgatgccaattttttttatatttctcatgtaactaaaaatgggggtgaggagacaaattcaatggagctaaggatctgaagaggaacaataaatagttgaaaagagaaaaggaaaaaagtaaaaccctcaagttctctcctagtaaaagtaaatattcaattgaacttgagtaaaatctgaaatgcttctgcaccttatctcccacccaaagagaaaaattaactaaaaaaaaggaggaaaattaccaattagcaggacacttttgtcgatggacaaatcaatcttatagagcctggtgggggagtgagagagaaacaccgtttctgtaagtgtaaagtaaggcaatgcccggaatcagcagcccatcacagcacaattatagacaaagttacccgactgcttccttccaagtaaacgccattcggctggaccttcacctggaacccatgaattcacttctataaaagattcacctgatcttggcccccctatcacaataagccgatccccacaagctctaaacgctactccccagccatgcattgacacggctcgttcaggcaatctccccactgtgaaccaccggttctccaatttgttatatttttttacctccatatcagcatagttagctgcatacaattgatcatttacaactgcaacaagaggtggtgcctctgctgttgcaggcatttcattggctatggcagcacctcttcctggagacatgttggggatttccctccaagttttcgttcttaaatcaaactcctccccacatgttagaactgtgttctcattccctccaatccccccaataacgtaaaatttattgtccatgaaaaatcctgaacacatcttccgcggcttgctcatactggggagtgtctcccatgtctgagtctcagaattgtacagctcggcagagcttaaaatattcccaccggaatcacaaccaccagccaaaatggctctctctccaaggctggcagaaccaaacaagcatcttggagcattcatcctcattccagatgaccaagaatttgtcaaaagactgtatctatgtattacgtgggcattcatctccttaccaaatacaagaagttcagttcccacggccaaggattccttgtcagaacacatgaagcactcgtttgaggccatcctaggcaaatgcatccacctaccacgaaccggatcaaaagcttcccattcaagaagctggcaagagaagtacacccaatgttcaaccacaccattcagtctcctaagcttgtacagctcgccactttgaaataacgacctaaaacttttattcacagaagcaatggaaccataatcagatcttgaacaacgaatcagacaactaatggagttgtcccggccaattcgatggattagggaatcagaatctgaagaattgccagcatggtgacgattattcgatagctcccgggaaccttgtgacattccaagtccctcccaagaatccaatagcttggaagatttcctttgcagctggtcttcttcagagtcgatatctagttgtcgtttgttgttgctgctaccaatttcaacttcaagaagatgataagtcatgcaccactttgtttcaggctggcaagagctcgaaaatagcctcgacaccagacaggaccgaccctccaacatgtctccgtaaaaacccaattgagctttttaaggaagaaaagtcacagaacccaaaatttaatccagttgcctctctctttctctctgtttctccctccctcccccactctctctctctctctc

SEQ ID NO: 112893 - DNA, 9144 bp, Cannabis sativa
  modified_base (9066)..(9081): a, c, t, g, unknown or other
ttcggaattgagaaattataattccaatgcccatttctaacaatggggtccgcagataattaaattcataaataattataaaaatgtcagaaattagtgctaattgcgtttactaatcccaattactatttcatcaaaaaatcccaattactaaagcggtcattacagtttcagtttttaggaccaacttagtaaaaattgttcaaaacttacattgggacatcaattatacattccatgaacatatttgaggcatcaaaattagaatcagagcaagtttatttttgagcacttggggcaccgaggcctcgagcacccattgcgcaggttgacaatctatcaatctaggcaccttctaagtctccaattggagatctaacttttgcatcaaattcatcttcatcaaaaacagggaaataggtccttttagaggaaaaacaacaattcctgggcacaaataatagggcccaacacccaggttgacacttggggctggccttgcgcccaagctgacattttatcaacctaggccatttaaaatggagtttttcaagaattcttttgagaatattctccatctttataaaatattgagattcaactcttttgaagaaccaaacgaaattttcgaaggggcaaaattgggtccactgcccaagttgacattttatcaacatgggttgtttctgatccaattcaacaaaaagtatttcgagcttttttatgtcattagaaataatgaagattcaagtaaacttggagagaaaatcacaaactcgagtccctagaagtagggcctagcgcctaagttgacaatcatcctgagatgcttcctttaattgctcaaatgccaaatctaatgtgaccattgaattaagcatggtcataaacaggggaggagaccccatcctcaagtttgggaagtatcaaaaatagaatcctaagagcttagatgaaagggcccagtgcctaagtcaacaaatggcctgatgcgctgggttctgcttatcacttgctgatcctgtttcgactgtgcatctagtttttcataaatacaatgatctataaagttagagaaatcaaattcgcaacttttcatttcttatttccatcactcccaaaaatgaagagtttggagatctctaggagtgttatggaatgatataaaaagactaattgtgggatcaatggcagaattcttggatcgagcaaatatatttatcaagctcgaagaagaagtacgatgtgtagatacagttggacaaaagaaaactcaacaacacatcactgcagtcaatacatctttccaactagactagaattcacaaaatcttagtagttctaatcatggtggataaaggtcacacgatggcaacagacagggtaatgggaagaaaggcaagttcaatggcaactccgaaaaacatcctcgtgataatgcctcaaaattcactgcattcacaatcctaacagaagacatagagacaatctatcaactacccagtttatggttccatataagaaaccctatcccatgaaaaaggatatgagcaaacgggacaccaccaagttctgttgttttcatacagactacggccatgacacaaatgaatgcaacaacttaaagcgggaaattaaatttctcatcagaaaaaacaaactgtacttgcaaaaatatgtcaaggtcgaccaagaacaaagggtcgctcaagtaggtactaactagaaccagttgatgcccccactagtggataaatgtcttcaagtaatcattgaaggcccccacatcgctggagatttgggaaaagctagagaaaagtatgctcgagccttgcaatatgaacaaaaggatgcagtcctggccgtagagaaaagaaagcctagacaaccgtgtgttgaagaaccaatcatagcgttcagtgaagtagattctagccacgtcatttttttgcataacgacccattggttgttgaagtgcgaattgcaaataaaatggtggttgggacaatggtggataatgaagctccctcaaatattctattcaaaaaaatatatgagaaaatggggcttcaacttaaagtttgattccttgcactcatttagtctacgaattctctggccaaaacgttgcaccacttgaacagatttccctaccactcacagtaggacaatctcctacgagcacaatagtaatggcacagttcttagtgattgatgtcccttcagcttttaacgtcatgttgggccgaccaaccctatatgacttaagagtggtcacatcagtctttcacatgtgcattaagtttctaacaaggagtggaataggctgtctaaaaagaaaccagaggactgtagatgaatgttataaccttgctctatctaaggccaagaaagaagatacttacagctagagttcagagaagggaaaatgcattgcccaataggaattcaccgaaggcagggacgaagatatggatccccaatttagggaaacaaacacaaattttaggccaatggatgaactagaagaagtggagactgatccaaccgtgccaaccaggaaactctaaattcgtaaaggtttgttgcttgaaataaaattagccttaataaaattcctaagagcaaacctagaaatttttgcctggtcacatcaggatatggtcgggattgatccaactgtcatgtctcatgccctaaatattgatccagactttcgtttcatctagaaaatgtgcacaagcactaaaagaataggtagaaaggctccgcataaacaaatttattattgaagctttctacccagcttgggtggctaaccccgtaatggtgcccaagccaaacaacaaatggtgagtatgtattgacttcaccgaccttaataaagtgtgtctaaaagactatttttcacttccaagaatagatcaacttgtggatgcaacagccaggcatgaaatcttaagttgtatggatacgtattcatagtacaatcagataagaatacatcaacctgaccaagaacacacaagcttccaaatagacattggtctatactactataaagtcataccatttggtctcaagaatgctagagctacctaccaaaggttagtcaacaagatgttcaaagactagattggatgaaacatagaagtgtgtgaggatgtcatgctcgtcaaatctaggaaggctggggggcacatagggattgcttcaaaatcctcagaaaatacaacatgaaacttaatcaattaaagtgttccttcagggtcagcttgggtaagtttcttagatttattattaatgcacgtggaatagaagctaatctagagaagattcaagccctcctggatatgaagtcgctaacaaaattgaaggaattacaaagcctaacttctcggatagctgcactcagcaaattcatttcaaaattaacagagaagtgtgttcccttcttcaacatccttcgaggtaacaagaagtttgaacgggcagaggaatgtaagaatgcttgtcaaaaattaaaaaagcaatttccagaacccccgtactctcaaaacctttggacaaagaagaattagggatatacctagcagtcactgaatacgttgtaagtttcgtgctgataagagaagagaacaatgttcaatatctagtttactacagcagcaaaagactagttaaggtagagggccggtacctcctaattgaaaaactaaattactatctgatcttagccacaagaaagttaagaccctatttccaagctcatcctgtttatgtgtagaccgaccaacctttatgctaaatttttcaaaagcccgatgctttttgatggctactcaaatgggctatagagtttggtcagtacgaaataacttaccagccccgtacaataataaaagggcaaggttaggttgattttgtggctgaatgcacgggcaaagaatcagacagttcaaaagacaatcctgagccagactaaagaccaaaaaaaaaagcatccccactagaagaaattgaaaaagacaaacttatctagaagttgcttgttgacggatcagccactgatcagttatccggtgtgggaattgctctcatcacacctgggggcaaccttttcatggagcaattaaatttggatctaaagcctacaaccacgaagtagagtatgaagcactcattgctgggttaaaacttacattccttaacctggacagatagatttactcctagcaccccagaaggattgatatgaagctctaggttgtacatacatagcaggatgtccgaacagagtcatcaatggacatttgaccaacttgattatgtgatcaacttgcatgcaccggctaggggatgtgagttgtaaatttcagtagtgatcgatagtatcttcaaacttgcataacacggagtaatcccttcttctatgggattgattagtacctctagagaataaaggtaatcaacctggatttttccaattcctttaatgtaattatagaaacatattaatttcctattttatttcttatatattaagagaaactatacctatataattaacctctatagattagtggtttcatctcactattgagggagacggattgaatcagagagaaatagtgactaagagagaattaatcagagatcttttgtaagagcttttaaggagaaatattttattctttgtcttacaagtcaatataataaaaagaggagtaggctattaccactatcacggggccaaacctctagaaattttggtctttttttttacttattgttctttgcatcctattatttatttaatctaatcgctttaattaagactcaatatctttagctagaagcgagattaacactcatgattttatttttatatatatatgagatattgcctgaatggatgttaaaatattgaactgtcagtaggtgaaagtttgaaattttatattttggtggtggatagctaatgtggtcatttcaagcgattaactaaactctctcaacaagcttggctctctctctctaccctctcattctcgatattttaaatttaattatgtaactttatatatatatttggaagataaaggaaaaaaaaattacttgaaaccaaaaaagaaggaaaaaaagaacaaacagaaaagaattaaaattataaaaaaaaaaaacgaaaaaatatatataaaaaatgggggaaaaagaaaacaaaaataataaagcaagcaaactatatatataatagaatgataaataataagtagaaaaagataaagaaaaaaaataaaaaaacgcaaagattgaaaaaatgaagtaaaaaaatgagagaaataaaagtagattgaaaaaaaataaaaagtaataaaataaaaatgatggaaaattaatagaaaaataaggtgaatgaattaaaataaattaataaataattaaaataataaaaaaagtgaaaaaataataaaagataataagaaatgcaaatttaaagatgtagggtactcaaaatttataaatttaaatttaaacttttaaattaagtgttttaaaaatatgacaaatcatataccataaaaaattaaaaaattagaaatgttgcaaaaaaaagaccaaacaaaatgttgtaatatttttaagttatttttactaaatttggaacttaagaccattgcatatatttttttattaaaatcaatgccattctccatgctctttttcattgcaaaaggtccaaacgtgtttggagggcatcttcattcttccttaatgaatttttgtcaaaccaaatgagtctcaaagaattattattgcatgtttctactgattagacttctctccaacttgagcagtttgcatgtattctttggggcatttggaatgagcagaacaaagaacgacatggatccaagttaaagccaaagccttttgatatcctattatattttgcgatgtcttatttagaatagtatcattctactagaaatacatctaatgatgtttctgttcaaccatcttccacaacaagagatgtcccattgactcctcaatggatgaatcctccatcgagtagactggaattaaataccgatgctactgctaacacagtgacacaaacatttgcctttggtgcagtactacgtaattgtagtagtgtgatcatcgttgctatgtcaaagccttttccaggttgttttctataagattcagttgttatgtgtggcaaattgtgttgttctggtcatctatatattggctagtttcatcttgtcgttttagcataatattggtttttattatttcatcttgacaggtcagcttagtgggtttagcaaaacattggaaaactatcattctttctgtactgagttgttaagttcgttgttattgagttgttagtatataatcagggactaccaattttctaactaactcttcttctttgattggatatttttgctctgctagggaaaatcttttctttgtttttcttggttaatttacaggtcattgttgattggatctttaagggccaaaggagaatcagtgatctatttttgtctgaagggagttcagatcacgttgctgaagggattttagctacgaggaagcaaagggatcttgacttttgaagtctaaggagtcttagactgttttgggatttgatagtgatcaaatcagtagggtaacccttgtatgagttgatgttagattaattttgaaaaattataatcaagactggatattgtacttcaattaattcatagtgaaggttattaccctggttcaagggaacccaagaaatagtcgcctggaatgagtttccaaggtcgagtgaagcttgtaaatatgtgtgtcttttgatttatttcctgcaatctaagataagaattgggtctttaaaatcaactaagaagaaattgacactgttaggtttttcatttggtatcagagctaatctttctcacgattgagattgagatcttggtgtgttgtgtatttctttttagtttctacagttttcttgatttgtgtctctttatgtgctcatagattgttcttttctgttcttatatttctagaaaactaactgacctcgagttgcgtgtcaaggtattacacctgtggtctttttgtttgtgtgattgcaggttaacatgaaatggagatgtttcgggaaggaggttccacctcacgccctcccatgcttaaaggaaccaattacttgtactggaaaaccaagatgagggatggttgtcgttgagggatgatgaaagagtatggatggttgtcattgagggatggtcccttccttctgttactgatgaagaggaagaaaaactaaagaaaactagtgattggagcattgacgaaatggaaagagcaaactttaactcaaaggctcttcatgctctctttaatgcagtttcgactaatcagttaaaagttatctcaaactatgaaatcaccaaggaggcttgggagaagctaaggatcatgaatgaaggtacaaaggcagtcaagaaagccagattgagagccctagctaaatcctttgaaaatctatcaatggaagaggatgagtcagttacagaatttcatgctaagatgtgcgatatctcaaatgagtctgatgctctggggaaggtgtactcaaataagaaacttgtgagaaaggttcttggagttctactgaaaaaattcatgtccaaagttacctcgattgaggaaagtcatgacattgaagcccttgatcttgatggactcattggttctcttcacaactatgaaatgacattacaaagatggtctaagggcaagaaacagaaggataccaaaaaagacaagagtgaaatgggagtcgcatttgttcataaagaggaaaccaacaaactgagtaaatcacccgagtgctcagtggatgaaaactttgccttacttgcaaaaaactgtgccagattcctgaagaagagctttaagaaaaattcatttgttggaaaagaaattgctaacagcaaaaatcagcccaatttcaacaaagctcctcaatcaagtgagaaaaaggacagaggtattcaatgtcgtgaatgtgaaggttttggtcatatacaggctgagtgtgctagcaccttaaaaaagaagaaggcccttgtagtgacatggagtgatagtgatgaggaagaggcaagtgatggctcccaagatgataagtccatgattgcattcatggctaaagaatgttcttcaggagtattagaacctgaggaatctgtctctgattcagattcggatggggccgagaaaaatagagcctatgaagagatgtttgctcaatggagttatatggccaagagggttaaggaatttcaagatctcaacaaggagttatatgatgctgatcactgttatgctctcggcagtcagatgagacgccatcgcacttttttttggataaacttgacctgtggcactatagattgggacatctaaacttcagggatctaaaacgaattgtcaagttgaagactgttcataagattcttgagttaacaatgagaagagatagactttgtggaccctgtcaacaagggaaacaaacttgatcctaccatcctcctattaatgcacttttgacatctcgagtgcttgaactcattcatgtagacttaatggggcctatgcaaactgaaagtatagctagaaaaagatatgtcatggtgtgtgttgatgacttctctgggttcaaatgggtaaattttttgaaagaaaaatcatacacttttggatacaccttggataagtgttatgtcctttccaaggttttagcgaagtttaccagtatctgatgtatggagtatacattagaaggggccaatattgattttagataagatatcataaacttaccgttatatctaactaagtcaatatcaatggttgatcttacgtttatggatcttaatcctaatatagttaggttcaacttagttgtattatttatgttctttaagttgtttgtggatactaacctatggttcttgcagatatttacatcttgnnnnnnnnnnnnnnnnattgagtgggagcgctcatcatagatatggaatctataatttctataagtatttagaagtgaa

SEQ ID NO: 112894 - DNA, 1291 bp, Cannabis sativa
tttttttttttgtttttacatttttacgaaattttacataaaaatctcaattgccactaacggagcaacctaaatcccaactaaaaatcgtatagaaactcacatagaaactaccggaattactttaaaaaccccaaccataaatttgaaaaagaaattaaacaaataatatttggcgtaatttccctttattttattgttcaatgaaaaataaaattagatagatatattttttataaataaattttacatgtatatatatatatatatttttgaagtctaaattttattaactgaaaaaagtgcgaatgtaaattattttctcgacaatgtccaaaaatttggccaacatatttataactagctagcttcaatagcacataaattatattaattatcattgtttaatggctcctgtatatatattattattttttcttaaaaatgaaattgtaattggtacgagaaataaatgatttcattgaatatataactacctagtttttgctatttcaaaaggtgtgcttcatgctaatcttggattaataattttctttcattattatgtttttaggctattaattatttaaccttgttgtgcaagaaacttacgaagtagaagaaaaggaggcaatgatgataaatgtgaaattaattctttttgtttttaggtttaattttagggctctatttaattaacataaacaacaaatttaaaagaattacacaactaaaacacaaaatattaaattaaacgaattgcaataatcaagacttttatttttttttaaaaaaaaaaaaaaaaaaaactcaaatcattttatctatattgaaaatatatattattttaatttcaattaataaatatatcaaatgaggataatggtatattgcataaataaacaaataagtttatttaacaactaaagatttccaattaaatatttaataataataaataaaaaattttataaaaaaactgcttataaataaaagaaatgcgtgaaaaataaaatatttataaataaaaaaattgtttaagaaaaaaactctatcgataaagaaaattgttttataaataaagaaaatagtgtttaaaaaaaacctctttgtaaatacacaaaaatatttataaataacaaattataattttttttgtgacgattaaacaataatgtttattattatcaaataaacatatatctcaattttttttttttgacaaagtgattagaatcacttatgaatttacgacgcccacgtccgccaccggcgctggaacctcctcgaa

SEQ ID NO: 112895 - DNA, 1684 bp, Cannabis sativa
aaatcatgtgaaccatgcaacaaaaaatgatttctgatctttattaattagatctgattatattgaaatgtgttttatttagggcacaaacccaacaaaggggacttcacccgaagggtgtcccttatgagttcaactttggatctagccctttcattgaattgtcttactagttcatttgcctccctattttggcaattcaaccttgtatggtgggcttgtaggatcgtgacttactgatccatcccttcctagaactcgcgtctctgctgggcaaacgcattggttacaacagcgtgtgtttcttcttgttcatgatagaggatgtttgtatgatcctacactttccctatgacatctcttagcttggctagctcagaatcatccccaaagtcaaatgggattcattgacactaggttggccaactccaggcccagtttctccaacgtataccaaaggggtagttcttgttaaaggaactcccgtggtactttgggaaagttctccaacattcacaggtacttgcccggtattttttggatcttgcccgatattaactgggccttctggtggaaacttagtagatgggtttgcccgagttggccgagcagggttgctgccacatcagatgtgaaaactttgggataacaatagtaaactattttttttttttttggttattttatagtttatatatagttgttatgaagttatttttagtttatttatagttgatgtatagttgtcgtgatgttgatttctcgttgttttttagttgttttcttactttttgatgagaaaaatgtatttttataattttaaaactttataagagtatttttgccaataaaaactttaggtcgtaatatcgtaaataaaacataaaaaaagtacttttaaaaatttctttttatttaataataaatatctcacataatgtcactctcttaaaatatatatatatatttttcgcttttttcttttcaaaagaatatgatttttatccccaaactttgatacttatataatttccccccctgattttttttctaaaaatgccacccaaacattgtaaataattgtaattttacccctttggttgcatttctcttgtttatgcaagcagttttgtaatgtaagaatgatctatgtctaagttactgtaattcgagagtccatgcaaaaaataattgcacagatagtactctaacaataaaattttggatagaatgttcgtctgtgtgacattgtttcttcatgacattctggagtgaggttatctgagggttagaaaggtagtgtgaaatgattcaacttgatgaggaggacgaggctgagatcatgtatgaggactcggtcgtggaggaatatcagattaactagaggggttttatagtttcgaatgagttcaaacatgattgtctgatccttgctgggaagttaatgaaagacttcaagaatagaatgacaaaagacgttataatgctcgcaattgaagagaaggatgtgcaacaactggcacaagtccctgaaaagtaactgaaaatcgacctcattgattggttaaaatttgttgaaagccggctaactcctgaatttcaggtacgctaattatatttgtactaagataaactcttaaatacaagtacatgtatctaatgtatttttttttttttacattgt

SEQ ID NO: 112896 - DNA, 5736 bp, Cannabis sativa
ccactccctcggcctcctatagtgtacaccaggcgcccccctcctccatcgaacaaggctttgatactactaatagtttgagaattaatttgtattagtttagtttagaataggtggatatgaagtaataagtgtttaatgatttttctgataaagtagcgaagtagtgtagtgatgacgatgaattgatgttggtttagtaaatgagaataatttggcttagacgagtttatgttttagggtagtagaaaatcaaaagttctattgatatagtttagttggatcttggatgttggttacaatttagaatccttgatgggtatttatagttgctagccttcaagtttgtgtgactactgactagaattgtttgctctagatccttctagttcaaggactttatccatacacttagcatgcataaatacataattctagactaaagttttctagaaatgctatgatgttctattgtatatttcacatgtctagaaaattctaaagtattcaattatctaaaaagtttaggttaagcttttctacaaatgtgtagaatattttatactaaattgagaatggtagaaatgggtaaaaatttctaatacctagctataaacctattatgacaaataatgcaatacctactttaaccatacagaatcaacattgcaaaacaattttttcaaggtatagccgtttgttttccacattaaaggaacaagcaataccagattttgaacatacatcaacagttgaaactttctcaggaaccaaacggtcatttctgtcccctaagcccaagtttccatagcggccccatccccatccatacagtgacccatcctctgtaatagctgcagtatgttcagcaccagccgccaccattttgatagagattccctacaaaagatacatttttgggggaaggggggccataagaaatgtaaatattattgtaaaaatagtagtataatacaaaaaaagggaagaaaaaagttcacgcaataaaggaaaacctatataaaaacaaaccaatgggaaaaaactgagcaacctagtcttacaaaagattcataaaatataaattacttgtatcatttccataaagtaatcatgaaaatatgaaatctgcaaagattgatatattatttttgcaccttaaggtgaaagttttatatgtgacagggacaggtagaataagaaagaaagaaagaaagaaagaaataggagcactaatggtagatagtatgcatacttatataatttcattagcaagactgaagaatgtaaaagaatagctaaccctaaatatcaatagacaagtaaatcaatcttaactcatctaggaaataactctaaacttccaaaggaaactagttgggaatttaaatttcactatataagaaaactctgtgactcaataatagttacagccctaaacaattaccaatataatataatctcgttcatttagttattgatgtataacaaacactaaaagaaatcctattactttggctggattattcataactgcatatttacattaatgatgcagtgatcaattggatatactgcttgttccacttttggaagacttgcttttatattcatttaatttcttcgaacaagaactaaaagaaatggaatgaaaagaatcctctgtctaataagaaatgctaaaagacaccagtgatacctagcaccctcctttgtattataacgcgattagtgcaattaaatatcgggtcccgtataatttaatataatattttttaggaaatgtcgctaataaattgcaaggtgccacctctaggtggtgctaggcaccactagtgcccaatagcaatactcttgtctaatgcataaaaaaagactaaaacatcatgtcattttaaatagaaagtgatgactaatgattttgaaaaagaaagaaaaaacaacaaagcagcagctaaaattaaatcatcacacagaaacaaaaccaagcacacggttcttgaacacatgcgctgccacctcacaatttcatattgctgaaatatatagaattttcatacgacaatataagaattttgtgttttatttgtaatatatgcaactacaataccttaaacgcttgaatttttcgtggaacaagagagtcctcagtggtcccaagaccaagctggccattttggtttcgaccccaacttcaacaaaagaaaagaacttgaattaattgaaaacgaatatagattataaaaagacaacacagtgtaagtgctacaacaaagtttagctgaattagcagaactaagaattcatgaatatttcttttcttatctgggcagagattcaaagtctttcctgtaattatatttggatgtattcttgttcatcattgtactattcttcctcattagtactagaactttttcgtatataataatataatatctttataaaattgctccaaccaagaaagtttggctcataagcacaggaagaaaccctatgctgggaaaaaagcatgtgcatatgcataaataatgttaataataagttaataacaataatgattatagccgttcattaaactattatattatgtagcatgcaaggaattgtaaacaagctcacaaaaagtcctcttttgaagattcaagaatttctcgtggtcgtgtttaacaacctattacaggcctgcattttaaggacattgtagagtgcgcttgccgattattgttaccaactggacaaaattattaactaaatgtttggcagattttcgtcacttttttcttcttttaaaattagattatgataaatatcaaacaaaatgctaatatgaaaaacaggggaagaaaaaggacaatggcattgaaagagaaaaaccatgtgtcagcctatcaaaaatggtaaaaaatgtgaacgctctatactgtgtgagagaactaacctttgtacctccccttccatagtgactgccaaacagtggctgtctccacaagcaatttgcgttatccttataccgtgcaatgcttttatgggctgaggagtgaacaagtcactagaattaccatgacctaaccttccaaagtcacccctggaaataatgtaaagtataatgcttatatgataactgaaaagcataaaacttacagaaagctgtgttatttgttttattcaaatgacacaaacatttctgtaaactatgcaaataaatctttgaactgataagatataaatttatattaattcatctagaaaaacttcgcacccaattgagatcaaaattaagataatgcagtactgactgattaaagaaaatgctatgaaaaataaattgtgagaccacaatttagactaccaaatggaataaggttacttaaatacataagtgcagagtggaagaatagaacaaaccatccccaactataaacttccatatgtctctcagaataagcagttgtatgatcagcaccacaagtaacagatgatatttcaaggccatccaacgcacttaattgcgtaggagtaagtcgatcttcagcatctccatggcctagttgtccatcctcccctcttccccaagagcaaacaacatcgccagctgtacataatcaataaaaatccatttatactcttacaaatgaagacaaaacgatcaccccagaagcaaaagacgtgtacaatttaaaatttacacaattaaacaattataatgaaaataggaccaagtacacatatccgtagaaatcaaaccagaaaaaccccgaccaatagtgtctagaagcactgagaagggagcactaaggaacaagaatcaaaatactgaatttattaactaaaatgcagcagataaattaccataaatgtgatcacttaagaatacttttgatcttctttcttataaacatttctggattcggtagtggacagagatgactctgtaataatctttgttggctacattttaaattatttggtttgaaagggagaaaaatggctgcttttgagaataaatacaattaaaagaggaatttacagggaggaccaaaaattttgaggtattttcatcttatttaaaacagtataaaaagacaccaattttattattatttttttttaatctacatggatatagttgaatttaatagtcttttttgtaatctttttgttgttcgctttcttttgttctttttattttaagacttctcccctgttttttcgttacctttcacctatgatttcgtacaatatattttcatccataataattcggttttttcaaggagccaacaatacaaactcaaacaagtacgtaatttttttttatttatttataattttttttttgttttttgagttgattacccattagttcaagctacttgtgctttcatgaataaaacagagacgcgggagacaatggcaaacaaacatagacatcctctttcacatgactaacattttaccaacaccgacaagacatagccgaaaacatattcagatttagcaacgtctaacaagaaatttcatagaaagcattgaagcgatagcaaatccaacactgaaaaaactcacaacacaaatttacagttaaaaaggacaaatgagagaatgataaggaatagaaaccgtattaatactattacagcacctgattctcgctgaatcttcaaaatctttggagaatagcgaatattctagcttttctttttcttttcttattttttttaatagaaatctaagagaatcactagcacgctctacgatttcagcgatcaaaaccatgttttcatttctattcagcccccaaacaggaaaagaaagagaaatggaagcttacagagaagtgcgacggagtgactagcaccagcagatatgagcagaacacgacgaattgaagcagtgacttcggtaggtgctgcctcgtccgccatgggaatggaaatgggtagagagagagagtagaagtagtaggatattgagaaggatcaatgaggttcttccctctccagaaattgaaaagtgataaaattccataaagttaaacaacagagtgggccctcctgtatttatagcgatgcagattagatattagcacatgtggattcaccgcaacttctttacatatttttaatactctccgtatcagtgtcagccggaccgtcttctgtcagaccttagacacgactaaatttaagaattaacaccaaatcttttccataaaataaaattaacactaatttaagcaaacactaatttttcttccaatattaaaaactcagcaatatagccgcttttcttgtagctaatttaatttcttttagtattataataattgttacttaaaatataattttaatatatagtaaaattataaatatatcatcttattttcttaagtaaagtcgccgaaattaatggtagttctctttttgattgaattttcgtttcggttgcgttaggttactgcgtggttgcacgatagttgcccaagaagcatggatcgtgggttgaagatgtgtgtaagtggtatttgtgtaattttttttatttagactgtatatttatttatttggccagctgaaagtatttttgtaatattgttacttttttttttgttaaaattgaaaaaagcccaaatttttatgtagaatatttcattaaattaagtgtgtttttctaaattaattttaaaataatccaataaaaaattaattccatttattttaaaattaattatgt

SEQ ID NO: 112897 - DNA, 5224 bp, Cannabis sativa
  modified_base (43)..(52): a, c, t, g, unknown or other
  modified_base (2141)..(2143): a, c, t, g, unknown or other
tatctttgaaaatctctcgcatttgtcacacttcttaacatannnnnnnnnntcttcaatcatcgttggccagaagtaaccttgccttagaatttttttagataagctttgcccgacggtatgatttccacagaatccgttgtgaactttagataggagtcgtgcagcttctatctgaagtacataactccctctactatgataaaccttgccgctttccttctcattttctgagcttcattctgattatctgggagtttcccagagtcgaggtaggctgctattgctgtcatccagtttggggttgtatcaatcatttcaatttcttccgtgccagtgatgctaggttcttcgaggaactggataggaaccaagttcgcctaatcacttacattgctgcttgccaatcaagccaatgcgtcagcagttgtattttcttctcttggaatttgtctgagaccgtagcttttgaattgtgtgagcagatcatgtattttgctcaaatatgatatcatcttttctccccgagcctcatattctctggatacatgatttaccaccagctgtgattccaaacagcccagtatattgtttgattcgtgtttttgtttgataggtttgtatttatgtttaataattgttgtaatatatacagtccaagtgatgaggtgagatcgatgttgttgtcgtttggtactatactacagatcgagaagttaatttgttggtatcatctcttaatgatgctgctattatgttaaataataatttatattatcaacgaccattttaaacagtagcttatagtataagtgacagttttgcaccgtagaccatatttcaaattataaggaacgatgattacttgttgataaatcatttgactgacattgcctactccactaattttgtaacgatagaataagtaacaattttagaaatcgattgcaatacattagtcgattatttaatactttcgagaaaacacaatttttgtagtagtgtaaacagattatatgaatgtaaacaaggactgtaaataagcatattcttttatgtatagtgccctcttggtccctaattaaagtccacggttactagaaataccagccatgtaaaaagaaagttaaagaaattattacctaaaatgtataaattgacactttatttataaaagtaccttcataaggtgtagataatatttatactttttatgtaattttaattaccaaaatacctcttacactatcacttacacaatcaaatgatagttgtatggtggttactgcgtggttgcgtgattgttgcatcaaacgaaggtttcaatcagacgatggttgtagagtggtttctgggtggttggctgaaggctgcaacagatgaaggtttcactcagatgaaaatttctggatggttgctaggtggttggccgaaggttgcatcagaggaaggtttcaattagacaaaataactcttagcaaaatgtttatgcaactgttatgagacattaaaaatcagaacagtgtttcgacatatgtaactctatctacatgtctctttatgattgaatatgaacaaattcactattagaaatttagaaaataaaaaaatacactaggataaatattttactatagtaatgatgtaattttttttgtagattatacttgagttggattttttgggaactctagttcaagtttttgagatctgcctttaatggatttgaaaattgaagtcaggacatcagttttatgcaaattaaattggattttcggttgaatttttgttccgtagtagtttttctacacttttttttttcatgaatttgaaatagcccctgttttgaatgattctggtcgtcttcttaagtgaagtcgccgaaattaatagttgttctctttctggttaaattttcgtttcggttgcgttgggttgttgtgtggatgcgtgacaattatgcaatacttgcccaagaaacatggatcctgagttaaatgtatgtataagttatatttgtgtaatttttttatgtggtctgtatatttatttattttgcaagctaaagatatttttataatattattattttttttttagaaactgacaaaaatattggaatttgggttaatttttacaannntactgtcacacggaaatcttttcaaaaatactgtattttaataaaacaccagtagaacacaaaacagaagaacgcaaaacaatagtagaacaactaaaaaataatagtagaataccggtgaaaacttaacacagtatacttcagtatgaaacttataaaaaaacacagtaaaaaggtaaaaaataccgctgacagtatttttgtaaaaaaataacaaaaattaatataccaggtaaattttgaagttaaaataaaaaaaaaaaaaagcccaaaattaaatcataatatatgaagattgatgaaggtgtcaagtctatccaaaaagggggataaacactgaagagagagagattaataaataacatgtaaggagcatatgtttgtaacaagtgccttttggggaggagtctacgtgccctttacatgtgggggggccttatttcctctctgcattgtttttctgtttgttcaggaacatcatgatttgccattgaagataagatgaaccccactttcaatgtttttgtttttctaacattttaataaaaaaaaaaaaagaaagaaagaaagaaagaaaaataggcattgaaagattttagtttttaccccaagctcaagaattgtaccatttcccaatcatgaattcattttagctatttgggcactaactcctctacttctttctgaatccaaataattaatatttgtttgaataataataataataataatcctctcacatatctttttgtatttgaaataaaagaagaaaaataaataagagcaatttatgaatatcttcacggtggccttgtagttgtaataatcattttttattcatataaggcagtacatgttcagattagtttaaggaataataagaagtgaactatataaacattaagaaaaaagacaactgttcgctctcaaaaaaaaaaaaaaaaaaaactgtccagtaaatgagtaaaacaagtttttattaatttatttatatttatttgtcattgttattataattactttaagaaattttctcaaaaagaaaaattactttaagaaatatcatagctttttaaaagaagtatcgcccgaaagctcctgagagactatttacaacgtggctactctgtaccctcaaatagacattaataagttgggtcaaccttcattagtggtacctcagaggttctcaaaacaccacagagctacaataaagggtcaattatggtcttcaaatacatccattgacaagaagtaaattatggtatagatatatgtacacatatatccataaatttcattctataatgaaaatgcatatacaactcatgggtgggtatgatcaaacagctttgcccacttgggggaaaatccacaagagaggtccatacaaccttttagttgcatgatttgaaatgagggaatcttccaatcatttctcctttagaactcttaatagaaatttcccaacctcttagatttttttttttgttgacataataaataattaaatggctgatgtgtaacaacatgagggtacagtgtcattgaatatttctttggtcactatttttttttaaattaaaatatccgtgaaactttcattcatattcccattcataaagaaacccacaacttttaaaagaaagtggtgctgtcacccttgtaattaaaatggcctttcaataaagtagtctcagctttcagtttcaactagtcaaaagatatttgaaagaattgtttttttttcatagaaaaaaaaaaaaacagattttaataaattaaattaaattaaattaaactgtatagaattaggtggagcccatgatcggcatgagcttcttgaatctaatcaattatattctgaaggagagcagcagccataaaatgataaaagaaacctccaaacttttataaatacccttattctgttttcaagggcaaaggagattcacttttatgaccaagattgtctttctcctttgtttacgttttgttgttttatttctttatttcacttctttcttaatcaactttcctacattttttatgtataaataaacccttgggtaatttaatccattataattagcaatattaaattatccctagccccacacttttcattctccatatctaaaagcaaaccacccaaagaaaatgtagatggtggtacaagttaaacacaacagtatactattccccttcaaattaacgtagtagtactttcttttataagggtaattaatcacactaatttgacatcaaagttggatgtaaccataaattaagcaagataattgccaaatctaaaattgaaatatattaataagtgaagtttcattagacaatctttttattttttcatcctaaacctctttctctccctattctctttttttcctttagtttttttttttttttttgttctttctatttggcttcgaatgatagaattgccaacgaacgacttccgacgaaatcacgaaatcaaacacagatgagtttctgatatgtttagtgaattattcttagaaatcttggtttcatccgtaagtattagtttcaggatttagccatttttgtgactattgtttattagttcacaaccgtatacatttgttacataataattattttgataactattttcgcaaaattatatatatttttttaatttttagttgaatggtttgttgtgtagatcaacgaaaataaaataatataataataaaagaaaacctgataattatgtatttttgtaaatatttttcatatttctttgcttctttacagatatttttgtgatcccccaatgtttactagacaataccttctggtcaaaactttgataaaatgaaagagtagaaagaaactaataaaaaaaaaaaagaaacaagatagttatatataaaaaaaataaataattattttatatactattttttaaaaaaatttacgatttggattgctccgttagtttctccagtgattcttaagggtttctatacggattttggttgcaatttaggttgctctgttagttgctataagggttgctatgtggaattctgtaaaaat

SEQ ID NO: 112898 - DNA, 6331 bp, Cannabis sativa
atatatatatatatataaaagatggaagaggagaggccaaaaatagaagcctgagatgggttttgctttgaaactttgaacaaggcaaggggggtctagagctgagcaaatgctaagaaaagcataaaggaattccattaagcacaagaaaccaagactacgaattttttttttttttggctgcatagagacaagagcttggaattctaaagctacttaacttaaagcaaatgttatgtgcaaaaagctagtgcttggttttttaattttaatttgagttttaattttaattttcttcttcttgtttggaatggttaacattctcatacccttcagctaacaactacacttttattaaaggctttctttcaacagttgctatcaaaattgtatgcctatatggctatatttctcttccaatcaatgtatagatgtcaattaagattagtcatatcataatatcatacttaaaagaacatatgcaatacaaaggaaggtttctatagcccttcagaactttgatgagcaaaacaggagctgtattagattcagatgagccatatatatttatataaattataaatttaccaaaaagcaacatattaacaaaagtgggttgcttataggatatgttgaatgtacacaacagcaagagtgatctgatgtggcaacttggtctttatttggtaaaaaagagtctcaaggcaaatgattgagatatgtggggggaaatcaaactaaaaagatacttggcttcccaagtgatagtgttccaaaccaactttttgttcaaacctgtcagaagaagagtcttctaaaacagccttatattgcttccatggcaggcttatgattgaaatgaatcttaaacttccctacttgttttttgggccctctctctccttctatcttatactttattgtgctttttgtctttcaaatcccataaaaggcatataccgttggcttgttctcacaggaatgaaccataagaaagggaaaggaaaaaaaaataaacaaaacaaaacaaacaacacaatccaaacaacacaaaaactcattccctcatcattgcttcaaagtatagagtaccctatttgtctttcttctgtctctcttgttttgttttgtcaagtaacaaaggaaaatatgggccttttgcctaatagagtaattcctcttcttcttctttgtattggtttcttagctcttcaaccacaaaacacttctgcccttggtagcaaagatttggctctcagatgggacaaggtgaaaataccatttctcggtgatctgcatatattcaagtccgttgcttttgaagatttgcaaagaaagctggttttggcgcctgctccttcagttacgtttgatccaaatcaatcgaacaagcgaagagttcgaagaggatcagaccccattcataacaggtgctgacattctactgcagtttactagtgaagagaaattgggaaaaacaacaacaaaagaaaggagttttaaggcaaacagaagcttgtgattcttagttggtgcatagaggactatgtaggttggcatggcattccctgcttcttcaacacttctcttagtcaccggttggtttagaattatatatagtttttttattttgtttttttcttttcttttagtccaaggttttagttgaattgcagctaaaaaattccatctgtgagccttgcttcatcactatattgtataaacttttaggtcctaaccaatagctgaatacttttgagaatgatgaagctggtcctggcataccaatattatagtatttttctggtttttttttttttacttttcaattttttcttgaaagatttattttcttctggtgttcactctttacaatttacagcaaaacagtgttcttggtttttttaccttgtattattgctattttcctttagcagtttagtttatccatgaaaagaaaaagataaatttgacactcaaaagtccccagcttgcaaattggcttgttgatacaatttttttctgtttaaaaatgttactagtttgtttttctctggattttaacactgtactctcactaatctttgtaaaacaaaataaacaaatgcaaagaatttagctttaaataaaaataagtcacaactaaatcagtactttaggtggttatgaaaaaagatatgcaattcattccaaacaagaaaccattacaaataattcaactaaggtatatttctttttcagtcattctaataaaccttgcttcagcaaaaccgaaaacctggtgatgtcagctgctgctagtccaagaaatgattgattaacttgaaagaggcaccatgattacaggtttgttctaatggactgagatctgttgtacctgttgttcttgtggcgattaaatcgtatagaagaaatctttcgagaaactgcctcccatatcatatctacagcatctccagactgggatggatactgatattcgaagaaatgtactatttccttcaatctttcccacatcttggtccacttctcttcattgattccccgaagaagattcagcaggtatcccttcttaatcgaatcaggtgcagaaacaaatatgcaaaactttgagtagtccaagacatcttcaaagggtagctcaatttcgtcactaattatcacaggaacacaatgactagcaatagcatcaaacagcctattcgaagaaggggtgtcaccagcaatatgtaagcaaaacttcgaggtggccatttcctgccctgcctggttgacaccattccctttaatgttaccaaaactgaattgcacatcaggctcatctttaagaagataaaatagttcttggcgaataactcctccctggagatttacacacgaaaagatctttaataattgaaataacttaacatatattctcatacttctaacataagacaaattcaatgatatcttgaattactgggtaaaaatacacaagagatctctggaaagtgctccttccaaggaacaaaaggttcagtaatgatgatacataaattagtaagcatataaatattataaaagagttagaggttgtcttgtcaaaatatgaaaaaataagttctcaaacgttgttatgtttgctccacattcaagtttgtgggaataaagcaaaatcacttcattttgtttcccgagattttaaatttattccaaggtattaaaagttaatttcaaatgctttcttgttaccaagcacctcacacttgaccccaacatcaagtccagggtcagctaatcacactaaatctcacgatacatttacattgttaccagtccatttcacaaagttcaaaatgttgagtctacttggccatggcctatgttaagcaaaaaaccagattttcatttgaatagcaaaagcacttgaaaagatcacaatgcaatagaaaatgagagaaactcacatcttttctgtaaatagctccccgaaaatgagctaatgtaggacgttccgaaaaggaggctgattcattgatgggaacagttcccaccagatgcctgtaaggagcaattatatccttgtcaagatttgctatttcaaccgggtatctgccaaaatctgcaagcacaaacatagcagaacctaacttccttcttgcatctaacatgctatttgggtggtgagcaactattaggtgattcttcccactctgccgtttccattcatcacgactcatcaaaaactgaaccagcttctcctgcaactgcttgttgacactaactttttccttcccatgaagcttggaatgccggttgtaactcagagatgagaagaatgggacaaagataacatctgcttgacttgatttcttcactctgattgcagtgcaaggcctgaccattgttccaacattagatgataaaagatcaagagtaagccagtactctatgctgtgctgtagattcagcccaccgggatatgcggggattcgacttgggttttggacatcaggccaagtttgattccccatccctttccaatccaataaacgaaagtgaaactcaggaggcaagtcatacatatacactctcaggcgtgcctgagctgggtcacacaccaccttttcatgtcttttgaaagaagtagttttgttgttagaatttgaaactgggcagggtggctctttcctcatgatgggacttctggcatcaacttgtgatagctcagaggaaactaaaggaacttcaaactcttctcttatctcattgggctttaagtaaaatgaggtactattaacaagaattagcttaaaaactgacctgggtgtgaaagaagaattgctaaattgaagaagaaagatagaggaaaaaattaaaaggaacatggatatggttattaaataaaaaataaaccttgatggcaacctgctcttttccgacattgattaaataagataaataaataaaaactctttgcagattgtggcaccacctataagggctataagtagtaaaaagatagcaatatttccttctatagacacaggagcatcgtaaagcccataaacttcagaataaaagcttcacttcagtactcatggaaaattgaacagagaaacaccaatttatcttcaaatgtgtagggcaagacccaatttttatcttaaaaccccttcagggtttagaaaaaaatatgaatgtacagttgatacagtgtcaagcccccaattatttccaattaccattccagggaaagcatttcgtacaaatacccctgatgttccagcaaaccaactaaataaaggtcacttctttatgagttaaaccccaaatcaatttgcaaaatctgtaccagaaagaagcacagaacaaatggaataaagaccaaaaaaaaaaaaaaaagaaaactctactatcccatctttcgactcatgaaaattttgaacatgttagaaaatgtataggatcactgaaaaactcgaatttaaaaaaaaaaatgatctgggtttccaatgaaagtcattattttgacataaaatttaaaagaaataataatattaataataattagtacctggtcacgcttagaatatgatgcttcaatgtggttggttatgatatccctatgttgagactgaagaacaaccaagttgaagaaggcattagacatgcactggtagtacagtctctctccggacagtcacaacttttgtgtaatttttcagctttctcgtggaatcttttttatcaaatatatatataaatatattatttttggcttaaaaattggagaagagagaaaaaaagaaagcctttgagaaccttttattgctcctttctcgtgtcctctatctctctgtccgagctgtagggtctttttactacgaactttaactacactgtgttccacctcaccgcaaatatagaaaacgaaacaaggtcacaccaaatatatacaacaaacctaaatcagattttttttaaaaaaaaaaaaaaaaaaaaaaaaacagacttgatatttttatttttatttttatttttgaaagaaaaacaaacttgatatttcctcttataaaaatttaaaactttatttcataaaaaaataaaaaagatattaaaataatttgggctatgtcttaccgactaaagatgtcaaactaggtgtaagagagtcattccctttcctcgattttgagggtaatgaacatggtgtaccaaaattcaccggcaacttacattaaaaaaatcacacattaatttatgggaaatttataagtttattttattaattttttaataaataattgaattttattaatgaaaatcaactaaaataataatttataatgttaagatttataaaatacttaaaaaagatatatatcacatatttaaacatattcttgtataaaaccctaaattataaatttatagagagattacaaaaccctagtatttttttttgggaaccgctatctatttataaactcattatatactgagttttggctatttataatttaacttatgatatctacacattattttcatgacaatttaatacccttatgttacacataacataattggtcacttaattttgtatcacgctttataatagcatatacattaaacatatgtgcccacaataggattttaatctaacaatctcgcacttgggcaacatatgttaccttataaatgtataaccttatgaactcaaaatttgctattatgtaaaggtaattcataataatctcgtccatcaactatacccatgtaggatcaaagcggtttttgtcatatcaatcatgactaaactcatcaatggtcacatatacaaata

SEQ ID NO: 112899 - DNA, 3881 bp, Cannabis sativa
  modified_base (3823)..(3829): a, c, t, g, unknown or other
cttggggacatgctattttacatgttgtggcacttgtacgcattaggccaacatcatatcacaaattatccccattacaattggcttttggtcaggagcattccagcttaactctttatctagccctaaagctttcctacccaggcaatgagcattttggttgcaacttctggctacatgcatgtttaaaacaaacttcagggaagtgagacaaagagcttctaatgtcgtctacaacatctgaaagagctgaaagatcatgtagagatgatgccaagctttccaatggattttggagcctttccccgttgaaccccaccggaactgggacattaaattttcaattttatgatagatggaaataggaagtttaaaacacgacatgacatacgaagggatggcctagataatagctttcaaaagcacctccttacctgcccgagagaataatttaccattccaaacattaaggtgggcactaacacgatgaagaataaaatcaaagctagctttttttggatcggccaaaactttgagggaccccaagatatttacttatgaacggtttagaatgcatccccaaagtttcaaaaaagtatgtggaaaaaaagggatgagtgttgggtgaaaacaggatggaagacttcccatagttgacagtttgaccagaagccaggttataaagggtaagagcttccttaagggcattgcaggaagaaatggaagcagttgtgaaaagaagagtttcctctgcaaacaacaaatgtgaaattgaaggcacaatgcgagcaatagaaatgcccctaaaaatacccaacctttcttgaagcctaagagcagcagtgagaccctcagaacagagtaagaaaaggtaaggggaaagagggtcatcttgcctaatgccacgggtagggtgactttcgtctgaaatctagccattaatattaaaacgaatggagacataggatacacattgatgtattaaattgacaaacttgctaagaaagtggaagtgatgcagaaggataatgagaaagtcccactcaacgcgatcaaaagctttttccatatcgagtttaagaccaacccacccaagtttaccctactttctgtgatttataacatgaacaatttcttgagctataaaaatgttatcaaagatgatacgctcaaagaggaaagcaccctgattaggagaaataatgcttccaagcacaactttaagtctattagcaatggtcttggccacaattttataaagggtagaacataggctaataggcctaaaatctttaagggaagaggcatgtgatttctttagtataagagcaatgagagtattgtttatgggtgagaggtcagtattaccattaagaatatcaagaatagctaaagtaaggtcctgaccaatgacattccaattcttttgataaaaaaacggattgaggccatctagaccaggagctttgtctctcgaaagttggaagagagcctgttgaacctcaatttcagagtagggagaatcaagaaagctaatttgctcagtgctcaacgttttgtcaataacagataaaatatggtgagtagcatccctatttgaaacctgggatctgaagaggttggtaaaagaaccgcaaacctcctggaaaatgtcagagaaagaagaaactcctctcccgtcatcacatttgaggcttctatataattcccctttttccttgaagaggctttgctatggaagtacctagtattcttgtcactagcctgaagccaatgaattttgcacctttgcttccaaaaaacttcttgtttttgtagaaggcaatccaattgagattgaagatgagaggccctcctaatttcctcttcagatataggcagattagaattaacatcattgatggatttttcaagggcatttatactataagagagactattggaggttgaattccacttttgaatagctttgatgcaagactgttacttcgagaggatttgatcaaggtagttagcactaggaaaaggcttagtctgaagccaggaaaccctaacactatcaaaaaaagaggcatcagtgagccaattgatttcaaacatgaatctcttaacccgagacacatgcatactctcatcatctaggacaattttaaggactatgatcagatccgtaaaagccaagatgataaatagcagctttaggatagagacactgccaactattgctaactccccaatccaaacgctcgaataaggaaccatgtttccaagtaaagttatcaccaataggatgcaaaggacaaagagaaaacttatttacaaaattttggaaatgaaccatagcataagaaggaggagaactattacaagatctatgactaatagagaggtaatcattaaaatcaccaaaaataagccaagggagtgagggagcattatcatacagtctttcaagtagtttccaagtatgaaccttatcattaatatagggggacccataaaagcaagaaatatgagtagttatattatcattaaaattcacagtgcagtcaatatgattagagaagaaattcaatatatttacattaacatcaggattctaaaataacaaaagtcctcttcttaagccttttctgggcacttcaaaaacataatcaaaagataaccttaacctaagattatcaccacggccagcaagaagtttagactccatcataaaaaagaaaagtaggcctattcttcttaacaaataaggagaggttacagaatgctcgagggcaccccaaatctcgagcattccaacataaaagactcatttttttgggcagggttgctcaacaatccccgcctgttccaaagtagagttgtcagcagataaaacttcagcaatagtaggaccagccctagctctcttgagtatgctccttaaggaatccccaataacaacagattgaggggtaaaagcagctctcttagagccaacaacaactttgcccttggacttcccagagatccttgagacatgatcagcaaaaggaatggcatttccattgtcctcatggacagtgacaccaatagaagagacaacagtagtcagcatatcacagaggacaccagcatgaacctcaccacaataatcagaagcattgaagcttagtgtaatgccctgaaccgcagggacaccacgtgtgtgcttttacaatttaatttatagtcaatctattagtttaagaaaagtgtggtttagttaaaactgtctgattaaactaaaaacataatttttagataaaatactgtagaatacggggatcccctgtttagaaacttttacaatctttcccaaaactagtattacaaaagtagggtttcattattcaaaatataattgaaagggtggatcctgcccagtggaagcctagacaccacggttgatatgtacatcgctgggagacctctgactcatggttgatccacgttttcctttccttttacatgcaccacgaagcactcgtgagtcacaaagactcgacaagaaaagaaagtaaatacaaacacatatattatgcattacgagaaaatcatagcaattcatagccaacaacttcatcatcataataaataaatattcaccctatacataatctcacattacacaatcaattaattgtcttataagacaatcccactttgatgcttcataaagcatccttaccactcgttgtccacgagctatgtatgtcactatcattgcctgataaagcacacgataagtaagaaacctatctgtggtttcaagggagtaattgttggaatatattttacnnnnnnntagatttactaacaagtatgttttgaacatcctaaacatgaacttctaagac

SEQ ID NO: 112900 - DNA, 3333 bp, Cannabis sativa
  modified_base (3202)..(3210): a, c, t, g, unknown or other
  modified_base (3281)..(3281): a, c, t, g, unknown or other
cgcgtgacaggcgggaatacttaccactatactacaacgactttgttgtttacgctttgaacatttttgttgttaaacaatataaacatatctcgtataaaagttaacctgcaacgttaccagcatacattcatatgaaatgaattataattatgaaaatttactagtttgaactatttgagttagtgttaaagtctaaatgcattcttttagaaagtgtgaattataattgtaattcatttcactcattggttatccatatgtaaaatgactttacatatttatattaataactagataataataacaatttattaattagtccctatacaagacctacaagctacaaataataaatatattatgagacttcagctatagcctcccaacaatcggtacaaagcttcttgtatattaagtggctcttgcaacttttcttttcattttgattctccaatgtacaccttttgtttatatatcccagatttatctcttgttatcattagatgtgttggagccacttgagtaggtgcttgtaactcaatctttggctgctgttatggttcttcaaaggacttatttggttcttgatcttgcatagcattctcatcatcaacaatttcaaaattaacaacagaacttgtattcacttacttgactattgtcaatttgtggacttcgctaatgagatggtattgtagggtcgacttctaatagtgagtttttgggtctgaagctttgtatttcaccttgttgacccaaaggagaatttggaggaatgtttatgttggctgaccaagagggtacactaacctgaactgtctgttcttctctatgcgtatttagaaaatttgttttgaaatggaactcggtctcgttaaagataacatttctcaaaatatagagtcgccatatactattcaagcatttgtagtccttgtggctatcactatagcaaaagttgacacacttagttgaatgaaactaaaatttgtgtgtttgataggacctaaggcattgatatcaagctgaaccaaaggccttaaggaatttgtaatcaagttttctagagtacaacatttcatagggagacaagatgtttaaaacaggtttagggagaggatttataagatacacagcagtttggaaagcattccactaatattttatggcatgctagcttgggcgagaagtgtgagacccattttgacaatatgttgatgttttctttcagttctaccgttttgagctgaagtatgtggacaagaatgagtgaattcgatgccattttgaatgacaaattctaataggggttggtattctcctctccaatctgtttgtaatcttttaattttcttattgaattgattttcaactaaggctttaaactagacaaaggcattagttgcatcaaaattttcttttattggataaatccatgtgaaccgtgtgtgatcatcaatgaagtggatgtaaaacctgtaattgatgttagacataattggagatggaccccaaacatcagaatgaattaagtcaagagggaaagtcgctctagtagagttaattttaaaaggaagagaatgtgctttgccaaattaacatgcctcacaaaagtgccttttttcatttcgaatagtatttacatttaattcattgagtacaatgttcaacacacgattggatggatggacaagacatgtatgccatttatccttaattaaagctaataactttgttttttttttttttaggcaacaggaagattagactcaaatctagaaaaagaagcaagactagtaaaaatcttgggttgagacttgaaattgaattgggtgaagtagtttgtaggacttgttggaatcattttcagctttatcaagtctgtacagacctccttcaagtctcccttgcagtaccatctcctttgtttgtttgtccttcacatagcaatagtcaggtgtaaattccacaataacatcattatctgttgttaatttagaaatactaataagattcttagttatcttgggaacatgcaagatgtctttgaggataagaggatagttattaatggatttgaaagtggcattaccaatatgatcaatggtgagttggctgccattgcccacaatcaaatcatccttacctgtgtatttatttttctgggtcatggtacttgtgtcaactgagacatggttgcttgcaccactatccacataccaggcatcatccttccccatctcaggagtagcagtaaaagttgttcggttttgtgtggatttggttgaatctagtgcaccactcaatggaactgaaccgatgtatgactcatcctatatattataacaatgtgcaaccaagtgaccataccttccaaaaactttgcatgtaggcttgttcccacctccagatttgcttcttcgcctgtttccaaacctaccatgattttgaccccctcgattgtttcttgaatagctaggtccagtgttacctctaagtgaattcttgttggccagatttgcagttggcgatgctgtgttattctgcagcttgatgttattcataaaactcgttctctccaccttactatcaaaacacagtagaagatcctaaagctcttgccatgttatggattgtcgagcttcgatttgcagaacaatggggaggtgggttatgtctagaccaggcagaacattggagataagttgttgttcagggtaatgagcacctgcaagggcaagaatatctgcccactgtcgtttttccctaagatattcaaccatgaattgagagcctttgctgactgtctatatctttgtccggtactcgtctatttttgcttttgaatgtgatccataaagagcttccaaagctcgccaaagatctagtgatgtagagcagcccgttacttctgtagctatggtctttgtcatagatccatacaaccagcccatgagcagctggtcatgaacaacccattgttcatagtctgggttcattttaacaccaaaactaggttgtccatctagaatcagaaccaatatgaattcttgtagcttgacctttgtccctattagataaccatccaacccgtcctgtaacaatagcagacaccattgatttccaaagggaaaagttgttcatatccaatttaagtgttggaatatgttttacgaggatctagatttactaccatgtnnnnnnnnnaacatcctaaatatgaatctctaatacaatgtaaataaaggcatataaagtttcagaaaccttacagtggntgcagcggaataataatggctccttccactcagatctttaaaccttgtatcc

SEQ ID NO: 112901 - DNA, 4478 bp, Cannabis sativa
  modified_base (3787)..(3795): a, c, t, g, unknown or other
  modified_base (4054)..(4054): a, c, t, g, unknown or other
  modified_base (4171)..(4194): a, c, t, g, unknown or other
aggtcaagtggtatttttgtaatattttcattttgggctgtacaaatgttgattgggccggcccacagtattgttgtaatattttactctttttagaatattcctgttttcttcccaaaaaataattactcatatgattaaaagaaattataaaatattgtcaaaatttgaaattgaatataattttattttaattatcactaaataaaacatcatactaaaagcggtttggtttgtttcttagtttctataaaaaagttaattagttcgatcgttttctctttgatagaatttgccaataacatatacacaataaaattatttttaaagcaaactttatttcaagaatatcttttaagttgtacaattaagtacaaacaaaaagggtacatgttcacacaatactgatcaactagtatagtatcacgtacgtatatacgtagcaccttattttaatatataaagatatagtgtgatgatcagtacaaattaacattacccagctatgaagatctcatctgccgtgtactattactcattcaaactttcaaccatctccaaaggaaatctaggagaagttcttgggcaaaacacaactctatagttggtcccaccagggcaagtaaaagtggaggtggggtcatcttgaggataactataagcatcaggacaccgattcttgaaaaactttgagaattgggtgggcccacagcttccctgaccattggtacaacaatactcattggtcttgaacacagtacatggattgttacaacccccgggagccctaagttggctagggcactgcccattaatgtcagcagtgcaccttattcccctacaccttcccgtagtggagctaaaatccatggggatgttgaaaccatccactaaggagatgtcaatgaagtcaaggttgttgtattggtttaaggcgtactcagctagtgtgtttggaggttgtccccacccttggcattggaggaccccaccacagtctcctgtttggcagcggccgcggccgctgctatcgaagttgcaattagttcgaccccatatgcgggccatctttgtgcccgcggctacgttgaaagtccatgtttggccacgatccagacggcggccaccaccggggctggccgctgcccagacggtgtatgagcaatcattgcggacttcgaaggtggctgcataggaagagacgaagaataaggttgtggtgatgattgaaagagtgaagaggttattggttatggtgtacattgttttgaacttttgattggggtgcgttgttgttgaatattttttttaaggtaaattgagataaagggaagtggatttatataaagggaagattgttagcctttggtttcggccatttatgatggacgaataagaatatcaagactagtgtaccatgccattttgttgaagaaatgctaattgtggttcataaaaatgtattaaaaaccattaatgaattatgagatgctacaatattaggtggcatttagttgaaagaaataaaaaaaagtgagaataggaatgaaattaatgcaatgtaattaaatttaaaatacagtaagaaaatacagaaaacaaaaattaatcttgcattggaaatgtttcttctatttcaaaatatcataatcatttcactaaaattgtagaaaagtcatttcattaaaataatattttatttttttccattccattctatttcatggcctattcttatgctacgaaattgttagtagtaataaacctattttactttaaattaacttgttagttatctcgaatctaaaacttgaatgaaaactcaaagcagtaggcggctagagataggatgaagttataatggagatggccaaagggcggcttttaggtatgatttatgaatattaattaatgaagctaattttataataaaaatagtaattatgttttgtaaattacaaatataagttcatcgtattagagtgactttctccattcacattagaaaaataatttttttacacaaagtggcacattttttaatatcttttttcacggccacatataatcttatacacttttacaagttatgattaattttttgagaagtttataataatatatatttttgtatctaaattattataataataatgttactacttttattgacatgtcaccctagctaaatttaatatttttaatgttttctattattttattaatttttctacatttttaaaagtaattttttagttactaatagtgttgataagaaatcaattagttatatttgcattaaaggttttacttttatatcatataatttaagatacattttggatgcctccaaaacttatttatatacatcttagtaagtaattagttatttttaatgtaacgccctactagcataggcgtgctactgtacttttcttaattactttcaagtatttgctaaccaaagggttttgttatgcccatatttcaagtattaaatatggacatgacaagtgaatatataagtctcaaaaattgagggaaactataaacaggagaaatgagataggtttctctcctcaaaatatgctacagttaatgatgtgtttgtcttgcattgtattataatatggctatcaaataaagagataaaattataaatacaattgaaaaggcaaaatcataggttcatctcggacttgatcgagataaacaagacatgtatagacagtcccactaaaactctaattgtctgtggtatgtctatttgatgtcccaatgcaatttttgatcactttacactaagacggtaccagaaattgaaaccctagttgaggatgtcaacttgggcaccaggtgaaaccctaggtgcccaggttggcttccgggttacaagttcatgtaatttcagctctcgaggcttggattaggttgctccatgtctttatggtacagaatactgaaagatagtgggctggattcaagttattgaagtttgaacttccatcctagagatctcaaagtcaacctgggtgcaaggttagggtcccctcccatgctaactgtaatgactccggtctactcaacttcgtgatgtcatccctcatgccacttgtcaaatattgatgttcacgtcactagggaaagttttcgggctaacaaaaggaaagactctttaaaattatagatatagtactattgcaatgagtatttgcaaatacacaaaatcctgtagcaggagtatttaacctaaattggaaaggtccatatataattaaagttattaatgttatgatttatttcctaaaaattctataaagacattttttattattaataaaaagtttaacattttgatatatgcttgaatgttaaattattaatatttattattggataacttatatgtaaatattaaaaaattcctttttcatatatataaggctatgacttgtagctgtacagagaactaagatcacttagctatgaataaaacaatcaataacatattaaagttatgaaatctttaattaatggttgatagtacggttaattgatgcccattcttcggtgcaagtaatctcgatttggattactattgtagtatgacatataagtgaatgtgttatatataatagaaattatatatgataagggtcaatatgaataaagctatctttatcaaacatatcgttaactatacatacctaattcatatcataatgatgatcaatagtagttcggcctaaatcttgagtaatcgtgaactcttgttcatgttattagnnnnnnnnnttcactcgttaaagtttctcaaaaaagatgatccttacaacttatattttgggaatctaataatatggatgactgggaacatgatctataattatagaatcatgattaacctaatggatcaaatgttggttccctttaagtgttaattctagtactagaaagttgtgtgcaaattcagatgggatctaaatcatactcccactagtgaattaatggtactaaaagataaagaagtaattgttgggattttatgccctanataaaacctatttcaatataatcatatctactaattaataaaagatcaaaaattatttcatgttgcatggttcacatgattactttcatgactatatgtttaatgtataaattctannnnnnnnnnnnnnnnnnnnnnnncacaattatagtgatgtcatcaccgtggaaagtgattgtgattatatgcttcaaagtactaagtctaatgatttatcaatgcattagatttatattgacgtgataattagcgataaagtttacttgcacttgtataagtggtatgtcatttctaggatattagtaaagtatactagtatgtatcaagtatacatcagagtggaccgatattgatattggataagatatcataaacttatggttatatctttctaagttaatatctgaaatttcgtattttaata

SEQ ID NO: 112902 - DNA, 5663 bp, Cannabis sativa
ccttttcttaaaattaaccattattttgttaagcatgtaatgtttctatataattataataacatgacaaatagtaaggggaaaatatattttttatgccaagtacttgagtaagattgtaattaatttttgaaaaaaaaaactaaagagaagattagggtagaagaaagagggagaaaaatggagatgaggacagaagaagagacaatgcacagtaaaatttcattaaccaacaagatagaaaattcatgtttgagtttcatgtcatgtaattattttcattggcgtattcaatagttatatcattttcaggtattgtacctttttcttctttttctttttttggaattttttttttgaaaaattatattttatttacaattttacaatctaaaatatttatatataaaaatatatttataaagtattaaaaatatattttttttcagtaaaaataggaaaattactaaaaaataatgaaaaatcaacatcacaataattatagagtttttacaaaaatattttattttttttatgcatcattcctataaattttatatatttaatacattaccaataacataaaataatttagtctcaataataataaaaaaaacctatcaaaatactttttttttacaataaatcataattaatgttattcacattttttattaatttaaaaatactatttaaattaatataatagaaaagaataattcaaacgccatatttagattactctccttaaaattaattctattactaaagaaataatattttaatattaaaccttcaaaacaaacaagtaatattttatattactatttttttgctagcattaatttactccaaaaatatactatacaatttttcaaaatatacttttctgaaaaaaataatgacaaaatgacaacaacgcctttttcatgtaacattaatattttcaaaaatacaaattattgaactttgttttggaaatatttttgttaaaaagagaaatgagagaagataaataagatacccttttgtgtgtcgtttatagtccattgggttcatggttttgtcgttggatgaaaacgttgatcacgtgcatattactccgtgaaaacaatttataaaagttctgagagccactcaacacagagaaggtaccataatgttcaaatcaatctcagccgtagattctcacattttaatttcatgttcagaccagtccggtcgccacaatgaaatgacaaaaacaccctcagttaattacttaattacgattcgaccccaaaagtttccaaaacacttcaattttgtttttcggtagtgaagaaaatctgaaatcgcatggactgtgacgaacctcttcagcagagcaagaaacgattcactcagaactctggctcacacagcccgaagcgagccatggctgagttgaggcactcgagttcgatcggagctcgatcctcatcttctccgatgaagcgcgacgaggattcctcccctttgatctccgatactcaatcagacgacgacgcacgcggtcgccatgttcacaaagatcgcggtgaccgctctttctgctcttattttcactctctttgcccatttctaaacgaagatgttagggtttctacgcaaagctccaggatctcactattcttgctcgtttttgttgttctcgtcgcttcgatctcgattttctccgtcgttagacgtttagtgagttcccttccattattcacattcatttgaattttcgtacattgtctttcgttagagataggttaatggaattagaagtgtagttgaatctcaaatgttgaattgtttggtgtttttgttatttgattgagaactagggtggtgctttgaaattgggatttgtttttttttagcttgttttgaaataaaatttgattgaatttggcgcctttgatactgttggagagtactatgatattaataatttgttagtactgactactgattactgattttacccaactttgttttcaacttaatacagaatactccatacttgtgtaggaaagatggcattgttcttcattgccctcaagtaagtattaaaagatctttaatttgattgttgctagcaatgctcctgattaaccctttaattcaaatttatggtggtgtttcctttcaaaggttaaagaatctccgtctctatgggagaatcctctctcagcaaccacttcttggaagccatgtgctgagcgtcgagatggcggtctatcaggtacttgattaaattttgttttctaaagttatatatatgtatctatggatagattataagtttagtgtttgatacattgctgggaatgcacagatgttcctcctgaaaatgaaacaaatggatacattttcatccatgctgagggaggtctaaatcaacaaagaattgctgtaagtcatgttttgatgaactgaactgaatcttattgacaaaataattgttacaatagccatattctggacttgaacccttcccgccgaccaagtggctacaataaccatattctgaattacatataattgttaaacctccccacttccaatagaacttgatcgtggaaattgacactagactcagtcgagtgaatcactaaatgagcattgtatggtgttgagatgggtggttctagaatgcagttcatctgctttctaaaaggattgatttgatagtttgtatacggctgcatttcagcttcccatttctatagagtaagagcttaaagtagcacgtaacatcaaactatttactggcaataaaactattttttgttttcttagatttatatttttgtgatgtgtttattacgagttattttgagccatttaatttaacagtttcttggatgcagatatgcaatgcagttgccgtggctaagataatgaatgcgaccctgattttgccagtactaaagcaggatcagatttggaaagacaaaacgtaagatttctttgtaaattttctcataacttctggtgttttctgattttgccagtacacattgttgtattttggaaataagggtaatataatatctgaaatttattggatgagagttgatgatgacacagttcttgctgcagccaccatgcagttgtgtagattcagttagtcctcagtgagtctaatgtttgcttgctgctcatgaatgtggaaatgtgtacaggaattttgaagacatctttgatgtagatcatttcattgattacctaaaggacgatgtgcgaattgttcgtgatattcctgagtggtttacagacaaaacagagctttttacaagcataaggttagttagtcttatgttttctatggtttatgtatctatcaatgtaattaattatcattttgtaaagagcaagatatgaagttttgatttgacacctattgacaataaagatatctgttaagtgtgaactataataaagggcttagtctgacctgcttgattgacaaaacctaaatatctgtatagttgtgatttatcaagccaagaaagagaggctagacctttgaaagttatctttctttttgtgtcatgtttagaagagtccttaaaattgaatttggttggcctagtacctttttgctgcaatttggcactgacaggtagcaaatctgtttgttttccagacggacggtaaaaaatataccaaagtatgcacccgcacaattttatattgacaatgttcttcctcgagtcaaggagaagaagataatggccctaaagccatttgttgatcgacttgggtaagtcattgtttctcaagtcttaacactaattcaattgtataagccttattgtaaaaatgctattttaagagggaaaaaagggtaataataacatggttttgatagatcattttagctgatggtgaagttgtattcttttaggtatgataatgttccttcggagatcaataggctgaggtgtagggtgaactatcatgctctgaagtttctgcccgagatagagcagatggctgatttattggctgcaaggatgagaaaccgcactggaggttcaaatccgtacatgtaagagttggcattggaaacattacctttaattgtacaggtgtacaaattttaaacctaacagtgctaacaaacttccacaaaacagggctcttcatcttaggtttgagaaagggatggtaggcttgtctttctgtgattttgtggcaacaagagaagaaaaagctagtatggcggaatacagaaaaaaagaatggccacggcgttataaggtaacttaataagtaataactgatgtatccttttcgccagaggagaacttaaaaagagcatggattataaatcatttgtggtccctgcagaatggttcccatctatggcaactggccttgcagaagagaaaggaaggacgatgtccgcttgagccaggggaagtggcagtcattctccgtgcaatgggttatcccaaggaaactcaaatttatgttgcttcaggacaagtctacggtggtcagaacagaatggcacctctcagaaacatgtttccaaatctggtatggaaatgtttcttgtaaaccaataaatagtcaatccaatctacaaatcgaaattgtaacattatgttactcttacccatgaattttgaactcaattctcagttttgtgaaatctgaatatttgtgacaggtaacaaagcaggagttggcaacaaaagaagagttggataaattcaggaagcatgtgactagcttggcagcactggatttcttggtgtgcttgaagtctgatgtttttgtaatgactcatggaggtaacttcgctaagctgattataggagctcgacgatacatgggccaccgtcaaaagtccataaaaccggacaagggtcttatgtctaaatcttttggagacccatatatgggatgggctaccttcgccgaggatgtaattgtcacccaccagacccgaacaggattgccggaagaaaccttccctaactatgacttgtgggagaaccctctaactccatgcatgtgcaaagcctgaacaatgaacatatccagctcaaaattttaaggccttatcgactctgagaactcgggatataatgctaatagaaatttaagcctgaaggccttgaacaaatctgcttggagtggcggccattgcgaaggctgacgttggaaatggaagagttagcaggcgaaaagtacagacagcagcagggatagatttttttttcttattattttaacaattttatgtcgagccatcatttttataacaccatttgttgtatcttcttttcagaaacaataggcgatcaaggttacttaaggttaaggtctcgatttttttctaatttttttttgggggaaggggatgggagttttgcagttctgttctgtctcaagaacaacataaaattttcatgtatcatctaaaccgtgtaaagttacaagtgaaatgtgaagggtttcttaaatgcggctattgctggtgaaaaccttaatcactctaaattgatgagtatatttacttttgagattgctataagttttttttaatcatattgaccaaaatactgacagaaaaaaatccactgattcattcaaagcgatgctagctaagagacttctttttttttttttttaat

SEQ ID NO: 112903 - DNA, 2681 bp, Cannabis sativa
  modified_base (623)..(660): a, c, t, g, unknown or other
atagaaaagattacattgaaatagagttttatttagagcacaaaacccaacatatttgtactgaaaatagaattttaatgagaattttgcatgtgtatatttgtacacaaaattaattattgtacaaattttgcgtagacataagattgattgaaataagagttatagagaaatataatcatgattcgattatagtctggaatatatatttttttaatcatttatatgtctcacataaatgttgcaacaaaagttatttatctgaagctcctaatattttgtaattgaattattaataaaaatacatgtatatgattgtctgtgcaatataaattcataaattgtacattgtaaaaggctcttgaagagttttttaatatatttataaaaaagtgaagaacaaatttttatttcattttgtataataaaaaatattaaatatataaagtttgttcataaattaaattattagtagagaagtcctgaaagtacttctttgcattaagaattgtagacatatgattatttaatatagaaattaaaatcatacaataagaatggaataaatatatggtcttcacgtaccatcattatcacgaataaaaattattattattattatnnnnnnnnnnnnnnnnnnnnnnnnnnnnnnnnnnnnnnttattattattattattgtgttatgttaatatttacttaaaaaatttaaactttgggttatgaacaatgttatacacacacgtgaatgatttaataaattagataaatattaatattccatgaacctctcatatattccccataatttagagggtgttcacctaatccaatcaacattatttagcttatagtgcatttgatccgtattaaatgcggattttatattttggatccaatccaattcgcatcatagcttcgatccaatccaatccaatccgtaaaagtacagattagatcagttattttagattggttactttataatattgaattacttaatatctataaaaaaaaaattattttttacataactgacaacaaaaaaataaattattattgtcttatgtctctaacaacataataaaataaatgaaataaaaaataagaaattcgaaggaagaaaagaataaatatagaaagaaattgtttaattttgttttaacttatatttttcttatatataagaatggaatatacatttgatctattaagttttacaatatatttgtatcatatgtattaaatttttaaattactattttttacattaaaatattagttgtatatataatttttttaaattatatataaatatgtatagattggattgggtcgattacatttacatgtgaatcaacatccgatctgcacaagtgtgaatatctgtattttacgaattggattaggttgaatcgtgcgaattgaattggattagatattttatgaacaccgttaagtccaaacatatactctagttatgtaaatatgtgttcattgataagatatgatgatattttaaagtgatgatataagaataattatctatgagatatattattactaaaataattatgtattatatgtgcatgaggtagagacatattcatgttgcactcgttttttttagctcaggttttgtaccactgaatttttctaataagatttttaacgaggcatcttgcacataattatgaatattgtatgaagatgagatataaatgtattgtacttttttttttcttggttgagattttgtctcgttgggttatcctgataaggtttttaacgatgtaaccttaaatcatgttgagaaacttgcaattcataaaacaagtaaaaaatgtgtgcgactgaaattattaacgtaatatttttaggaaacatgtgaattaacacccaataaaaaagtactaaatacaaacagtgctctaagaagattcttgcatcactcaactaaaatgaaaatacactaaacgagatagatataaactcataattttcaaaaacaatggtaatattactcatgttaaacaaatttgatttcaacaaaatcattacaaatatcaacattttagaagatctctaggaatgtcatgaagggaagtcaatacacactctactacttttctcttgatcaagtttttgtcctattaatatttttgacaaaattttgaataagagagttattatgcacattcaaatgagagtattataaaatattattatgaatgtccaaatcacataaatttattatcaccataaatatttaattatatttcactttattttattgatttagtttcctatttttttaattatatttttttgtataaataaaaaatcactatattaaaataaatttgtcaaaaattctcattcccacgttctctcttaatctacatttacatttacaacttcttctttgctatattatatgtattatttataattgtttcataacagtttgaacattctcatatacgtacacagattagatttagattaaaaatgttaaaatctaatctacactggattagatgtaatttgatgttaagtgtgatagttccaatccaatataaacttgatatatctattctatatatctattctatataaagtgtgcctatataactaaaattcttggtttatgagaaatttatgggtgactttttatttttatt

SEQ ID NO: 112904 - DNA, 3618 bp, Cannabis sativa
  modified_base (506)..(507): a, c, t, g, unknown or other
aaaaaaaagataaaacgtgataaaaaaaaactcaaaaaaagatagaacgtgcattgcacgtggttgttctctagtataatttaatatattgattagttttgtgtacacgtttattttggtgttattttttcagttcccatttttttgtcctatttttaataataataataataataagaattttatttgctatcctataaaattataaatacacttcattattaaaaaaaaataaacttaaataatttttaaaaattactattaatatattttttaaatttttctcatattattttatattaatttcaatagttattttaattttattttcataatttttctaactcatgaatatatattttttcaaagaaaatttcatataattttttattataatatttaaaaaaataatttaattttagttgatagatatattttttaagattatgaattggaagaaaaatgttaaaaaaacttagtccaattaaaaatataaattttatatnnaataaaaattattaaaatatgatacaatttttgagatataaataaaatttcctaataataataaaagatattaattttttgttaaaaagaaaaaagatattaattccttaaaaagaataaagatattaatatttgataaacgtgtacagttgtagaagtactgttggataagaaataggatataggttctctagagagagaggatctgcttcctatatatattccaacaaataaatgaactgtttttcgattctcctggagttttcactagtcttcttcatcgtccccaccatatccctcatcctcttcattactcatccaaaatagaaaccctaacaccaattataagcctataactatacttaattacaacaacaaaccccatctcatcattaattataaatatagatataagcatgagattcaagttgttcaagtccaagccacgtacccctcgagagctcattcaccactttagagatcttcttttgcttcttcatgggaagagagagaaccgagtacacaaacgtcaagaaaaggttaatttatataatatatatttatgtacattgtttatttatttaaatataattacatttacttataaattcaattggatcattcgtttattctttttgaataattcttctgatcacaatactaacttttcatgattcatatatgtgggtatttttcttatattttttttttattattattattttggcagatggaagagctttgtaaacgaatatcagagattaaaataactctgtttggtgacgaagcggaacctagtcaagaagcttgctcacaactcactcaagagtttttcaaagaagatacttttcgtattcttatacttttcattccaacacttaacttaggggtatatatctatggatcacttatatttatatttacttcattagcttgttttctattgtttatctgtatatattaatattcaatcctcaaactcaaaaacatataaaatttaatattatttatgtacttaaataaatatggttattcttcaaaaatatatatatggttatgtgatttccttttacagtcacgtatagatgctactcatgtgattgctaatctactaaggcaacaagtgaataagtcgaggtttgttggtttggagtacttgaaaaataacttagatatcgtggatattcttctatctgggtatgttttaattttatttccattgttcttaataaaattgataatattattctatagagttaaataattgttacttgcttttaaaaaatatcagttatgaagacacaaacgccagtgatgttactttatcttatggctctatcgcaagggagtgtattcgttatcaggatgttgccaagtaagtataatttaattattatatataaagagtaaatacaaacaaaaatctgcttagaaaacatgaaatatatatttgaaatatatatgtgatgtacaggtatgttctagactcacagcacatgaagaagtttttcaattatatacaaattccaactttcgaaatatcatctgatgctgcattaacttttaaggtgaatatatatggttaattatgattgatcatggttaattttgcttttctcaattaattatatctgatcaagttgaccaactaggaaatattaacagaatttattcagttcaagtgtgatctctctctctctctatatatatatatatacccgattgagttttattactttaattatttcaggagcttgtgactagacataaatctactgcagcagattttcttgctaaaaattatgagtgggtaggtttaattaacctcctttttcatcaataactcactctcttctagctatatacatatatagttaatgataatccattataataagtttttccaaacctgtattttcagttttttcaagagtacaactctaaattgcttgattcttcaagtaattacatcaccaaaaggaatgctgccaagggtatttcatttttcatatatatattatggaagttttttatgatgtaataaaaagtaactatatatttcattgggtgtttttcttaatagcttctagcagaaatactacttgaccgatcaaacactggtgtgatggttcgatatgtgagctcattggataacatgagagtcctaatgaacctactcagggtgcgttacataattagagtaccaaataattaattaaatggggtactaacccaataaattttttaatgacattaattattttttgatatatatattaatttgcaggaatccaatagaggaattcaattagaaacttttcatgtgttcaaggtattaattgtaccgttaaatatatatatcgacaattatcttttgttttttcctctttaatatttgactaaatctatttttatgttggtttttaaaatatgaaaaagctctttgtggataatcaaaacaagcctgaagatatagtacttgtgcttttatcaaataagagtaagctgcttcgtttttttgaagacttcaatgtgaacaataaaggtgactaagtttattaatttatgttatcatctgattatattttattataatatctgtggaatttttatgttaatttaattttgtttggcagaggatgatgagctgtttttagcagacaaagatagagtggttaacgaaattcgtaatcttaaacccagaaagcttctatgcagagctaataaacatcacgagattatcccatgtgtattatctaagcctgtgccacctcagcaaagttagtatccattttgctcgatttgtggctatgggttgttactttagaatgctagcttattagtcttagaaaatgttgttttagtctttttcatgctataagtgtagtataaatagtatacaattttgaataagataaatacaaaggaacacttttaagtatcatagtaaatcgttattgatgtattttaatatcgaatccaacaaattttgatttaataaataatgaggagaacggctaaccaattattggatgccacatcaaaatttgaaaaagtgaaaattacatcaagtatgggattttgtaaaaaagttacaaaaatatggcattt

SEQ ID NO: 112905 - DNA, 7378 bp, Cannabis sativa
  modified_base (7344)..(7347): a, c, t, g, unknown or other
gaaaaaagagagggaagagagtgggatttgattgatgagtgatggggatagcacacgtgtatgtgcatagaatgatgactaagtggtatttttgtaaaaaaaacaaacatggtaagtacaaaagttgatataggcgtgtaggagtatttttgtaataaattgtgtaaaatagatttttcatgtaaaaatttcattattataatatataataaataaataaatacattttagtaaaaagaataatttattatggaatcttttaatcaaaacaactttatctaaaagttagattgtaccaattttagtttttaactttagcttttccttaaatttttcaataagttgtattttaactgcttaccaaaacacttttttatcataatttttttaaaaaataacttttaattttttcaaaaactgtaccaaataggtcctaagtaatacaataacgatttgcaaaattgataaattcaaaaaaaaattgtcaagaaaaaagttttaaggactattttactaatctgaggcaacatgtaaaaaaggaaaaaaaaaaaaaaaaaaaaagctagttggaatttgttttattgcatagactaatagaagttctttcaatgtgagatatacaacatatgatgaaccaagaatatgatggtttactagctaggcgaatcaatctcataatgcataatcataaatcaacaatggttattccttatacaagtctcaattttgtacaccccaacctcacaattatatcatcactcctccatatcctaatttccatggaactggttgtgtcagcttaaatgtctataaaccatgttacttgaaaacaactatagagaaggaatatgctctttcttcacataaaacttgttatgttctcctcctcatcacttggatgaaaaaatagcatctaaatctttgtataaagattttggttttgacttataatctgaagaggaacttacatttggactaccactctttttggctccccaaatctcactccatctagttcgactggttgaagggtcacttccagttccatctttactaaagctagctttagccatttccctcaattgtttcatccatggtttttcggttgagcctgagctcctgcttgaacttttaaattctccaagtgaaggagtagtgaaatcagattctcctctcctgggttgtgagaacttattttctagttttttgatcaatttctgtggtgagaatggaagtatgcaaccaattgaagctattttcaagcctgttatgaaagatgtctcagcagggtccaatatcattgtctgtctgtataaggcataccactcactgattatctgggaaatatatccaacaaggaatagtataaccatgaatatcccaacttgagtctcatggctagatgaaagttcattcccgaacaggaacaaacaagtagcaaataggccaacttcacaggcaaccgagattatctcaaccagttgaacctttttcttgataaatggtttcttgagaactatgaagaaaagctgaaaagaggttatgcacaataaggttagtgatggagttcttgaagaccaggtctccatatagattccggccatgatcgctagtgaaactcgtttcatagattcaagcaatgtgtagtatattctcaatattccgaacagcttttgtatgaaaggtgcttctgcatcttctgtttcatcatcagaagcaatgatactatcgtcatgcttgtgaggcaatggagttcccccagaaatctgtgagagcatgtactttggagggcctcttagatcttcaaatagggggcctaagatgatcatgtagagtgagtttgattgccttttccaagtccactgacccctcttaccaggaccaagtgtaacacgaataagttcttgataccaatggaatgtctggccttctcgatggacttccttgtactgaagtagcttcccaaatgttattccaaacgagagaaatacgagcaatgacaacagcagaaatgacacgacgcttaacaatagaatgccaactataacccctgataaatccattccttcaatgaacaaatcaaaataaacattaatgagaataatggagagtcctaaaacaagtgaatttataaaatcttatgtagctaatacatagaaacaagtgaatgagtcttaaagcattttccatttttgaaccacaatagtctatgaacaagaaaagccaaaagctgaagggcattgaagcatgtaacattgaaactacctttaactagagcagcggaaacctcagaaagacaaggaagtgctagaatgattagaaatatctcaaatcttaggaatgtgagtgctccatagcccttctgattttcagtactctttttccttatcttcagaatgaatatgagtaaaacatgcagaaatactaaaccaccaccaattaaagctaaccagaacatgcttctatagaaattcttccacctacaaaaaaagataaatgttatagataatgaaggaaaaactaaaattgagtaatcttttaagcatgaacactgatctttttgtgaaactttgattgatgcatttgactacatatttctttagtctgttatagtgtatctacatgtataagcaataattccaagagtaacatactcatttgagtcttgaggttctaaaagattttcagcttctggtttcatattggggttctgcaatgacaaatgtactcatcattaatttccatttcatactaacagaaggtcaataggaacaagaaaggttagcatttatacctcaaaaaagaatctgtagtccattggcccaagaggtagcccatacacttgagtagtcatatttgaattatctttttctagttgcaggctttggaaactttctgagtcataaatcttggagattaaagaatctgagccggtaaaaggactagagcccaccattacagggctgctgtgctcattttcccaggggagatcaaaatagggaatactccactgtaagcctctagtaaattcataatactcaactggtaacataaccgccaaccatctagaaagtgcgaaaacctgaatgtggcaagcaattctctgaaagaaagaaaaaacatatataaattactgatttagtttctattttaaaattataaggttcagtatcatacaaatagatttcttgcgggataagttgtcaaagaagatggtcctttaaatgtccaaaacttttgaaggcttgcagttgaaaaggtgagaatcccagccacaactgatgttgccaaaaatgaagcagttacaagtgcggaaatcacagaagatcccagaggtactgaatctgtacaacgtgttcacacgtaaaacttccaagaagagtaacatcctggcaatatctatcttggtacagttattatagtgctatcaagtgaagtcaaataatattcttacagtgcttcacttcaagaacatttgaccccagatttttgtttccagcaacatctttagtaacattttcgggaacattgacagatactacatcagcacttggtcgtatgtcaatgatgtatgtgttccaatttattttctgaaaactggagaatgcaagagaaaaaaattatataataaatttctagaaggcacatctgtctacattatcaagaacattgcttacatagctaaatatacatgcaaatggctacaaaatagaagaagaaatgaagattggaaaaatggaatattcatgccttttcacaagccctccagtgactgatacatgagaggagttgaagccaaaaacaggtttcatgaatataattgatacaggtatgttgtgttcttttgtccttgtctttatagtagatgttgttctcaacttcacagcaggcctatgacaatcttgagttcatagcacaacattgaaatcaggaatcttataatttaaaataaaatacataaattgtgtaactatagccaatatcacagtcaagatatgagttctttactttcttttgtttctcgaaacaaaagcagcaatttttaccataaaggaatgttacaggtgaaatcggagaaactggagttccttgtctgcttattatgatatctgggttgatgctcaatgtgactatggaattgctagatacatcattaacctgaaagaattttaacaggtacacactaaggattataacttagtacacattggcactaagagattataagaatcagcaaatacgccatgtacaaaaaagtaagaactatgaaaaactgaccataaatccaaatctttgattccctatgttctttccatttataggaaggagtgagccctggcttatgttcaaagaccttagaacttctgtagatgaattcaggactggttgtgagaaatacagatacactttaagatgattgaaattatttgttgccagtactgatctagtttgaccatcaagttcaagtagctgctctggaattcgaatccttatgtcgacagatacatctcttctgtctgcacataaacccatcaaaaaaaggggaatttgaataagagacaatactctgctgcagaaattgaaaatgaactataactcacttcacttcacttccagaacaaaaccataatttcacttatcatggacaagcatactcaccaaaatgaacaaagaaaatcgaatttgttgttctaatgaatctgtttccagcaatatcagtgcagaaacttttatccattgccagaaccactcttccaaattcaatttgagatgacaaactaacaacaagagaatatttcaggtttggttgcagaacattaagtgaacttggtataactttgcctgcgccataaaccagcagctgcagaaagtatatggaatttacattcatttaatcagcagacacaatactaatcattacagaacaataacaagtagaagtatttatgaacattataaatcatagttatctcacttagcagtgaagcaatttctataattcaagttcaaaagaattttcgaaaccaacaatacaaagagtaatgaatatgggttggccacctactcacgttgcaggcatttgtagacaaacatgtaaaacctccttcaccagtacagggttcactgaatgatatatttacagaaaaattcaatgcatttgtaaaagaattagaggtggtaatagatgctgtaggagatactgtatctgcaaaaacaataagatgaaacacacattaacttagcatcttatgtttacttaaactctaatgactgcaaacatagcagctaaaacttaagctcattgtaatatatttattttccccaattttagagactaattgacttatccaaacttcacttgggcaaaagttccaatcttacaataccatttaatttgggttgactaagtgtgaatataataatattcttttacctcttgagctaaagcagggcaaaatacaaagttggtaaatttggggaaatgcatgtcttagtttcatttagaaaacataaatgtcttcaccaagctttgttttttaaagaaggattatttaccaattgtccagttatagctagcacagccaactccctgaagcctattggtgcagacttcaaatgtatgagtcccatcctgcaaccccaaatatgaaacttttctagtttcacaatttgaggcaattccaccatccagctgcatgcatggaaaaaaagttaattgaataattaaccatctggtgtcttagtttctaactagcacagaaaacaaaagaaaaaatctcaaaagaagaaaatttaaaaaaccagatgtaatagaccaatatagttactaagaatccacatagctatgattgacactggaaacctagaaaagattatactttcactcatattttactcagaacaagattgaaaagaaagcataccctgcatgtgtaggtacaatctctacagatgctcccatttccaacaaggaaaacctcaaatacaaaagttgctgagttcaaatgtgagaatgcatgaggagctttcaagaactttacagggacctctgaaccattgcatcgttcttcaaagcacagaagtgaaaaagcacagaaaactaagaccaaatgagagtttttgagcaaacccattaagcaaaaaaaaaaaaaaaaattaacccactaatcgagtgtgagacatgcagagccagacagctactgccaaaggttaaacatttatgggttttgtgtaaaaacaatgttgaacagagagagaagaagagatattaatgaagtattagagatagatagtagaagaaaatattaaatggatgagctttggccgtttagtggttcatgaagtttcagtaacagatagagatagtagtgcgtataagacttggctatgatatgtagaagagctttcatggaaagataagagagagagagagagagagagagagtgaatttatattttaacaaagacagatagagacaggaaagaagaatcactggcgagaagagcagtactgtctttgcagtaggggcattgtcacggttcaaattattggaaatttggctccttttactgctgtgataattattagtttattatttgtatttatatactatcttcacgtcaaaataaacttacccctctctctatatcatagtaaagaatgttacaatataagttttctcagcatcaaagtccaaacataagtgtatgtaatcaaaaaaatcattaaaaaactaatctttcgaacaataagagctaataaaaggtaggcaatcttttagacttttcttattagccatgtttgttatctgggcaatgaaatgattagattgacccactactaaggccaaatccattatataaataaacccagaaaacgtttttgtaaaggtcccaccatgagtctctctatgccttcttattaccaacttttgttcaggttctgatctgatctgatctgaagctccattcatgttctcttttcttaattgattttgtcagcaaaaaaagagtaaaattttaataaataaataaataaataaatctcaaggttctccgtgcatggacagttgctaaggaaggagggtcgaatcgaagaccatgtttagagctgtttgaaatgatttcatggaaggaccccactcactcactcactgatgatcttggactccagctaatccaagttttgccatttaagatgatacactatatggatggtatttgcttctctgttcaggaatgacaacatcaataattatgttctaataattgatccaatattatttttatataaaaaataaacacatttatcacaaaatattagtggcgtttggtaacactttnnnnttttaattttaaaaacagaaaaatgaaagta

SEQ ID NO: 112906 - DNA, 3049 bp, Cannabis sativa
taattataattattaaataaatagttttgacatttataggattcaaattggaaaatatagcattattgaaagaaatgatgaattatgaaatgaagtggcaaaattgtaactagtgaggcccatatgtgtggccgggcaattagtgatgatttttgtctattattttatcttttttaatccatatagttgaatcataaaccctagaagaaatactataaaaggaataagatgctctcattctcatccaacctacctgaagctagttttcattctctgtcagacaaatagtagatgagagactcctttcatagtgatttgtaccattctaatgttcttcatcaaattcaagcctttagtgatagagtaccatgcccacccatagctagtcaagtactcaatcatagtgcggaagacggtggttaaccaaactgaaggagagaagatacaagttcaaatcttgataatgctctgccacagaaaggaatcaagggctagaaatttgaacggcaggattccgctgctatcaatgtaaggttttctaaactttatatgtatttatttcatcatattcggaaatttatatttagggtgttagattatagattataatcaaacatacatgttagtaaatatagatcctcgtaaaataagttccaacactcttagctcgatcccttaaggagaatgggaataaccttaatctgatggcatcatcactaactccaattatatcagatgtctggcacatctcctcgaagttaggaagatgcatgtttgggtcttctgatagtactcccccaagttggactgtagattgaaccatctgcagtatggacgggttgatctcaaaattattggcttcaatggcaagtggccttatacaggatctagcccctgtcatatttggtagcatataatccctcaagctacagttaggtggattgcgaccattattgccattgttgtcgttattggcgttgtcaaccatgactacttcttgttcaaccccaactacacttctttctagcctcttgtttcttatgtttcttctataagtcttctcaatttcagaatcaataggcactattacattttgtccttgacgccgcataaaccaccaataccttaaatagaataaaaataattgaaaaaaaactagttaacaagaagcagaaagaataactaaaatagaatttaatctaattattgtaatatcaatttttattcaattcttcgatatcggtgccaaaaacttgttgcttaaaattatagtctgcgcaagtgtacgtaatctgttgtagttaaatactcacacatgtgaggtcgatccacaggaaattgaaattgaggactacttaattagatttgtgtttatatttggttaaattaaaaacaaggttgaacaatttttaacagaaaatttaaaaaaaaaaaaaaagaaacaataatactgtagttgactatggatgaatgattaggaatatgaatcctgttattttagctacccaattgttaaggtaaaatattagttttctccctttaaatgatgatagattacaagaataaccttaactcttttcaaatcattaaggtcataaatcatatattatctatttgcatctttaaaataagttaacatataatttgcattgaatacagaatctaaatgtcacataggctatgtaaaaacttttgttttacatcaaaatatatgtttgatctatcatagcatttcttatattcacttctcaaatttcatattaggatcataaattacattaaagatggtcagtctaaaatatttattaaagtaaataagaacaaattacacatgattaatggtgaaaaatatacattttttgatcttaaagtttaaaataaattaagtttaaattaatatttttatgaaactaatgagatatatttttattttaaaaatattttatttgaattttatttgttaatattttgtaggaattaaatggttttattgtagaaaagaagaaaagaattaaagctgaaaaagaaatatagtagaaaagaagcccaattgcaaataaaaaaaaaaaacagaagagaaaggaggaaaaaaaaagcccaaaagaagagcaaattttggcattttagaagtagagttgtccgaagaaaaagaaagaaaaggaagaaaaaggcccaagagaaagcccaaaatgagcagcccatcccttcattagccatgggtcccgcgccacatcagcgccaaatggcgcttctctattcgttctaggagcttacatcagcgcctaagtggcgcatcctcttcttcaccagctcgcacacgtgtcgcttctccattagttgttactccctccacgtttcttctattctaccacatggtgagtctttttgggcttgagtgcactcaacccatttgaagcccaaactttcacaatatcatcttatggaccaccaaatcattacaaactaccaattcattctaaataccacaagatcaatcataacactcaaaataataatatttatcatattaaaaatcaatattcagatttttgatatatttattttgtaacctaaatttattttttattttgcattttaatcatttttagactctataaatatgagctaattttcattgtatgaggtgcgtaatttttattgtaaaaaaactatagtaaaatttatcttcacttttcttctcatttttttttctaaaatttttatgaggatgatgagcataataacctaatattccttggaagattagggatgattctatatgaaagtaaaattattttgtatctttgattactttttgttataaaatttatttgagtaatgctagttcattttttactgttatttttatattcttcatctatctatactactatatatatacagtagaacctctatttaagaatactctattcaagaataacctctaattagttttaaaaaattcaagtcccaatttgggcctattataaataagaataacctctaaattgtaattagttatacaatttctaagtcccgtattaacaaa

SEQ ID NO: 112907 - DNA, 7849 bp, Cannabis sativa
aatcactgaaacagtaaaattgaatgaaattggacaaatgtccttaaatttaacaatctcaatagttcggggagaatttctaacagtcaaaaaagctcagggacaccatttagtacatgtcaaaggtggggaaaaaattattaattagcctttttaaaaatcattcttttcccccccacaaaattagatatattaataaaataatttatttaagatatttcaaatttatataattagaaaaatattatatatatatcattagctagacgatgaaatctaattctttaatttgataacatgaataagacaagtacttttttatgtattatttagaccaaatccagaaatatacagtacacatcaagccaaatcaacaataatattatcataatcaagatgattatcataaccaaccatgtcgtaacttcccaaaaaaaaaggttcatgtcacaaaagagacatcaaaaatggacgatttgaagaagttgacaacaaagaaagataagaagtttcatcgtcccaactttccttcaccaatattgatccctttccctctagtattccttcttcttttgctcctcggccaaacggcatctccattactacgctcattccaccaccaatgagtttttgcttagccaaccacctttgtacttttcccgaagtagttttaggtacacatccactctttactagtaccaccaaaccaacttcaataccctcattttctttcattacaccttccctaaccccttcacatatttttatcaaaatattactactaatctccttttgatcatcatcactttccctcgttattaacacctctcccacaacagttataacttctccaactttaaaagcagctaagcaacctcctctaagaaacttagtacaagttttgtaagccgaattttctatataatgtggatggatttccttattattaatgccatttcttaatctgataacgtcaagacatcgaccggtgacgaagagaaacctctctttttctttgacaacacctctatcgccggttcggacaaaacaccggcctaacttattcctcagtctcccatgaaacacctcatgtgttaaagacgggtggccgaggtaaccggaggcgttgctcggcgaagatacaagaatttctccttctgttccgtcctcaactggctccaatgtttcttcatttacgattacaatttccatgtcttcgagttcttcataattattggattcctggagtggagcgagttttgcgcttggcaagaggttgttgtgagttggatagttggatgatgatggttcccatgaagttgatacaaaggtgcaattctcggctaagccataagatggagaaatagaacaagggtttaaaccaaaaggcctaaacatgttgacaaactcttctacggttgacttgtaaattggctcgtttatgatgatcaagtttctcaagctacttaggttaattattattggacatcgttgacctttctctatattattaattccacgtttgatgacaagtggcaaagcgaaagatggaactggagtacaagtggctttaaaatgagatataagatcaagccaaagctttggccttttgacaaacgacatgggtgacgtcaaaacgcaagtcgcacccgagactatggttaacaacaaaaacataaggccacaatcatggtactgaggcaaccacgagacgatgacactgttgggatgaagatcataagctcttctagccgtcctaacgttgtgagctgccgaaccagccttgaccagaactggttttggtatcccagttgtacctgaagtgtactgaaccaaatacacatcttccgcattacaccctttatacgacaaaccagaatcgaataacttcaaagatgtcgttttggagtactgcttgacatgttgagttgagatccactttagtttttttaacaagcttgcaagttttgaagtggccgaggaggaagaggtcatgaattggtgaacttcggttatgtaagtttggtgagctattgctgctttgggattggtttgggataagactcttataagatggtggcagttgtctgaagttgggtctggtggagaaatgggtacggtcaaaaggccagctctttggcaaccgaatatgatttccacgagttccagccctggggagcataaaacgacgacggtttcgcctctttgtaacggaaccaggaggagttgggaagagattgattggacagagtcattgagttgatagtaagtgagaaacgacgtcgttggaggaccattgggtggaccatcctgatcaacccaagtaaaggcaggtttggaccgaaaagctgggaggttggcccatattgggaggtaaagatcgacgacaggttggtcaggaaaataagggtcgtagttctcgtaattcatatcgtttaagtgaagtgaaggaatgacctcagtcctagctactttcgaattatatataagaccagctggctttttatagatataaccatgcaaattacaacaattattttatgtttatattattagtattagattaaggtttgttcattaagggataaggtaggtagtgtggagattacgaaaagtaacagttggaataaagagatattccacaagaatatcccactttgaaatgtagagaggtgtgtcgcattgttggtgttaatattcatgtttcacaacttaccatgccgtatgtgacgagactagactacagaacacctgtatccagccatgatccccatcctcaaatttaattatatttatttttatgtaattgaattaacattattgttataatgtaatgttttacaagatataaggggacagaatgtgacccaggggagacacaaaacacaaaataaaattgtttacttataaaatagaatatattccgatgataacaagagttttgatgcattatattatattatattggtatatacttatacaaatactgggatgcctatatgtaatgcttacttaccacaaccttaatcactgacaaagagttcgttattaaacataaaataaaattgtagagttcttaggtgtcattttcatttcggctttttctattttttttttttcggaaacatatcggctctgaatcttaacttcacatggtacataatataaaaattaataacttatttgtcaaacacattttaatatacctaagttttaataattaatgacataaataacaaatatttataatttataatttattatctgtttagttatacccatgttactttaaactaagtaatttttttataaaattaatttaatatgtatatccttctttgtataaataattttatttttaagtgtgatattaaacaaagaaactttaaaattcagattttttttttatcaagagaaattttattaattaatactaacaaatttactacttaagggcataccctttccaattcacattctttttactaaagtcgtcttaaatatttttgggctctaattaattataaaaattagactctgacaaaaaaaaaagtataatttacaagaatatcttttacaaaattatgcatcaaaaaaactttattttattaaaattattattaattctgatacaacttcgagctaatatcatacttctacttaaaaagagtcatccataaacaattgaacattctattgattgttgatcattcgacccttgaaaattcctataaatgatattattttttaattttttaaaattgaaaattggtttgatagcacaaattaatttgattcccttcctctcataaatacatttattaagttttgatgaaaaaaattaagcttgaataaaaatatatagtgaaaaaattagctcataggatttcaaaaaaataataataaaaattggaaaagttatggcgttttctttcttctcgtaaatagttttgagttttaatgagtttaaactgaataaatatatgaatatatatataagttttgatgaaaaaacttttatatatataaaaatatatataaatgaaaaaatttatttagagtatagaaaataagatttgacaaaagaataaaagttaaaaaagttttttgattttttttttttttttgtttatcgaaattttcaaaaactgattataaaataaataaacttaagaaagaagtaaattagacaagaagagactaaaatttttacgtggtttgagtgttaatgaactctaatttacgagtcaacaacattgagttagaaaaacttcaaagtatttcatacaagtatttatactctagttgaagaatcttaattctcaattcttctcccaagaattcaattttctaccatttgcataaagggatgttattctatttataagggagaactgagtatgggcatacttagacttgataggacttttagggatcaactaggccctctgatggcttaaatacaatagttattgactttgagctacttgagtgaggcccaattcatgaagacatgcttgtccgtacaagtagaggtacacttgaagatgctagatgtcgtgcttagctgagttcgtattaggaatgtcagagaatacggcattggataatagggtgatcttcttttggtagcacatgcactctgccaatctattgtaagggacaaaactgtggggccccatgtctggagggttccatgttggttaatatacaaaagccatctgagtgactcttcaattacccacttatggattatctcttgaaggtataccgattggtcttgacagactcttcgcttctgggctgaatgaccttttttggaccagggtggtctagccttggtaggttagcaaattgggcttatgtctaaatcaaaattacaatttgaatttatcattgggcccagcttttggctgaccttggctactattaggctttaaaattgtacatgacgccattccaaaaattcagataatatttacctccaagtcttcgaggcataagagctgcggaggcttgtaaccctcctttcagattcgtttatggatgcggagctaggaactaaaaaagtacctttgaaattctaaagtaataagctacggaagcctatggtcctttcgtctgcctggaactaaggacacgtgtcgagagcttcttggtctgtgcacaccaagcgccttagaaaggcgtgtggaatcttgggatgcgggttgacaattggtttatgtcagcaagattttttgaggcatattttatcatttgaattacctcgatcctaagtaaggcattaaatgacatctcttccaataccagactgtcagatgcaagtgtgattttttaaggcgtgatctgaaccattacataagaagcacgcggatcgtcaattttagtacaaatatagcgtgagtcacccattgaccattttcaccacttagagtttttgaacccaaattttctcgaggagaaaaatcgttcgagagaaggaaaaatccccaatttacttttggtgcatgtctaaatacattgacgagctactttgccttcttctctaaatacgtgcaatgttaagcctaggtgcaccacccctaaatcccaatataaaaaaatttattaaatctgtaaaagtattgtaaaacaacatgacctggtttgtggcatagttggcagattgttttggactgccagttttgatttgaccatcgacctccactaccacgacctgaggatccatgatcacctcgattaaatgataaactggtgtcatctctatttttataagctccatgtggtgaaaattactgttaaagcctcctcatgcaactgtatatccaccatgatttcctccaaaggatcaatttcctccattttgtgccaaattagcttcagcattggagatgtctaattcctttgatgatttgtcaattcttgcatcttgagccattagtattcaagctttgcaatattgacctattctttcctgatgttgggggaggtgtaaaaattatcgtattctggcccgaggccattaaagatagtttcaatattatcagatacagtgaaagcatgtccaacaactttaagcatatcaacaatggacttgatttttagaaaatattcactaattgaaagagagtttttcttagtattgcgtaactaagttttgaatgacttatcttggagctggtctgaactgtgaaaaattcttgaagagctgcccaagcttcagctgagggtcattctagtgttcatttgatcgttaatgaagaatagcatccacggcaggagctgatcttgagcttcctagtacaagacgattagcatctgagtcgtatttagggggagcagaattcaagacgaagaactattgcagacgatgtccacgaacaaccgtcaagatttggtgttcccataaaagaaaattattctcgtcgagttttgatgataacgaatgtttgaaggcgactagttctttgaaagcttgttgatgagacgtggtagcagaagactatccagacatagcaaaaaagaagaacaacgacaatgaaaaagaatcgagagcaagagctcaaagctctgataatatgttgaacgagagagaaagagaaaatatagtgtttattcatttattgattttgttgagaaaaggtacagatgaatgtatatacaaagcaattagaagagcaaggctaacaaccttaacaaaaaccctaactaaaaagccagctcagcaagatacataacagaatttaactaactctttaaccaactccttcaataaaaacctcattccccttcatacttgagtaaataaagagcttcctaacgcttctcgtgtattttgtagacacccaccaaaaatgagtagccatggcttgaagatcgtaacaaatagttaatccatgaatgattgtaattcaattagaaaatcttaataatttagaatgccaaaaatcaagttcacatttgtcttttttttttttcttttttgtcgtttttagcctacattattagtgatttatgattaatgggcttagtatctatgtgaagtctagttgaaacaaaaatgtaaacttttctaattaattgaattattttgttgctaggtcatcttcctaatcttataaatacatgtattatattttgtatgattttgttgattcattgatttacttctgttttaaaaattagggaggaagaattagtaggttagtattgcactatcaatctcttgttatttctcaataatttatatagagcgatcaagtatattttctatatcattgaattattaacagcgttctaaattatatgcaacatattatcattatattatcatgctgttttataatttatctaacatgaacatcataagtctttaactattgggagcttcatcgttaccttcttgggtttcaaacttgggaatagagctttgatttgttcttatacatatgttagatctttactggtctgtggtgggatttatttgaatgatgttgggcagatgtaaaatttatgaaagaattgttggtgggttatgtttggttgctaaaatttatgaaggaattgttggtgggttatgtttggtttctaaaatttatgaaggaattgttggtgggttgtgtttggttgctggaaatgataataaaattaccgactcctgggtttgtggtgttgaaatatgttgttctttttttccttctaattattatatttatttttactgttttagtatttaatttaattatatagtgttaaagagatattttttttatttttttttaattaagtacctaaattaaatataaaaattcaaaattttcttttattatttgtcattggatcaaaa

SEQ ID NO: 112908 - DNA, 1975 bp, Cannabis sativa
  modified_base (1933)..(1938): a, c, t, g, unknown or other
gacccaacatatggagtgtttgaccaggttaatgtcatgggagttggtgtggatggtgtttcaaataaagtctcgaaaaataaagtgttggtaggttctgattcacaggcctaccgttcctcatgagtattctcagctagaattatcgtgggcttgggaacccatggatcgttcaatttctgaaggattcttgtggtccaaaagaagcctaatttttttttatgtgaaactttaaatcgtaaggagattttggagtgtgtgtgtgttgttaggttttgatgatgtgtttgctctcaatgctaggggtcatagtggatttgttgctttgctttggcatcatatggaagaggttgagttgttagggtattcttcttgtcatatttatgtgaagatttcggttgagaggatggtgcagtggaggttgacaggtctttatggtgaacccaataagaatatgtgtagtaaaacttgggaccccattcggtctctaactttaaattctcagtagccttggtgtgttattggggatctcaataatgtcctttctcaagagaataggcgtgggggtaatccttgtccctcttggcttatagatggatttaaaaaggttgttagtaattgtgatgtccaagatatggagttagttggccatccgtccacttgggagcggggtagagttattgatatttagattgaggctcaaccagattgggcgttggttaattctagttggaatcaacttttcagtttaacctaattgtttaatctctaagtttctttgtcggatcattttatgttgttgcttgagcctatggttcgtattttctcccacacatttcacctgtttagatttaaaaatgcttggctttgtgagccaatatgtttgcaaattgttaaggacagttgggatttgtgtgctggtcaaagtgttgttgataaaattcaatattgtggtgaacatttgcttgcttaggcaaagactttacatgaaactttaaggaaagaattcatctttgtaagcatgatattcatcgatttaagaagggtcgtgatgttgattctatagggtgatggcagagaattttttggaaacaatgttagttgagggaaggagaccaaaatatcaattttttcatgctaaatctacttctcagaaaaaacataattctatctaagctttacaaaactctttgtgagttttggtggattggaattcaagttcgtctaaagtaattacagattatttttctaatttgttcacctctctaagttggcttgtcatgaggtggtggatggtattagctctattatttctctcgagaagaatacatagttgctttgccctatttcaattgaggaagttaagggtgctttatttcaaatgcatcccgataagtcacaagtcctgatggtatgattctgggattttaccagaaattttgggaggttgttgagtcggatatgttttctcttgttcatgatttatttcagtcagaatctcttcctactagattaaatcacacaaatattgttttgatccgaagaaaaaaacatttgtgcactatgggtgatttgaggcctatctcgctttgtaatgtattgtataaggtgatttcgaaggtgttggctaatcgattgaaggtggttcttcctttgattatttaaaatacacaatctacttttattccaaagagattgatttttgataatattatgatatcttttgaagtcatgcattgccgtgaatgaaagtggtaagggaagatgagttttatggctttgaagcttgatcttagcaaatcctatgaccgtgttgattggaattttcttccattgatgagtaaggttgattttgattcatggttggttgatttggtcctttgctactattacttatgttcgttataatgttgttcatgttggaaattatttnnnnnngatctatttactatcatgtatgttggattaacaacct

SEQ ID NO: 112909 - DNA, 4989 bp, Cannabis sativa
  modified_base (2207)..(2214): a, c, t, g, unknown or other
ttacagtttgggttgctctagtagttattatgtgggttgttatgtggatttgggttgcgatttaagttgcttcgttagttgctatgtggatttcttaaaatacaaaaaaaaaaaaaaaaaaactgcattgaaatgtaaaaatgaaaaacccattttacataaagtgttgttcaatatggaccatggtcacatgatattttttttgacgtagtacttagaatcacttaagaatttacgatgcatacatctgcaaatagcgcatgaacctcttcgaacaggatagctcatcgcctattcgaagggcatgctttgtcaaaccatgaactactacagtaagcgagcaacatgggacaaaaatactcccaaaaatttagataataaaactataatatcctcaagtagcacaccaaaagagctaaagcttcagcttgtaaaactaaaaaactacatgtaaactcattagcatatcaaaaatggaccataaaacatctacaaaacaaaataagataaaaaaaaacaaaccaactcctatcaattattttaagaactaataaaaaaattctcaatggttagaagataacaactttcaaacaaattacatgtaaaataaaatttatcggcaaagtctctgtaacaatagtcttccacaaaactacaaaatgacaaaaaataaagttctattaccacacaatttaataataaaaaaaaggtaatatcaataaagatggtaaaaacaatctataatataatattatgacttgaaacacttaatatttgtgaaatttgaaaagtcgtttgtcgaagccatgagtaaaatatgaaacacttaggggcaagccataaaaaatggcacaaacatcataaaagacatcaaaaccatcaaaaaatggtgtgaaaaaactagcatggtcatcaaccctaatgttgttgggataagtttccccttccccgcgagaaggacttggctatagagaaatcgcgatattgaaagtggctcgcagtattatagtactcgcggtatcaaaagtaaaggctttgcaatataaactgaaagaaagctcgctatatcaaagaaagtacacctagcatatataaggaaaccatagtatcaatggggaaagatgcgaacacattgatttatggaaattaacagtcaaacattcaaggcgcaatcatggcaaacattacatttatttttataactattgtaatcaatacaatttatatattaatgattgtaacagtctcattatgatcatcatttctaaccgatactcactacctataagtaggggattttccctccattcaaaaggtgactgatttgaataaaaaaacagagacagagtactcttttcaacagtggattagataggttgagcccaaaactcttgcggaaccactatacttttatgtgtccattttatattatttataatactcgcatatattatagactatattatttgaatacttactattctaagtgagtactcacatatttatttttaggtattcagatgacccttgaatacttgcacactggcagggaattggcggggagtgctcttccgttcccattctcgttaaggattttcagccctattcccgcttatttcttatcagatatgggacggaaaatttcctaataaaaaataaagtttataataaaaatttatatatataaaaatattaaactatatgaaaattaaaatattacatattaattattatccaaaacacaacttaaaattcataacaatgatactaataaactaaaaaaaaaaatacaaacataaattataaattataaattattattaaaattataaaataaaatattaaacgagtcttcatcgaaataggagtgtcatctctgtccctgtcttgtttaacatttagggacaaaaaataatttttgcccctgctccatttcctatttaaacgagaaattcctaccttattaagagcggatccctgaagaaaatgtacatcggttggtaaaatgattaaattagtattttgaagatatattttagggtaaatactattttggaccttgtgttttgtaaaagttactaattggaccctctatttcgttaaaaggacaaaatggactctatattttccaaaataataaaaataagactatgtcttgaattttcaacaattttattttttgatataaccaactttaagacaatttnnnnnnnnaacagatacagaaaatataattagttttgttataatatctttaaattagattattattaagttttattttgactaaaaattagttcaggtcctatttgtataattttagaaaatacaaaattttttttgtcattttataaaatataaaatctaattaataacttttacaaaatacagaatccaaaacagtattccccctatattttaaagaatagagttaattgctggttagtaattaatgggattgtgaatcctagtccatccttcctatgacctattccttccttggtaatgaaacctattgcttatcttttaagcagtcaaccaaaaataaatatacacataaaaagttaaaaactcattttgccttaagtaactgccttgaccaaaacaaacaaacaaaaaaaaaaaaacagaccacacttcctttctaatagttcgtccggaacaccagaagtcttcttcttcttcttctttttgaacttttaatcctccattttataaccctttcataaaaaaatcatcttttgaaagaaccctcttccattaccaagctcctgcactgcacctacaagtaagtatcaactatattctagtattgatttctctgtgtttgttactttattctgtaaagctttaatttttacaggtcattttaatggctgaaaaaagagttaaaaaaaccaaatcaaaattgatgatgggtgaagaggaggaaaaggtggacagaatttctaaactacctgatgcacttctcattcacatactctcctttcttttcactgatgatctcgttctgactagcctcatctcaaagcgttggagattcttgtggtgttcagttcctaatctccatttcctccaaactaagaaaattggacactcagatggccagcttttgtttaacaattatgtggaaaatttcttggaacaccgcaagagaggtatggatggtgatcatgattctgtcattactagttttaaactttcaatggataggtatgattggagtaatgcaagcttcctagataaatggttaggttttgtagttgagaataaagttaaggaaattaaacttgggttgtgggaagaagacactgatgagaatggtaatggttactacccttctttacctaaaccacttgttaactcaaaatatttgactattttgaatttggctatggtggagttgaattgtcgttatccatttagttttccatccttaaaatctttgaatttgggtgttgttcggtttgcagaaaaagatgtgttggataatctgttgttgggttctccttcccttgagagattggagttaagtaatttaattagtgatcataagctccacattcatagtgatagtttagccttgaagttcttggaaattgtagtggatgataatttagtagagcgaattgaagtggtaaatcttgaatctttgagactatcttgtgtttcttttgacaaaataaatctctctgtgtgcaagagaattagaatcttcaggttagattgtgattatgatatgaaagatttgtcatctttggaatatctcatttcaaatcttcctcttcttgaggatttgactttgagtaatgatgaatgcttggccttgaagctcatttacatctcgagtgaaagcttgaaaagtttcagtgtagaaaactcgcgtgataatgaaatgaatgttattgttaaatcagctccgaaactagaatcatttcgttataaaggtaatcacaaatttagtataacaatggagtcatccaatttgttgaatggaacattcataattgttgtgtggccgtggcgtgaggactttgatggagattggtttatcgatttgttgaattttcttttgaatctcgattgttcttggaataaggtaaccctacatgttgacacacttcaggtatgtttatttctcattttatttgattttatggtgttattttaagtgcatattgttattctttgtacctacatttaagatttaattccttttttttgaaggctcttatatttccagaaaatttgaggagggcatgtcgttcttctttgcttaattgggagcatcttcgagtttttgctacacgcaaactagagagaaaatcagaactgagagatgctttgttgtggatgtctccttctataaaaacattatctataacgaaacgatcatctcttgcatgcttttgtgatcaattattataggtaggagtattagattagttgactctgtatgcaaattttaaacttcacaagaattttttgtgaattactcttggatatgcatttaatctttatcacatggatctctcatctcgcctttaaaacttcaaaacgataagtcgttatgttcttatggttttgataacttgagagattccttgtctaaaggattttaagcttggtagagatattttctatgcttgtgttggtttgttagtaatgcatttcatccctttttatcattacaatgaccgtatgatttgacttgttcagctcaatcaaaacatacaatagaagatttcttagtaaccctgagaattaagattgattaaggtatcccattgttaaaggctaatggtggttttaaaatgttctgctgtgtatttttccaagctctttcagtatatttcaaatttcttgtatgggccttgcatctaaattctctgtttcttctataaattttgaagaaattacactctataccatttttatattgtcatcttttatttttaccttcttttttaaaatctatcatttttacct

SEQ ID NO: 112910 - DNA, 691 bp, Cannabis sativa
atatatattttttatttttaattgtatcactttttaataacgtagaaaaaaactaacataaaatttagtatacgtgcctggcacgtaattttttgctagtatatatatatatatatgtaagaaagagagtgattaaagaaaggaattaatagatgcacttattagtgcagtaggtgagaatagctccgtcaactcagctggatcgtttaacgtattggacgactgggattgagagctacagcagctcctcgttcttacgtaaggtcgttatcctttttataatttatttaaatttaaataaatatagaagaagaaaaatgttggctcaaacaaaaacaaattagataataataataataatagtaaatgtaggtattaatcactatgcatatatatggatgtgtttacataagggtattctgcggtaacggtcatccatgagactgttacctccactataaacaatatggataagccaaggcaagcaaaagtacatgaaggaaaattaaaaggaaaaggaaaaagaaagttgttttcattgtttctgttggaaaacatgaatctcttatcctcagctgcaggccctccatgcaaagcaacacaacaagaaagacactcaatggaagtcctttcatgattcatgagagcagtggcggaactatgttatggtatgggggggccatggcccccc

SEQ ID NO: 112911 - DNA, 3128 bp, Cannabis sativa
  modified_base (54)..(57): a, c, t, g, unknown or other
aaatatttaaaattccgtaaaaccgtatttttgttttttttttttgttgttttnnnncatttgtgaaattaaccctattttgattaataaatgattcatagacggttgaaaataatatattcaaagaaggaagagtatatgatcaagataatatagttctttcaaatatatatatatatatatatatatatgtatataataataataaaaataagtaagatttatacccaattatgatcattatggacttttgcttcctaaacttttctcattacaaaacttattgaaatagtcccctgcagttgcatcaattaagtctttaaataatttgttgatatagtactaacatatataatattagtaatctaataataaattatgagaatatatatgtgaattaattcttagagctagtgttaatatatttaatgttaataagtttattaactgaaattatacctataagaccattttaatagaaaatctaaaatttgtactaaattttgcaaaaaaaaaaaaagtttgtgttatatttaacccattatttataattgtgttccaatgcacaaaatgtaaaataaaataaaaaaattaattatattgatcgtcattcaatattttattgagaaaaatatacaaaaattattatttttttattttattatttaaataatggtaatatgataaataaataatgtaaagtttagtaaaagtcaataaaacataataattagtgacattatagtaaataaaaaagtaacatttattgtaggctaaatttggcacaatgttattatatcttgtaccaaatttggtccaacttttaacatgtgctaaatttagcacactttttagaacactattgaaggagtagtttttcgtaagtgcgcttaaatataacaatacattaaatttttaacactccattagagattctctaactcatagtcacataagcaaattttaaaaaataaacagaatgtaacaaaagagggatatttgcgacaatttgcatagttaagagtaaactttcacaacaaagaaaaattccttgagtcaaaactatacaataattataatttaggggcaaaaatggtatttattctaataataataataataataataaaaatatatgatcatttgaagttgaaatgtatatttagtgtataaatatgttagaaactgaacaagaacatgatcagaatcaatccattacaaataaaaatgggaacacggagagcgatgttggtccgagcgtcggatggttatattctgacggccgtggacagtgacgatgggcacacgtatctggagttcctccctcctcctccttccccaaatgtacaatttcatattgtccaagtcgctggccaagagaatcatgtgcgcataaagtgcgcatggaatgaaaaatactggaaggttgatcgccttacacataaatggatctgtgagactatcgatattcatactgaggattcgttgttcgttattatgcctgacattcacaactacataagaataagaaatgtgggaaccggcgagtgcttgcccgatgtgattgccatggacgtcgacgacgtttaaggtttaacctcctcgatcggttcatacacatattatatatctatgttttctggttgtgtgtgtgtgttcatttcctgtaataataatcatgagctcattgtgagattacgtacgtacctgcgtacacatccatcaggcttctcaatgtactttctcctttattaattaattattatattgtgtgttgtttttacttccttaattagggatatatgctctatctatgccttacttctttacttctttaatcagtttaatgcatgttgcatgaaaaacaatatgttgtcccattttaatacaccgaaagttataatgaaaaaacatgacatgaatgggttaatgatagcaagggaatagtaatgtgaaatattaccctatttattttgtatccgcacgtctgggcctaggtatggagtcatggttcggatccaggttaggggtccgagacagggtccaggtctgggtccgggatccgagacaagatctgggtccggggtttgggatctgagtttgaagtctgagtacagctcctctctggggccatgttcgagtcgggattagggtttcaagttctggatccgagtcaggctcagggttccgggtccgagttcttggtccaatctagtgtcggggttcgaggtccaggtcctaggtcaggaccggtcagatcgaggttcggtgtgggtctgagtttgagtccatagttaggtctgggttcgaagtccagtccggttctggtatcctatccagagtctgcgtctgggtccgggtcaggggttcgagtctaggggtccgggtctatttccgatctagggtttgggtccaggtcagtgtttaggttcgggtttgaaaatggtccggggttcgagtccaagtctcggtagaggtccaggtgaaggtctgtggtcatgggttcggtctaggagccatgctggatccggggtctagggtcccggtctgggtctcaggtccggatccaagttaggggtttgagtctgggtccgggatctgaggtagggttcggtatgggttcgagtttgaatccatagttcggcttgggttcgaagtttggtccggttccgatttcgagtatcctgtcccaagtccgagtccgggactggggtttgggtctgtttccgatttggggtcttggtccatgtcagggttcggttcggggtttaggtccgggtttgggtttagtccgcagtctgagtccgggtctaggtagaggtccaagtgtgtgtctgtggtcgggggtccggtccagagtcatgctggatccggggtctggggtctcggtctgagtcttgagtacaaattcgtgtctgggtcaatgtctgggtctagatcgtggcccgggtctgagtccaggtccgggttgagatccggggtctagcattcgggtgagagtctgattccaaaatattaataatagattttagacactgcaaatatacgctggtaaaactttgacctctttgccagcacagtttgcgaaatgcgctggtaaaagttacttttatcagcgcagtagcgaa

SEQ ID NO: 112912 - DNA, 1719 bp, Cannabis sativa
  modified_base (1640)..(1647): a, c, t, g, unknown or other
ttaacaccccaaccacgtaaaaaccctgtgtttgttctatttttttctttgaattatttatttcttcagttcaaattgcttataattcgttttctaaaaatcttggtaaacagtaatacttgattattctatgtatttatttttatagtgttttgttctattttattacttggtaatattgttgttttagttattttaaacttttagttacattacacttgtaacgataatatttttatggagtattaaacttaaataaagggtaatatttagtttttatgtatttttttttaatattttttagttaatattaaaaattagatatgtacttagatatctaattataaaaacgatttaatccaattagtaattaaataggattagattagattttgaagtttaattagatttgattggatgataattttttaaattcaattactaattaaattagatcgaatgagtagaaatgatcaactctattataaacatttaaaatggaaatactttttctcaattatcatctcattaagcatttagtgtaaatgtggcaaagtgacatatatcattctcttgtttttcattatatgtttttcattatatgtttttcttataatagcaacttcttcaataattaacaccatttcttttttcaaactcaaaggtattacgctacttataattcgatcccccaaaaaccacaataattatactgacagagatcgatctactaagaacaatatatttgaaagcagtgtatatttaattttaaaggttatacttaaatttctttttctccctagctaagaatacattagaagcaaagtaataagaggttaggtgtggttaaacaataaggtgtatgcaattatttattatttattatttattatttattatttatttattactttgctgttgctattaatttgattgatctctattaatgcgtcggaggagttggtgtaggttgatgttgttggttgaaatattgctcaaccaagatcagatatatcttagtcaactaacaatgtttatcttatttttgtctttttctgtcttggtacttctctattttttatgattttttttatcaaatgtctcttctttatttagtctccttaaaaaaaaaaaaagtcaccatgaaatgagattgcttatcctattatttatacttgagaaaaataaaaaatgagattaaaagtatttttgaacattttataccacttatttatttgacacttaagaaataaaaataaatgcatttaatgacaaagattatgtttggttcggacttaaaaaaattacacaacaaaaaataagttcaagataaatttcttaatgaccaaccaaacaagcccatgattgatgagatattgacattttatatcactttagaataagggccttgattagttggtcttaaaaaaaaaaaatacattttctaatcatttacctattatctgtgccaaatccttttatcacttttttcataaaactagaattaaaaaatttctgtaaggaaataaattacctaacttgctcgggaaccctagatgcaaaagacactagtgttcatctccttttcctacaccataatccatttttcaggtatgctcttgtaacaccctaactagcannnnnnnnttacgtgatttttaaacatactgtacagctcgttgctaataaacgaggtttatggaaaacgtgattaattaa

SEQ ID NO: 112913 - DNA, 2060 bp, Cannabis sativa
tcacttatttcgattatacaactctttttttttttagggtagggtaaaatatttacaatcaattaataacttaatagcttaaaaattatgagtttaaatccatgatttctctttttttcccagatctccttcaccatttagctaacatttcgtagctttaaaacatctaacatattatttataataattgacattttaaaagatttcttttagaagaaaacccaaaactccacccctctaaaatagaaggaagaagggaatattattaaaattttatggtatattagctattattaaattttgaatagaatctgaataatttgatcatgattaaattctgaatacaattcaaatatcttggccataattaatataacctcgctataattaaatgttatatatattatttattaaattaaaatatataaaattcaatataagaaaattaatatctttttatagtaagagttttttttttcttgtgcataaggactctttagtgagcagtgaccacgacgataattttgctattttttaaaattattagagttagtatcacattgctagatatataaaaataaaattattatatgtaagatgaatttaattattagaatattttatatttaatattagaatatttctaatattggtataaaattatttaaattgatgttgctttatctcaccaactattcgttatcacaaatcaaaatgtaatatgagtgaatattctaaatatatggtcatactacgatttattaattaatttaatttcttaattgattgtcaaaatattctgacaattaattgtggtagagactttgatagaatgtctcaactatatatagggtcttggtttccgagcttacgatttactctgtgaaaacagtaaattcaactaaaaagagagtagagagagcttggaagcctgattacccacaccaataggttttctattcttttgtagatacaaagatagtgtgggattaaaactcaaagaatcaatgactgaaactatttcgatcatttattcatagtgcatacaggtttgattaattctgtattttatacatgatcatatatgcttcatatcatatatataaatatctagcagaatgggctactcctctcattgccaataggttttgagatagaaccccatgcatctattagccactttcattccaaattctaacatggtatcagagccaaagtaaactctaatgactattcgatagccaaaagagcctcttgtgatccgttgtgagcccaaagtacccccggtccaaaagataagtcataaaagagttgtttgtgatccgttgtgagcctaaagtgccaccgatccaaaaagacgaaccataaaagagctatttgtgatctgttgtaagcccaaagtgccatcggtccaaaaagacgagccaaactaaacacttttgttgtcctcctttagcctctatttaagacatttcgactaatgtgtgcatgtttccagtgttggggtctttgacctgtttcaaaatctacaaatttctcaatgtgtacacccacaaatttcccaatttcaccttgcagagttctttcaaatgtcacgttcgatcctgtgggtgtattaacattagtcccacatcactaatatgtgaaaataaaataccatacataaaatgaatgaattactaatcctattatttttagatagaaccctatacattttatcataaattcaaacagaagacacgacacatttgtgaagcaagcaaaaattttgtatcacgaaattatatataagaaaaacatttttaaaattaggtgactactcaatgggtatatttttattgtaaccataatgattatatttttttttacctgtaatagcaggttaccaataggtaaaaatttcttttttagaattaaattaatcaaaattaagaattttcttaaaataattaattttaatttaaatatttaataagaccccttttagcaattaatatttataaagaattttttttatataactcttgttatactcgaaattcggccatcatttcaaagaa

SEQ ID NO: 112914 - DNA, 1218 bp, Cannabis sativa
tgtgtttaaattctattgttttagaaaatcatatttaggatgttaaacaacatacatggtagtaattctagatcttggcaaaataatctccatcaatattttggctactcccatttctttggaaatgcatgattcccttatttggcattataatccatcatgtaattatactattgaacgtgggtattcgaatgccatcaaactattggattggggacaattttcatgttctgaaggcaatgattagtggtgaaaaactctttagactttacctatacccaccaaggtttaggtctttgcttagaaagctatcttgaattggattccaactatggctaatctagcatctcatggcatcccttcatctagtggttacctagtctgctttgaagttatggagaccacattttatgtactttggaattttccttgtcaatagtctattgtctttatggctccttttgatactttagttgcctttcctcctaatactaatttttatatcttcctttgcaagtgtgttgctatgttgaggaaggattaatttatcattcatgttaattctactttgtcaaattttgtactaaaagaataaggtggttcatgaacattttattctctctgatgatggcattcttggctaggaagttaactttgctcttcggtgtagaagggtcaatattttagattttcttatgctactcgacttgggagagaacatgtgaggagtgatattgtttgctttggctaggtggcacctgtggtgggttatttgaaacttaatattgatgttggtcttgttgtgggtgataggagagttggttatggcatggtgatttaggaccacacaggtgcttgcttgccctcaatgatggtccctgtccaaactttagtctctttgctgaagccattgctatttttcatggccttattcttttctcaatggcttttaattttgttgaggttgagtctgattatagcaaacttttctatgctttgtcttcaaaggttttgctcttttgactaagttgggttctgcattagttgatatatcatctacttataataatttgactgtgttgggcttatcattattatttttctgccaacaccattactcatgagcttgctaaacttactctttctattgacactactacaatgttggcctttagaggctgttttttcactcccacttataaaaagggaagctaaagg

SEQ ID NO: 112915 - DNA, 3327 bp, Cannabis sativa
tgattataaaagagggtatttatcaattaaaattattttagagttatatttggttaatgtataataaaaaatggtagttttcaacttatccctttaattaatcttgggatcttccttttactcctaattattatttttctataaattttagaaaattctatttttctttaaaaaaaatttataatatttttagtttcatgatgtatatttttatttttgtatcatgaaatttattatttttaatatacaaaaaaaaaataataactaaagtgataatcttttagtcacaacataaatttcttgtgactaaatattatttttagtcaaaataaaaagttgtttgtgacaaaacatagtatttagatataaattgttattaatttagttttatttataataaatattgtaattaaaaatgtatttagtgacaataaattataatttttgtgactaattaatatattaattataaaacttttagttataacataaaaaataataatttatagttagtcgtaatttttatagtgacattaatatgtgatgagttattagtagatatgcatataaactctctctatctacaaatatgatgtaatttacatgcataaaaatcatatctttatatgtatatgaatggaatgtgataattggaagcaattttgtttgattctacttaatacttatgtcacggaagatatgcctagatttaactatattgagttattaaatagtgagatagggttgttgatagtgatcatgacatgaggaagaaataattaatggttgggagttacatgtgtggtgtgtgtagggatgtgatggttcggtgttattggatggctcggcaagtgggccgagcgagaagaacgcacccccgaacttgaccttgcgagccaaggccttcaagatcatcaatgaccttcgagccataatccaccaaaaatgtggaagggtcgtctcttgttctgatattactgctcttgctgcacgtgatgctgtttttctggtaaatcacaaccgttgaaataagatctaacaaaagaagtttaaattttttatttttcttctctttatttttatcaaaaatattaataattatgcacattttatacattattttgtgaatttaatataacatattttgttgtttttagggatgttattatatatttaaataggtatgacctatattaatggatgagggttggtaatgttcaaatgtagttggtgatgtttatttaagtattaaaaaatactaattaatagagtatggaattggtgtgtgtaagggagggaccaaatattttggtccaacttgttttataatatctaaagattccactttagtcttacaaagtggtttctaataatgacttaatataagcttaatactttttgtgcaatttggtttattttatgtacttgaacttttcaagttgattcttactaggtgcccttttgatttaaaattatattaactctaatgaccctaatttcatgtttaaatcatatctagtatcaaactcaccaattgtctaaggagtagatgtgtcatagcttgtcaaaaagaacttatatcaaattatgtcatagtatttgttaagggagaaaaaaaaacatatttagttaaacctagtagattattgtacttcacaaacgtacttaattttcaccattacaagtaaattaagtgttaatttaaattcaaagtagttgtataaatcatacaatgataataattatttatattaattttgaatattataattaagtaatattaaataatttctaattgcagtctggtggtccgatctatgctgtgccacttggaagaagggatggcctagaatttgcgacactggaagtaaccctagccaaccttccaccaccgactagcagtgccagcgctatcgttgaccaactcgctaccaaccaaaagctcgaccccactgatgttgttgccctctcaggtggccacaccattggcattgctcattgcccttcctttggtgaccgcctttaccctaaccaagactccaccatggatcaaaactttgccaagaaactcaagggtgtgtgccctaaaaaagacacagacgctttcacctttcaagatattttaacccccaatatctttgataataagtactatatcgatctcatgaatcgccaaggactttttacgtctgatcaggatttgttcacatttagtaagactaaggagattgtgaagagcttcgctatcaaccaatggttgttttttgagaaatttgtgattgccatgacaaaaatggggcaactcaacgtcttgactggcaatcaaggtgagattagggcgaattgttcggttagaaaccctcaaaagacagctttcttggcatctgtggttgagaatggggaaatcatgacaaacttttaagatgttttaactctttaaattatgcatattaagtgttttgtaaaaagaaaaagaaacttaatgttgtttacacatatgttttatgttcagtgtgtgaatgtgtgtatgtttttttaatgaaccaagaaagtcttatatatcaatcaaacttttacaacctatccaatacttgtataacataacaagtatgcttttctatttacaatgaatcaaactattctctatctatatgggatatctttttaggcatatataatcttgttctagtctttacattctctataccatagtagccatacccgttgcataaacttgcttttagaatctacttaaccttgcccgatttgtccaccttatattagttgagatattgtagtgagttttttgtgccattgcaaccaatttttaagctccaaaagacacctaaaactaccttgacaatcaaaaaataaatgttcaacagtttcatcaatatattctgcacacctagaatcatgacatttattgagcttggccaatgttcctctcgtttgtagtcttcctaaaacaaccaaccagaaattaaaactattctttgaggttttaatctactccaaatcatatcaaactaataatactttggttgattggattctatacttccttgaagaagttgctaacaattagtttgggtcttgaaatgctctttggcatccactactctcttccaataccagttgcttgatggtggagccttgtagtgccactaatctttgtctcctatgtatacactgtgaatccaacacacccataagttgtcttgctttgtggcaattttccaaacatatttctcaattgttgtcgcatttcaatttgttgagaatgatggggttccatctcaaaaccaattggcaatgagtggagta

SEQ ID NO: 112916 - DNA, 2221 bp, Cannabis sativa
  modified_base (35)..(52): a, c, t, g, unknown or other
ttgattagcaatgagctgcacagcatgtttaaaannnnnnnnnnnnnnnnnngttagttagggtgttacattcattatgtttgagaactagtcacccaaggcaaagttacattttgctacatacctactgaagagcaaccagctgatcttctaattaagccattggctctactaaagttcatttttttgggtagcaatctatctctagattcttccagtgcagcttgagggaggatgttgagcatacttgtttagacagttagttagagtttggtaagtttgttatttagctcttccgtatttgttagattactagaaaaatggtgtaacatcattaattttttacaataaaaaaaaatacaaaagtaatgagaaacaaaaagaaattaaaattaaggacgtgtgtctttaattattttgaaataatcgtagatctttaattttaattatttcgaaataaccgaagacaaaagtcttcaataccctaaccccatattagatacacgtggatgcctatgtgaaaacatggatctataaactctaatatcatatctgaaactctcatttcttctttcttctccagctatctctcaaagaagaaacgatatcaccgacgccgctcctaaatctttactttctccatacaccattgttcttccttattcttcttttaaatcttctacttttctcacccaaaaacacatatacactataaaaaataatttattttaggatttgagggtaaatatgggagtttaggataaagcttatatagggtttctaaagaacgataatcgactaatgatagtgattttgagggttttgatgttgtcttttatcttgcattgcatttttttgtgcgtttttgattttttaaagcgtgtgtgatatagggtttggatacccacgatgatggtcaaaacatccatggtagtaattggaaaattaatggcagtgctcgaaaatttggtagtggtgattgaaaaattaagtaaatatttctaacctttaattttaatctaaaaataatagtttttaaggatattattgttgaaaacctattaatattatatataagtgtaagattaagtggatttaaagttagaaaaataatttttgattttacggtttcgtgagtttttggggctcgatggtggcgttaaacgtacatgtgacttcgatttagggtaaattttttttttttttttaaaagaataaagacttgtatctttagttatttcatgatttcaagacctacgcctttgccttattagtttttggttttgagttttttttttttaaccgaagacataaccacactaaaattcgaagataaaggcctattttttagttgtgccaacacctcataatgttattaatgaattttaatatttaatatcaaatctcgtaattttaattaataaatttaataaataatattgaaaatcaataaatcactatttatgtgatctgagacatcttaactaataatgttctacttctgattttgatatttgatctaacactcgtgtacacacaaaataatgtatatccctcctagtttgtgtgagacttacgtggatacaactgattgaacttgaactactaattattattagtttgctccattgttcatagaatctttccctataaataaatatatatattaaaccagaggccaaatcattttaaatgaaaatgaaagatgccttcacatgactctgtctaatattaactaactatatatgtcggttaattatgtaaaaattaaagaccatatatagtgctaaactcgtggtctgctgctacatctgatgaccactagtatataaatatatttactcaaactaatgtgcatgcttggattcaacaattaataatactgatttcattatagattgcaattctcatttttgttcaaaattctatacataaatattatgcaccgttgttagggcatgcgttacacattcttaataacatgttctttagtattattaattattagaatatttgtattggacactagtagtgtgtaacatattttataggtaccgttctatgattgattagtgatattctttaaaaattcttttcttaagttatatgagattcgatacgtaattacgccaatagcggtacactacaaaaaactgatacttttagtgacaattttttagtcacaacataatttttgtgtgactaaatgtgacttttaatc

SEQ ID NO: 112917 - DNA, 3639 bp, Cannabis sativa
  modified_base (3579)..(3580): a, c, t, g, unknown or other
tttaagagcaaagacattgtgtagatcattaattagttgttgaatgtgagatggaccagctcctatgatgagtatatcaggaacatagactaaaatgagtatcaactttccatttatgtttttaaagaacaagcttgtatctgattttttgttcttgtatccccactgaactaatgtgcctttgagggtgtcaaaccaagctcttggaacttattttaaatcatagatttctttgtgcaatttgcaaacataatttgggtattcagtgctaacaaaaccttgtggttgggccatgtaaacatcctcttgaagtttccaattgagaaaggcattattgatgtatatttgttagatttcccaaccattattgatgtataagtctggatgttggaacttggaaagcattcaattcaacaatctgaggagcataagtgatagtggaagttggagcagaaagtaagtgtttgtatggaaattcttcctcattgaatgtgacacttctggacacataagagccacatgaatgctctgtagcctttggaggagatgatgtaccatataaataggcatttggagaacctaaaggcaactttgtggtgttcataaggtctacataggggaaagcaagatcatccaaacactttgagcatgttacagtcaggtgtttagtgaaaagcttttcatagggagagatgtagttgagagaagaggtaggaagcctattaatcaagtaagtggcgggagcaaaagcttcccaacaaatatgtaaaggcatatcagcctgtgcaagaagtgttagacctacctcaacaacatgtctatgctttctctttactcttcgatgttgttcatgagtatgagggtaagagttcctttgagcaatgcctagagtcctaaatagagcatacaaaggttcaaattctttgcctaggtcagattggatgcttttattttagtttgaaagaatctttcaacaaactgattaaattgaatgaataaagtgtgcacttcagacttagatttcataggaaatagccacacaaactttttgaaatcatccataaaactaacatagtgtctaaaaccatcattggaagaataaaaagagggaccccacgcatcagataaaatcaattcaaaaggttcatttattttattttctattcttttaaatttgaactggtgaagtttaccagtttgacaagcatcacaaaagtcaagttgtttacacttttcattttatacatctgtagacaagattttattcaaaaaaggttgggagggatgccaagtcaataatgccaaatagtgccagtcttggatgtgttgtgcacaagattactagtggttgtatgattgaaagaacctggcttggtgacattagaatttcgcaaaggacttgggagccttgaggaggacatttggagtttgtagaggccttcactgagatggccttgaagaacaacttgccttgttcaattatccttgataagacaatgaagatcattaaattcaaggttaacactgttatctttagtgaattaagaaatgctgagtaaatttttggtaacattgggaacatgaagaaggtcttctaagattaatgattggttgggaaaattggtaagaatagaattgtttcctatatgatgaatagggagagtagaaccattacctacaacaactttggctttgccattgtattctgcttcaatattgatatttactatatcatttataatatgatgtgtttctccagtgttgacgtaccaagttgtaaatggatcagatgtggaggtattgttggagatggattcagacaaaaggcttggggatttccactatttggagcagatgaacttgatcatggtgaattccattgaaagtgatatcaaaacgatgataacacgttactgttgtgtgctcaaccctaccacataattgacacattggtccttgaccacaacctcattagtttccattattggatccgcctcctcttttggaaccatgataacctctgtttgagtaagatcttcttgagcttctattatgattggcattggcaagattaggttagacattttgcagagtttttgtagtgaattgttgaatttgcatttcttaactttgcaacatgaattgaacatcttgaagtaagaggtttagttcaggaggtgagattcacgatcacaaactcgtattcaaatcccagaccaccaagaatatagagaacaagatcatcatcaattattggttgtcttgttgcaacaagattatcagcatattgcctcatcttcaacatgtattcttcaatggtgagaacacctttctttgaagtttgaagaagatttcaaagctacaacaatgttgcttgagatcttgatgcaaagagttgagcaaaggtgttccaaatctcagaagatgtgcgacaacgaatcacatgtccaaccatgtgttcagcaatagaattcattagtcaacacatcaagaattgatcgaaatgcatccattgttgaagagaaggattaggaatattacttgtaagaaattcatgaggttaaagaagagtgctaagaatgtatccatcccgatcatacgcacgagttgcagcacgcacgagcgatctccagatggtgtaattatttcgatctagttaaagattcaaggggaggattgttgtttgggaggggagtttgagcttctaattcttgatttgcagctcgatcgtgttgttgatttactcttacttttatgtggttcaatttaaactttagcgtttttgccattgtttccattgatcgacatggctctaataccatgtgtgaactctgaattttagattttcgttaaaaaatgcaaagagagaaaagagagcatggaaatgaaaatggtgaagaatatgaaggatagaaaatgaagctcaaacattcacggttagcttagccactatatttatattccaatcaggtacaattatagctcaataataaagtttaacagacctgaaaaaaccccaactaatgatttactaactcttctaccaactcttagaaaggcttgtggagaaaaggtatttctcccattggggttgacacaactactatgatataaatgaattttcccatgcacaaacggaaggctcacgcgtgacctgtcaacatcaatagtactattaactatagttgctagttacctttagggattagatcttatctacaaggcttaatgcacccaaatatgatttcccatgaataattgtaattacttcattatagtgagctatttgtataaatttaaccttagttgggctgagattagtctaacccataatgtatggttacctataaaagggaccttataatcatcattgggggttcaaaagttaagattccaaaaatagtgttcttgagagaaatattgtaaaaacaccattgttacaagcttaatactattgatttgtggacaaatattcattaacatctcaacaaaataaaaatctcgtgtttattccttcttaatatttccttaatctctaaatgtaacgccctaatgctaaggcacgctatagtgcttttnnaattacagtgctatctttgctaacaaaattttttcctcaaaaaacgtgtcaaattaaaa

SEQ ID NO: 112918 - DNA, 7151 bp, Cannabis sativa
  modified_base (5633)..(5638): a, c, t, g, unknown or other
  modified_base (6646)..(6646): a, c, t, g, unknown or other
accgaatttttcctcaagagaatagatgagatgattcaggtgagatccaatgtaaattcaactttctattcactagtgagatccgaccaatccaggaaggaccacaacagcttctctattttattttcgaaacctgcaaatttattttaatttaatccaaaccctaaattatttcactataaattattcaaaagatatactgtaccaaaaataaaaataccccaacctaaaaagctatcatacataaatatatattacttttcatgaattattacaacgtactaataaataataaatgtcccctgttggtagatttttctgatcttagtttttttgttttttttttggtttagttcggtttgtaaagcataatatcacagaatagaataattgccaagagagagagagagacaaaagagcaattgaatagtttttactcatctccacataaaagcatctaaaataatacaaagaacactgataacatgccatgcatggcctgagtatcagcgcctaatgcataaaccagaaacaactgacatcgataagaacaagggaccaaacaaagatccaccagaaaaaaaaaaaaaaaaaatcaactgacatattgtggaagataaaaaaaaaaaagataaactataacagttttacataaggacagaaaataacatcatatgacatggatcacttcactaccacaaagacacaaaactctctctgccgtccttgccacaaagtcacataacattgctccaagtgtctgtcttgagcataaaataaacagctgcacagcttgatgaagacagcaacaataatcatcaactcctcagcggcaaagaagttgaataaaaaaaagtgagcttttcaatggagggaccagcatgtagagttgttgtgttgatacgtgcacattatacaatagaaaaatcatcattccacttttccaccttacaattcataaaatagtcctccgagcattatagcacacacttatggtagtcattgtcacatcccaatttgagaccaccttgcatgacacttataagcccaaaaaaacttatcatcccccattcgacttctaatcgtgtcagacccaactaaagagaccaacaaacaaccataaagatccttcaaccacttctacattcttttctacccctcttttttattttttcttcttcctacgttcctcactgaatccacaaccacaagcagtcgaaaacagtcaactgactcaataacatatcatcatacatgttttttcgattgataaaaagagatggtgttatcagataagcatgttactttgcaaccataacctgtaatgaagtctttagccatgaagatgaacgttacagttcttttcaatggtagtagcaaccggcttcgatgcaccaaccatatgatcctggttctctgggcagtcggccgttaaacagactgagcaaagcaattccaggcaaaatgtctcctcatattcactgtcattaatgcacctgccgcactgaacgcaacgtgctatgcaaagtgtgcatgccctgcacaactgtgtagcatgatctttcccttgacaagcctccacaggacaatcatagactagcctcaggttctcacatctagggcacatttctacatctaaatcattatcatcgtcacatgatagataaaggtttttcctgttatagtaacgtggtttccgggcactctgctgtatctggccatcagctcccaaaagtgtcttcaattcttcaaaatgttttggagtcacaccatagaggccaccaattctcaaatgcttcacaccttgtgcacccattgacttaaaagcccttaagctattcaagatgccctcgatactgagtcttgtacatccaggcacacttaactgccaaataaaataaaattatttatcagcacgtcaatgtaataagtctacataatacaaatagcaatcaagaagggtatccaacacttgaagaaaatgagtacagggtccacagtgaaaagaatcaaacgcacaaaaggtcagcagattcaatgcatatgccaaggttatttgcaaatcacaagagacaagagagaagaaaaagtaacaagataggcattcaacacattagtctgcaaattcatggacacgttttagtttggggaattgccaaatcctggggatcaaaaatagaaagcttaaaaaaagaaaggatttagcaaaggaaccttataacagcttgagcacaaggttgaaaattcgtatgttaagacaataaattaaagttatactaaaatatgatagaccagaaaaagaaatgaaaaaatcattatttgtacacaagtaaaaaaaaatagctaaaatttatagataaaagctatactaaccttagatagcttaggattactttcaataacacgtctcagaccatcatcagtaatccgggggcactccaccaggctcaaagatttcaaattaccttgagccctgttagttaattgcagaagaacatcatctgtaatcttctcgttcaaaggttgatctatgtgaatacacttccaaagaagggtgtcacttctcactgtcgaaagcagagttttgcataccttttcaacaacaagtagatccctcaagcccagataaccaagggcaaaatgcaaagcactatgagatccaacatcttcactagaccatattacatcctcaaccccacacttgtcaggttgctgggttgcaacatcccaatttacattgccaaaattctgaatgctatccacagcggaagatgacccacaatcactgctacaagatgcaggaggacccccactcttcccatcaaggcaaccaaacccatttgctatattagatgtatgatcaaatgcagcattttgaggggatgcctggaacttcatggctttgttccaaataaaatttagttcggcaaaaagctggtagctcccaccacttgacccaacctcatcccttccgtacccaccatagtccacctccaaatcttcaagccaaccagtgatcgccgtaaaagttgtactaatgtccatcccaaagggatcagagggcagaaggtcaagaacatcgtttgacacagactcctgagcaccacccctctcaaatctttcccttccataatcaaagggattctcaatttccctattcgatagccataagctatctccattgttctccgagataccttccaagaggtacccattagaaatcctaatcggagagaccactctatcttcagctagatgcgccggaaagattggtcgatgggaaaaattcaaggccattgtatatggtatacactcaaattctaaatacacaagctagtttttttttttcttttcctttctttctttctttttttttccctctaaaagaataacgaagtgaacgaaaagggaattttcgtggaagatctaacaaggaaaccctcaatttcggatagcaaactaaaacaacgcaccaaaaatttcacggagtttctttttcttgtagagaagctaaactgaaaaggaacaaacaagataactaaaaaaaaccctaatccaatcttatctacaccaaaagaatcaaagaatttaattttttttcttcactgttcacccaatttcctcccttttttttcttttctcttttcctttctaaatctaaacctaacagacctagggtttacagtaaaagcccgaaaagaaaaatgacaaaatggatcaaaaataaggaattgaaacacaacggaaaaaacaacccaaatcgaaatcgaattgaataaaactgatttaccagaaaaccctaaacttcagtcgacagatagcgatagaccaagagccgctcggtattgaatcgtcccacaataagtcaataacgacagcaaagaagtaattttttttttattattttttcatattattttttattattttcctgaaattgagattggcagaaaaatctagggtttctagattgaaagaagaaggtgatgttgtgtggtatggtatggtgttcctctttctcctgagggaaattcgacctggagagaggtgagagagacggtcgatcgagtttgggaggagagagaaagagaaagagaaagagagaagtaaaaatggtgaggaaatggaatataacgaaaatagatatattaaaataaataaatgcaacggtgaaaatttgagtgaggagaaatacacgtggcagttttaggaagacttactttgtcctttggtattaggatgtggcgggagaccgtatgctctttccctccctccctccattctttttgaattaaaaattaaattaaaaatacaaacaaactacacaaatctatttttatttttatttcttataaaaaaaatgtttttttttccgttttttttttcatcgatatatagattttttttttgagatattgttgttttttatttataaaatactacttatttcatatttaattaattttttaggtaatgtatttattagttgtttttttaaccttataaaaagtttttttttgtttttgtttaatttttaaaattatctcgtatattattttttaatgtttggattgttccatttaaatttaagttgtgatttaaattactttattacttgttatgtggattattatgtgaattttttttcttgtggcgtcgttaccaaaaaaaaaaaaaacaaaattctttttatgtgtgacattttctaaatttttttttacaactaaatcatttaaattttttcatttattagaattaaatactcacccaattaaaaatataatataaattgattctaaattattaaaaactagaagtgtataaaaaaaattatagaaacaaattgtattaattttaaaataataaaaaatataatttaataaaaatacttttaatcagaaattttataataaacataatagctaaaaaaactttaaactgattttttttctgctgaaaaataaaaaaactttaactattaaaaatattacttaattaaagaaataaattattaaaaaacaataaaatgaaaagaaaaaacctaaacaaatgaaacaacctataagaaaagaatattaatacaatgattacatctttccatgtgtggagaggagatagggttaatttcctattatatacataagaatatatttacatgattagatacatatttatataacacaacaaagattgttatgtatttggtttttattgttcttaagggatatgtagtttttttctttgtttttttttattaaggaagataatgtagtagttagtgcgtcataaatttgtctcctaaatgaataacacaactcataaatatgatcatatgatattatattctattaatatgcagataatactaagggacatttgttaagagatgttaataattttgattataagaaatattatcagggaatatgattataagaaatatttaaattgtgtttagttatgtagggtaatatgtaattatattcgaattatattgtttagttaagtatatgaatcttatatattatttaaaaaaattaaaattaaaaagtattttttattatatctatttaatgtaaaatattatatataaaaataaaataattattcattaaagaaatatatttattaannnnnnaatattaaattttattgtatttttgattgaataaaatgaacattttcatatattttatcatcatgtcatttattttgttcgctatgctatttatttacaccatccgcataaaatttatatataatatatatatatatatattatttccaataacataaaaataattcaatctcataaagaaaaaaaataaatttcacaaactaaatatatattgtaatatttttttataataaattataatattaatattatttaaatttatttattaatgtaaaaatactattattttttttgaatgatgtaaaaatactattattaatataatgaaatggaataatttaagcccaccttttttaaggtgtcaacattaccctcattaaaggtagttataatattaagggaataaataaggtaatatttcatattaccgttctcttgctagcattaactcattccaaacggcccctaatattattttttatttgaacaaataggattaagatgcatgagttctatctcaaaactaattgtcaatgagagaagtaattcataattcaccttatatattgtattatttttccacacattaacagtgtgagattatttctaatacataattctcgtgtgttaggcatgcaaagtgtggtataatgaatgacatttaagagaccacaagatcaacatgatatttttaaaagaatcccacaagatcaaattaggaaaatttatgggtgtacacgacgaaaaatttgtggattttttgaatcaagctaaagaccccaatactagaaatcggcacacattggtcgaaaggtcgcaaatggaggtcaaaggcaaagatatagcagaagtttttaattgctctaataccatgttagaatttggtaaggtgcttgtgattccatctcaaaactaattagactatgtcttatttatgaattttcactaagctaggcttaattgtgaagagaagaggttttagggtctgtttgttaattaagagacttnattaagtctaattaataaatacatcaaatgaaaatttaacttgataattaattttaattattaaataaatagttttgacatttagaggttcaaaattagaaaatacggtatttttgaaaagaaaaaaaaaggataaatagttgtacaaaatggcaaaaatttcaatttagtggggcccactatgtggctagccacttaaggtaatttttgcccaatttttataatttttttaatgtcatataatttaaatataaccctaaatgaaaaagtataaacagaataagatggtctcattatccaactaatgctcataacctaattaacaaattttcagacaactagagagtttttgagacctccttcttatttcttcttcttctattttgaaatcccttgaatgttcttcaaaaaaattcgtccctcttagtgattgagtacatgcccacacatagcaagttagtactcaatcctagtgtgtaagactgtgaagaatccaacatctgaa

SEQ ID NO: 112919 - DNA, 2931 bp, Cannabis sativa
atattataaaatgtgtcatatcccacaaatatcaaatattatgagtttaagggaaaaatttcaagaatatgtaagcataaaaaatcaattttcctttgaaaacaaggtaagaaagctcatgaaaacagtacaaacaaatcacttcactaacataactttttcttttcttttcttttttacaattttttccctttacaattaatctactcacatttccagaacaactcaacttaaaatccacactttcccagaaaatcccataatcttcaaaaccataatggttctctcaaaactctaaaagccctaaaaccttagagaaaaccaaggtaaggaaggtgtgtatatttgaggcattaattccagaaagaatggttgaaaatatgagtcaattaaaaagaaaaatgaaataaaatgacctcttgaccatactactaccaaaaaaagatgaaaaaaaaaactagggttggagaaaaagattaaagacgatctgcaagaaaaatgatagtgaattcaagaaatttgctcttgcaaataagtgccactgatctttttttggtaactagtattaagtatatcattgttatgaattattctttacttgatttgatttgattacccatggagaatttcttgctccaattctccttccattacagagctgtgatgatgcaccatataccatcttccgttatggaactcgaagacattagtcacattaaaagggccagtgtccacatcgacgaacattttcatggtaacccaagccatgtctgtaagtactcgagctcgaacatccctaatctgaaagttgactccttgatcccaattaaacgcaaactcccaactttgtatcacagcagtatacctgaacaataaacggaccagattagacgacaaaatagatctcatcatcgacatcaagccacttcaaaatcaaaacctatcatattaagcaggaaagaacaacaataaagggcttgttaagataatatcacttgtttatggcctaaattcctttccatgtttctaggggattctcgctctagctaaagtcagtgtagcaacacctttaagaaatgtttgagaattcctatgaaaatgacagaacattggaaccataagaaaatcaatattgcaccatttatgttgcacaagatcgaatcgggaaaaactgtaaataacttctagcaagtataacatccaaaaaagaacaactttcttccatttgtattatcatccgttataagaaaatactttctaaaaggacagttaatcacgcgtgtgcttgtgtgcgtgtgcgcgtgtagggaaacaaaaaggcaagtcccattaaattcaccgagttgaatttgaactagttcattctgcatgataactaatataactaacaaagtatattcttccatataagattcgtatttaagcaagtcgcgacaataaaaatgaaatcaaaactgggcagactgttgctaaaaacagagcaagcataaataataacaaagacagaaataaaaaggcgttttcccataatcggatgaatcatgaacctacgtaaacactgtcattccattccctacaaaataacgaaaagcattcgtaccctgaaaagagctctcccgaggcatgaacacatttcacataatctgcattcatccaaaaacatctcattgcagtgagagacctttctctaatgatgctaaagaaatcattgtttatattcacaattgctctggttgcagcatagtaagctttccacccattcaccggtgtaatactatcctgttccaatgtaaaatcctacaaagtacagaaaagagtaactcaaatccttaaccaaaccaatctaatacagtaaacaaaggttcaatctaattcaaacactattcaattcaagatcaccataatttcagtctaaacccatttcaaaatttcattcaaccaccataaagtggttctaatttcctacatttttctgaacagtcaaacaaaagtgactccatcaattaatgtttccatctatactacatagaaatcgaattcaaacaatcgaaattcaaacttgaaaaaatcaaaattcatagataaataccttgtgataaagagccttccaggcattatcatcattagcagctttcctcatcaaagaattagtcatcgaaagacgacaaaggctagggtaatccaaatagctaagtgcatgcgttgtaatctccggaaccaattgctccatcatcgaagccccagtctttccattctccaacatctccttaccaccaccattcaaatacggcgccgtttcggactccgaactccctttatcacaacaacagcaacagttacagagcttcttctcctttttcgtcgttttcctcaaacttccttctccgccgttggattcaactcgtttggagaacgatcggacggtgaggatggcgataacagtgaagagtagagctacaaaaaagggttgagagaaactagaggcaatctccattcataagacatgaaagcttttacttcaaagaaaaaccctagaaaaaaaaaatctggtttgagtggttctcagggtatagattgtcagaacggcgtcgttttggtggttcttcaacttagttttggggtcttcttcttcttcttcttcttcttctaaagccctaaacgtttcaagttcgaatttgcagagttttagagagagaaagtatgaaagaaagagagagaaagagacgacgtttgcctctgcggttctaagccgtaacggactcacttgagagaaacggctccatacaattcgtacagtgagaacagttacttctctctcctttgaggacaatttcgtaatttcttactttttttttagttttttttattttttttatgggaaattttatttacaccccaaaattttctaaaggcaccccattttaataattt

SEQ ID NO: 112920 - DNA, 2320 bp, Cannabis sativa
aattatggatagcaaaagttaagcgcttataaggttacacactatcagaaaatatatgtagcctaagtgggagattgttggattaaaatctcaatatgggctcgtatgtatattagtgtattgctatttgaaatttgacccaaaataaagtgatcattttagtaattgtgggtcattgggcgttaaagtgtcatagactaaatgtatagataccttaagagatatttctaatttattgattggctaaattagaaatactcaaaagtataacctagctatgatgttatataatggtagtggtgtccaagaaacaagagtaactctattctcattttctcccattaagagagaaatctagagaaccttatgtcttgtattcttggaagatcattacttaaaatcacaataaagatcatctctacaaggttgattaagatcatcactattcatggattaaagtaggcttctgttatttaagttcttctctttaaatcgacaaatatattctttagatctatagttatacacttataattatatgtaatatatttatttattgaattgaatcttgttataacatattttactagtgatgaaaaattctaatatgaaaatgacttgaatcaatgtaaaatcacttttttcttgtgggttgttattacatattttgttacgacggtaagatctaattttttttttttatttatatataaatttttatttgaaagaaaagtatggatagaaagaaacaagataaccaccaccacgagcaaaacagcactacatgtatagagtacgaatttttatgtgtgcaagggtgctttaacttcaggtcatcactagataaatatggtggttagcttggatgcacacacatttgtgcacatgtgctgcaaatacaatagcgtggcgtaaaaccaaagggactagtgcctctgtaattaatgattttgtacaagtatatatataatatgagaaatgttaaaaggtggtgtatacaattctttaaagagttaatattagagcattgttattgggcaccagtggtgcctagtacccttaagacgtgtcgctttgctattggctagcaatactccttaaaagctattatattaaactatatgagacccgatactaaattagaccaatagtgatattaacacgtaggagggtgtttggcactactggtgccttttaacattgctattaggcactagtggtgcctagtaccttctcgacatatcgcgttgcgattggctaccgatactccctcaaagctattatattaaattatatgagacttgatatttagttggactaataacaatattgacacataggagggtgttaggtaccactggtgttctttagcatttctctattattattattggtctaattaaatagtagaataaatataatttaatataataatttttaaagaatattagtaaccactcataaaataatattttaaaaaatactaatcaccactaaccactagtagctaactcaataaatttactaggcagtagattagttagttggttgactaagtagtatatatggtattaaagaatgcaccccatgattccatatgtcaatctcaatcttaccaaacttagttaatatctcaatttatctgctgtgtaaggacaacatatgggccccagtgctctcatctagttgctgccagataaatccaatgagctttcgagttctttcctcgaattctcttttgacaaatcatcaatctaccaccccatgtgcttcttcctctctctacccaaattccaactctctcaatatgttacgtgtttgttcatctctccctctctctctttcttctcccttttgttctatagacagtcacacacatacatataatattaattatgataaggttgggctgtaatgggtgtagcggccatgcattcacataaatgtagaaagcttgcacgccttaaaaaagtaaataaatatacatgaaaaatatgattgaatagaagggttcagataaagtagcggcaaatataacattgcagaatctcttatgttttagaggtgttgaacaaagcaacaacaaatgaaccaacaaccatagttacttaattactagtaaatattatatgcttctccaataatatataaaatattttaaattatatataaaaaataaaatatatattttagatttttttttttttttgagagaaatatatattttaagttaattaacaatttttctcttcgaattttaacatatactaaatcataccccctaaactaaactattaagattgttaaatttaaggacttt

SEQ ID NO: 112921 - DNA, 8142 bp, Cannabis sativa
tggtaaaataatttccaacaaccgaaccactctcagacgactgctcttgaaccccttaaaatttgtgttcttaattatcaataaaatttgtattattttgtatttttaaagaaaaattcatattttacaaagtttctatattttagttttttccttaaaaaaattaaggaataattgaacttaatacttaaacctcaacaaaaaaaataacatatgcatatattggattttactaatgtaaaatgactataaggttacataatgaagcactatcataaataataatgaccacaacctgacaatttacatattcaaattttgaaatggctactcatatgttttatatataaacatatatacctgtgatgtacttgatagttgagccatttattaagatattatgatatgaataattgttattaggtattagtagtgtctagcacattctaaatgtgttactttacgtttgttaacgatattcacaaaaagttattattaatatatatagaacttgatatttagttggacaaaaagtaatattgatacgtaaaaaggtgctagacaccactgatgtcttttagcgtttctttttatcaaggttattagtatacttagattatttacaatccgaccctaggctaaggcggactaggctcacgcctagggctcactcctattaggggtctaaataaaaaaaaattaataaatatacatattttttttaataatttttaaaaatatcatttattcttataaaaagggcctaaaaaattattttaataagggcccaaattaactcagggtcggtcctgttccaatggttacacaaatttggtgtaaaatctacactaattcaatgtaatttttttttacttttggtacaacaactccaatgttttacaccaaacattacattaaatatctcataaaataaatatattttacttgaaagatctcgtattttatattatttacattaataaccctgttatcccaaaatttacaaatctaatgtggcacttatacgtggcataatctagccagctatttaacatggcaatgatctttcgagcagaagtgtgcctgacaggtcccatatggagctgacatccataagatgcagatggtccatgaagcctttggctgggtcatcaacatgtcggccagagaagataggagtaacaccttggaagagaagctccacaagtaatctcacaagaaagacaagtctcgaagaaggcctggccaggtgattaacctgccgaccagaaacaacattgataggagtaccggaaaaggctacacgagccttgatttcttcttcaacaagcttctataaatatctcgaattgaatcctacaaatttggatccaaccagtctatccgagaataaggagattcaagagattgtaactacaccctaaaatatagggaaatttgacctttaatcactaattttacggagctaaatgtaacaatcttcccctataaatagtgaatgaattcacaaggggaaggggactagacctaaaatcgtactcacgcatcaaagagccctttgctagaagatattctatgtaaacactgtgacagtcgtagcttgaattcactgtctttcttagtgatatgcatggtattatctcaaaaataatacaattaaaaggggagtaggtcattacccatatacaagggggccaaacctccataaatttatttttttcttctgtctatttattaatcctaactcctttttggtgattaatgagtgattatttgactccaagtcagttgattatttttccaattgacatttttagtactttcattgagagcttcaacattcttatgaagatctcatctcttttcacataataatcaccatggttcttacaagaggccccaagatctgatggttgtggatcctaatgtccaagttccaccaactggtgacaactagggcaactccatctgtaggatcagacccagaggcccatggcaactccaacttgataattcgtcagctttagatagctcaacgaatagtcttgtactatattcattgagctaaaaaaataaataataactcaaatttagctcatttgataaattgttatttttattatattttctttatattttaaaaaatcatgagctataataactcaagtttaccacacataataaaagtgcttttacatgtccatgttgtatataatgttaaaattgaaacaattgtacacagagtacatacttttaaggagggctggacctcagtataggcgagctaggcctgtgcctagggcccacctagctcaggggcccaaaaaatttttatccctttttagaattacacattttttaatcaattttgaaaaatattatatttttttctaaaggagggtccaaaaatattttttttccccatggcccactaaatttcaaggccggccctgcttctaaggagcgttcgctaagagaaatttaaagtaatttgattgcctcgaatatatgacaactttaattatatttggtttatttatttttgttcaaaaacttatttctatctttaactttaagtactaaaggcaactttagaaagtagttttagtagtcattaagcttttagatttttctaagtgttttttttttatcaaatctttagatttatagtgtgttttaagtgaacacttttgaaattcaattcataatatttcatggctgttatagtctcttaaatggatgtaaattatcataatggttacataatagagcagttgaacattttctccattaggctgtgcttcatgcaacatgttttgtggcactaggagatatgtggcctaatgttaccagaatttataaatttgaggtttataagtgatacacgaatatatcaaatcaattctaaaccattttaatctcatttcggtgatatcaatggccattaattcaattcctaagacctatatataatcatatagcatcaaattttaacaattcaattgtatcatggttacaaatcttttactacaaccgtgacttatatttttactgaaaacaaattatatggtatactctgtgaaaaagtatatatataataaatacatgctatatttattgcacaaaataaattaaacgctaattaagattttaactttttaggttattaaaaaaaattggactattgagatagttgaatttaaagatttttgtttaattttatataattttcttaatatagattgtccatatactatattgtgctcccaaactttgatatttataaaattatgtacctgaactttaacatgtaccgaattgtgatccttaaattttaatccacatcagatttttttaataaaattagaccaaagttcttaaatctaataatttaagagcataatttggtacatattaaaatttaagagataaaaatttaaattaacttaaattatatgtacaaataatatatcgatttttattatttgaaaaataaataactttaatcaaatatttatttataccaataatttagaattagacatattaaacatgtttagtttaggtaaaaaaaatcattttagaaatcatataataaaataataaatatataagcggggcacaagatggccctacgcccaaccaagtggccaacaatcaatatactaataaattaagcattgagccgtatattagatttgctccaacaacaaaaatctttgcttctctttcaaaaaaaaaaaaaaaatataataatacaaagtctaccaatatgcttcatgcaaaacatgggaaaaataaaatttaaaaaaaaaaaaaaaaaacagaacataagtccaaaatacacccaataaaatttcgaataattatataatacactcattttttttttttgtaaattttttacatttttatgtttaatttttttatatacatatatatttacggtattctataaaaacaacactaaaataataaaaaaattacataaaagtaatagaaaaacaacatcaaaacaataataaacaacaacaaaaaaaaataaaatataattaataaaaaatcaacaataaattaagaaaagtacaacataaaaatacatcaaaagaccgtaaaatctgtaaataaaatcgtaaaaatcataaaaaaaattaaaatttcgtgcaaccatatttttataatttgtgtatttgtgaaataatctcataaagttattttcacaatcttatacattataattatttaccactactaaaaattttagaaatttaaataatttttactatcaaaaaattatttacctcacaaatatattttttttggaagaaacctcacaaatatatttaaatatatataaagtgatatgtttaacaaaatataaataaattttatttttggcattattaattatttaatttttttttaaaaaaaaaaaaaccaccataaacaaaataattgtgccaaaagacttttctagattgtatcaaaatccattatacaaatttgtcctaaattatctatcaaattttagttttaagagaactgaagtattggaaaaataaataaataaataaataaaagaaagaaagataaacttctttcagttgtattaacagaatttgggctattaagttgggtgtataaatatagtataagacaaggtcaagaaaaggaaagcttaactgttaaagatactaataatcatgcttaaacaatgctctttacactttatcttttgatctttacatattcatagcaactcacacatactcaaaacatatcccttttatattaaatatattacctattttaataaccaaatatccaacaacaaagcaaatatgtaaacttaacaatacaaaaattgaatgatattttcaaatcattctttctttcctatcttaatttcttaaacaagaattaatatctacataggacatagtttcataataaatatatataaatatatatagatagattgtaactcaattacatacatgcacaatgccttgaagcatgttcaaattttatgacatatatatacaaaggaaaaaccatcataagattacactaaaagaagaaaaagaagaagaagaagaagaagaagctagtttggcttgatgggagctggaaaagaatctgaaaactagtcgaatgagctcagctcctctcaaaactcgacctttttttttaactaaaacataagactaaccaacaacaagaaaaaagaaaggttttttttctgcattttctttaacaaaggttgcagctttagtggggagccttaaaatgtcccaacaaagagctctactacttacttgatgaactcttttcctacccaattctttaacctatcgggtatcgccaccaactttggatgttaaggctaccctgagctgttcctgcgtgtaaaaccgactccccattttcactgttgcttgttggatcatcaaatcgttaactactgagacactggcatggtgaacatccaagtctagctccattagagctgccattacccttgcagctgggtggttcttcttactacattgaatcctaatcatggcatcccaacctatgattttcacgtctatatccaaatctataagcttgcttccaccaccaaggttagacaccatcgaaaggtcttgatcagctgacgaagaacgcgaatctttgctagctaattcccttttcatagaatccatttgtttctggagatcctccttgtctgtttctgtagtttgaagcttcgatttgagctcgttgatgtaagaaatcgcgtccccgagtagggaagctttgtccatctttgaaacgttgggaacaacagctctaagagcataaaacctctggttaagcttctctcttctctgtctttcagcttcaacatgattcaatggctcttctcttccattagctggctttctacctctctttctgggccttttctctggctctactactctgctactgtcagcttctctaacaaccgaagcttcaagatcagagtggtcagaatcacctgttccaccgctcgattttatgacaccactggatggtaaaacaaccccagaagtaaaagataacatcccttcttcgttattacttccccttgaagttggagatttcttcttcttattagtaccattagtagtggtgttgttgatgttgttgttgttttcttctgctgcgaattgggattgcccagaaaacaaattcccattagcactgtaagaactcctcttactttccccaaaattcaatatctcccctgattcaggcttcaaggaatgagaatttccgttgttcttgacactgttcccatcaaatccataatcagagaaattcaattctttggtgaaaaagctttgggtagtctgtgcttgttgttgtctctgaatcgtgctaggattgtcggtcaagctactagagctagggttttcgaactggacagttgatttagaagtctgttgctggtttgttgagctcggaaccgaagccgacggagctgctccggtggttacagaatctttaacttcgacggtggtagaagttgggtcattaagccaaaacgaaggatcgttttccccttgatcaggagctccaccaccgcttaaaagacaagaaccaacttcaagattactgaaattaaacaagaatctaaccttgttcatcagatccgagctctggaagatgacttctgtagaccctaattccacaacaccattctcagaaggaatacaaactatcgtctgtaacccaaagatctgaccttgtcgagccctctcacatgtcgaagaggttaggttatctcttcccgtaacccaaacagggtttgaattgaaaaacgcctgaccaggtaacccgccgccattaacgaacgactgagtcatcgaaaccaaaaagaaccactccgtatcagtaacttcctcatcaacagcctcatccggcgccggagcggatccagaaatcaaagaattaagctcacgaaggacttttttccggtgctcctgttcagcaggagaagagtaagaagccttagccttacctcttcctttatcttcttcacccttgtaatacccatcaccccaaccaagaacagaagcaccagaataatcatacgaagactgccagaaaatcgcgtaagtccagctctcgcgtgctccttcaatcaaagcctggagtcgttgctgaagagtctcctggttaaaaggcgcgacctgaggaggaggaggaggaggaggaagaggaggaggttgttgttgttgttgaggggcggctgaagtggaagcggcggagtgaaggggttgaaggggttgggttgaggtggtggtggtggtggtggtgggtgtagcagcagcccataaagaagaaagatctgaagaactcatgaaagcttccatcatggaagcgttgtcgtcagtccagagattcatggtggattgtattctgtagtccgtcattcatacaacggaaatgggtttagagagagaaagtggcggcagagaaagaaagatgatgatatgggattggtggtttgctttgctgaattattattattatttatttatttatttttaataataataataataataatacatatctgaattttggagctcactttgatgatgatgatgatgagcagttattggttttatttttaatatttgataataataataagaagtagagttggagaagtgagtttggattgggtggtagtggtggtattaggagaagttatttgaagagaagaaaggtttggatgaaaacgagtaaatgaaatgaagtgtaataataataataataagaagagttttgggaaggagtgtgggacagatgagttggcggtttctacgaaactggccatacttactttactctactccccactatttacaactatttttctaatttttatttaattaaaataaatgtagtggatattatagtaatattgttattagtattatattttatttacacactaaaaatttctaaatacatcctatttaataatttttattttatataaaatttatatctttaattttactgagtatttttaactttttttcttttaatttatattcttaaaaaatatacctatcaaacaaaattaaattacattttaaa

SEQ ID NO: 112922 - DNA, 3801 bp, Cannabis sativa
aaaaaaaaaagagagggagagaaacaaaggaataaacattctacccttctctgtgtacagattaaagaagataagctagacctgaggagaatgtttgctggacttgaactctccgtgtataaaattctatcccgcaactcctcgtgaacatcagctagaccacttgctacacccgtgcacatgtcgaatcatgtgatctagccagcttcaagctatgcttccctgatacatgactgagtaagacattttcaaacctatttggcgttatcgaaaagctcttataacatgtactgtatgtgtatttatactaacacaaacactggtatttacatacagatactattgcattatcataattcataactttgttcttaaagtacttgtaaacaaatagtattttatctccttttattttaattttagtttttgaaaagaaacttctttgtattaataatgtgagaaatacaaagacaagaaatcaaaattgagctcaaagtgtccaaataccattgagaaatgaccatgtaaagtaaaacataagaaaacaataagacagaaactgcttagtgcagaaaacttccccaatctctgcttaggtctagaagggatagtccctcaaatcctttagccttgtagacttaaacgctttattctctgtcttctccaaggacttagtaaccaaccataactgaattagtaagccatttgcagcctctaagattcaaatcaacaaagtaatgacatgaaattagcatagagataagctctttatcaaccaacatttcattgtaagacaagtccagtttcctttattggttggtttaaggtttttgtcctaatttggtcaataaaccagcttctttctcaactacatcacagttaattaaggccaacttttcattctctaaccttccagcttcagcattgcctgtatcattaaccctctctctttcaatttattagaagaattgaaatcatttgtaccaatctatagattggtatagccgacagtggagtttcacatgcattccccagaactctgcagagtatttaacagtcaatatatcagttagagtttcaagttcaaagttggatacagaaaaagaaaaagcattatgcaatagatcaagaaaatgttaccttcattcatttttgagcctgctttctttgttgaacaatgtagaaagccactaacaaacaaaacccttaaaaccgcaacacaaaccaaaacacatttcacactacttttccagaagagctttctttaaggtcagctgtggtttactaatatttatatatagtatgagcaaaatgacaacaaggtactactcaagtcaatgaaatttgagaagcctcaaagttcaaattaagcagtgaagaacgttatatccatcaaggtagagaagatgagatccatgtatagattaaagaaaatgcacaaaaaataacacaactgatgtaaatcattgtagtacatagattttagaataataataggaattcttttcatcattcacaagcaaatataaaaaaaaacaaatcccattcttaagtaaagtaggcatgaaagttcattaaccttgaaagtaaatacattctcaaaaagactaatgcggcaattaacaaagaaaacaaagaagccagtcatatatacttttaaaacccataaatgcttcattcccttatagataaagtctttaaagaaggagaaatccaaagcagagcattcctcaactctaattccctttctggattgcatcgagtaaaaactgtgatatgctcccaattaaccaaaggagaacgacatattctcttcatgtattttgggaagatgagagccttcatgtagaaaattaaaaaaatgtaacaaaatattaaatatattttaaatagactaataatataaacttgtaataacatcatagaatcaattaagacaagtaaacatacctcaactgagtcaacatgcagacttatggtgttccatgggatattgagatttacaaaaaaattcatcaaactgacaaaccaatttccgtcatagttctctggcaagtcaagaattttgaatgttccattcaacaaattggatgactccaccattgatatactgaaattgatatttcccttataccaaaatgaacccaattttggagttgactcaagtataacaatcatttcatctttgctaatcaacttgaaacgttttaagctttgacttgagattttaatgtgctttaaccccaccgacttattgtaatcctccaaagtgaaattctcaaggagaggaaggtttgaaataagatattctactgatgaagaatcgttcatacgccaatcacaatttaaagtgagatttgtgattgccttgcatgctgagagatttactttgtcaaagtaaacaccctttagtatcaaagattcaagatttaccgcttcaatttgccccactataatctcaggttggtcaatttctaagaatttgaggcttaaactacgtatgtaaagcttgtcatcattagtacttaaatcacaacaatgtaactccaaactctcaagggaaggacagcccaaaaacagctcatttacctccacaaaccaaacacattccaacgacaatgatttcaaagatggaaatctaaatgagcaacagtccaaccacaccctactcaacttcaagatggtcaaatatattgcattgagcattactgattggggaaaggggtcgcaaccattattagggaaggttatacttatctccttgactttattctcgatagcaaaagctaaccatttatttacgagttgatgatccagagcacttccatgacatatcatcctgaacttaaaactagtgatgactgaatcgcccataaaaaacaaccctctcttgcagtgtttcaaataattgtccacataatccaagaacttcttgccatacaataattcagtatcggaaaaagagagagtggggactaaataccacatgagtttccaacgctgtgaaagaacgcttgtcgtaaccacatcctcagaaggaagaaacgacaggatgtgtataatgattgcatcaggtagtttcgaaattctgtcctcttcttcagccatcgtcgatgatgacgaagctgtagttttaactcttttttcagccataaaagatgaaaattatggattgacgactgttaaaaacatagaaatgatcatctattaatttcctttgattcagataatactacattttgaaatcgtttagcatttacggaagaaaaagaaaactagaaagttgttgatccttacttgttggtgcagtagaaatttgatatcagggtttgattttaggttgaagatgataaaaagaagaagaatacttctccttagaaaaaggcaaagcaaaataggattaaaactaatatcaaatttaaaagcaccaatatacttagcaaaatcattaagctaaagagagaaataaataacaaaaatgattaaaataccttgagtttagacctcctgagccaacaatggcggagagaatgaaaatgaaggaagcttgagagtcacatattggagctcaaaccaaggaaaatgtcactgtggtcatcacgtgctcttttttacatatttgattaagtttttttttttttttcctcatagttagaagtatgtagtaggggtctttgtcaaaccgctcaaaccgcccgcaccacaatgtaccgtaaaaaaaatgcggtttaaaattctttgcggtgcggtcgcggtttgaatttttcttaaaccgtgtggtgcagtttgcagttttgaatt

SEQ ID NO: 112923 - DNA, 2849 bp, Cannabis sativa
aaattaatgatttttttttatgtgacaaaaggcaatgtaaataataaatagtttaaaatggtcatttctctataagttttgaaatgaagatctttaataacaagtcttatgatttagggccatttactataattttttaaaataaggacatatactaacatagtcctatgatttggggtcatttgctataatttccctataatagtatgccacctcttgtgatgtttgacaccttaaggtgttccttaaaatttctcttaatttaatagtgcacgactccaacctctagcgatggatgaagaaagctgatggtgactttttgaagaaatttagacaataccaaattatacgaatactcacttagagtaccgaataatcaaagaatatagtatacatactattaacttagaattttattagcataaatgagatttgataatatttctcttaattttggataatagtttaagtaataaatgatatataattcagtaaggaaaaatagaagaacactaaaatttttacgtggttttgtaattaaaatttacattgtccatgagttcttatgatttctggatttttagatgtgtctacaatttgatagagtttttgtaagctagaataattgccctcctctttacaatgttctcactactatttataggaatagaataacatttatttaatttaatctaaattacgattataaaactaggacatttctcatgtttcatgctcttatgcaataggcgggaagaaataactgcttgtattttgtaaacataagataatcgttgtcttgatgtggccacaacatgttgtaattgagtagagttatgtaagacccttcttcttagaaagcttgtcgaaggaaccatagatagagttatgctttaaaaagctaacttggtccagattacgaacctttcaagttgaccacctggatcgggcttaattgctttatcattttaagcgagccacaacatcttatctcaatagcaggcagtagccaaatcatcgtacacaaacttaggtttagatgaatcatatgattttttcttctcgtcgataaaatgtgttgagctaggtgacttttccttgtttatttcttcagatatccatgatttggagtgagagaatgttcttctttgcctaaggcaattttgaatagtatattggcttttttctagctgctttaaccgttatgacaatattattcagctaatatattttgagatgtatatttaattttggattctttgttgagcgagtgaaatgttagcttgttaatttaatatttatgtacacatgtcatgtgacttagcccattaaaatattagtataacaatcgccctctcaaaattacttctgatttttataaggaattttgtaataccacatagaaaattgtactgccatttcttgcatattgaatacgttttgaattcgacaattttagttttttgaaaaatcctttaaatatcaatcagggctgtatttttcccagaccaagtaagttgattactgtagattaagaattattgctaatcaaatgatgttcacaaggccccttctaagtcgaattttttgagctttcttcaccattttcgccattttttgaagaaaaaacttcaatgatctccgattctctctcttttatttacttacaaattatggctgtttatctctcttatactctttaagagtttccatcatttttttgaagccaagaccgtggtatataccagaacattggtatcataagttactagtgaggaatttgttagttacacctccaatcgtagaatctggtaggtgctatgacattctcattgaaaattttgaggtttgtttttattttttggggttctaggtattcttctcaggattttattctaagtaagttgacttttgtgattcctttatactattaattctaaatttgaattttgaattctacagatacaatagcattttttctctatttttatggaaaaaaatgtctctattttgctctgaacatgaaaatccagaatttttaaaagaggaaatttaatttctcccaattttatcccttaattccaaacccaaaattttaaaaacaaattttgtaattaatgacaagaaaatttgggagcatacggataggttaaatcgagcagatatctttgctcactataggagttttttggacaagataattgagggtaggcatcgttatttgtgagatgcagcttggcccgagctactagtataattaagttttctatagctaaaaccttgtatttatgtaataccctaagattaaaaaatcagattagcaaaccctaactagttaaatgtgtattaacgtggaattatattatgatataatttaatatatgtgaattaaactaattagtgacatgttaagacaccgttggtgagccatggcattttcgtaattttgacccaaaaggggtaaaactgtaattttaatattatggcgtgcttatggactatattattatatagtttacttgttttgtccttctataggtgttttttgacaagtcggcgcggtagtcacaactgggtatttcgggccaaactgggttcgaggccgaaatacatttttgagattttattttggcattttattgataatttaataatctgaaaatatatttaagtatggaatgtgatgaatgacaattttgctcttgaatgcatgcttatgtgatatattggccctaggggcattttagtattttgtccatttgtttaattttcaacaaaagaggaatttttggtaaatggaaattcatactttgatttctttggccctaaaccgacaccccccccccccc

SEQ ID NO: 112924 - DNA, 2315 bp, Cannabis sativa
  modified_base (2246)..(2281): a, c, t, g, unknown or other
ttttaacgtccaaaaaagttcaggggcgtgatttggtatatgtcaaagtttggggggaaaaaaatcctaattagcctaatttttttatatagttatttataaaatattattgaaaagttaccattagatttgattaaatctaaagttataactaagacatataataggaatgataaaatataggaaacacaatttgcatgacttatttcttctttctgccttttgttgccatcatcggtcgactatctctaaaagttttaggaattatcatctgaacaaggtattatcacttttgtccaaaagcttatttaccatatctctaagcactaagggaactctcatgaaaataactttgggaattatcaagccttgtattttctaacaagtgcttattcccgttgtcaaccattcagtggctttaaaaaggcttcagtccaaagttggtagtgatctagctctgtttgatgtcgatcttctagagcaaacagttggtacctactgccaactaagcgtagataggtgggctacagaatttcgccaagacacaatcttcctggcgtaattcactttgtcattaggctgctagagttagtattctcaattaatgttgtaattaattttattcatcatattttactaacgttattttattctactctttttaaggaaaaatgctcgcagaacactgtttggaaaatgactttagagttagagaacctccagaccgaacgcgagacatttaacaaaaagagggaggaggctatgtccaagttggaagagatccataatctaatgacagagctcgtggatcaacaagttaaggataggctccaatctcatatcaatgacattatcaaatcttacaagtaggacttttggaagcaatagaagcaggcatatgagtataaggagaattacaaccaagctaagggtcgaatcgagaccttggaagctcacgagttaagtctaaaagataagcttcagaacgcggagtgtgatctgaggaatactggactaagggtggatgtgctaaataaggaccttgatgagaataataattgcatctacatcctggaacaggatcttaggctcatgaggctcatgactggcttctgtgatgcttcattgctagccaagaaggaccttaccaccaaacttgaggcccaaaccaaggaaaaactaaaatttaacttcaactaacaaaagcaaagaggaaagcagaagaggaactggcagccgtgaaaaagaaagcagaagaagacctggcagtagcaaatgtttgtacgagggaagatttatcaaactcctttcttattgcccttcatacattatggaagagggatcctaatgttttgaagattcttggagaagaggaaaagaatttccttcctctaatccacgatctagataggaaaaatcttccaaatgatgaagaggcagaggactctgagtcagaaattgaccttccaaccgaagtgctaagctcaagacttactcaacctgattcaactactgggcttgctgttccaaagttttgtgtcagctaacactgaagattccatgcaatcttaatggccttatattattttttatttttgtttgggggacaagggtcccccttttaatcattttgaagataatagttttgctcttgtcatagagttttattgtttgtaatttaactttccttttatcgtccctaaagactagatagttttttaattacttccacacaatcacttagatttcaaatgcattaagtgttaggaataaaagaattttgttaagttagttatcttccaaacaccctgaggttctagctcccacgacctgacccttggagttttaattttatactcagactttttaactatttaagattaaaataataaatctggaaaacttataagaattacttactccttgatccttgagattctggttccaaaagtctaaaacttttgggcttcaattttatttcttcaatgtttctgcttttctttattgtctttgaagcttgaacttctttctttagtttatcaacttgagttaactagtgaactattaatataagtatggtaagatggaaacttacccacggttccctaaggttatggttccaaaggcctgaaccttatggacttcaatttatgcttctactccaagctgattaatgaacattcacacttaaaagaataaaatttttagatttttggaggtgcatcgtgttgggttttgtgccctannnnnnnnnnnnnnnnnnnnnnnnnnnnnnnnnnnntaataaagatcagaaatcacattttatgttgcat

SEQ ID NO: 112925 - DNA, 1990 bp, Cannabis sativa
cttccgatctacgggtcggagatccatcaacgaacggcctccttctccggcagcggtcgcttcaaacagtagagagggagattgggtacgccgttcggagttcacagccaggaaaattgagttgcccgtcttctccggcgacgaccccgatgagtggacgttcagagccgatcgatacttcggtctccaacgattaaacccaacagagcaactcgaggcggcggtgttgtgcttagaaggggcagcccttcgatggtttcggtgggaaaattctaggcagcccattaactcgtgggaagaattaaaggagatggtgattcgcaggttccgaccggcgcacgaagggacggtgtatgaccgttttttccaactacagcagcaggcgacttcggtgcaggagtatcgacgccggtttgaagctttggcggcatccatggggcagatgtccgatcaggcattgcttgctgcctttgttaatggtttgaagatggaggtgcaaggcccactacgcctcttggagcccaatgggttgatcaaggcaatggagctggctgagtccattgaagccaaccaagctttagtccgtaactcacggattgggccgagtaagtctagcccaggcccaataagacccatcaactcatttttcaactctgaagccactaaagggactcacgtgcaacctcacatgtcatctcctctttccccagcttcgtctagttccagctacaagtccactcaatcttcaacttcacccactcgattcaagaagtatacagaggcggaattgagggaaaaaagaaaccgaggtgtgtgttataagtgtgatgaacggtggtatagggggcatgaatgtaaatcagctgagttacaagtgattgtggtacaagatgagccgatagaagacccaccggaagattggactcccaacgccctcgatacaccatcaatggaggcggctgaagctcagatagtggaggtctccttgaattcggtggctgggttgacatcaccaaagaccatgaaactcttgggttgcatcaacgggcaagaggtggtggttttaattgatagtggcgccactcacaatttcatcaccactgaattggcgaccaaattgaaactgccaatctctgaaactgaggcttatggggtacaaatgggaagcggacgggcggtaaaaggggctggggtgtgtcgctcggttccgttagagttgcaaagtatttacataagggaagattttcttcctctgccattgggaagcacggatgtaatattgggggtacaatggctggaaactttgaaaaaaactactcattattggcaagatcataaaatggagttcatggtgggcggtcaaaaaattgtgttgcaaggagatccttctcttcataagataccggtgtcattgaaggctatgcttgggattttgcgaactgaaaaacaaggagtgttgattgaactcggcagtgcggcagtggtggcaacagagatacactacaatgaggacatttcttcgttattggcacggtactccaaggtgtttgaggtgcccacgaagctaccaccttcacgccaacacgatcacaccatcaacttgcgccccgatgcagcacccgtgagtgtgagaccttaccgttacccacacttccaaaaaggagagatagagcgattggtagcggaaatgttggcagccggcatttgtcaagatagtaacagcccattctcgagcccggtcttactagtgaagaaaaaagatggtagttggaggttttgcgtggattaccgggccttgaatcgagagacaataccggacaagttccctataccggtgattgatgagttgttagatgagcttcatggcgctcaagtgttctcaaaattggacttgagatcgggttaccatcaaatccgagttcggcccgaggatgtccacaaaactgcgtttcgtacccacgaaggccactatgagtttttggttatgccg

SEQ ID NO: 112926 - DNA, 1551 bp, Cannabis sativa
ttgaaccatataataatataattcctcacttattcataattatctaattaggattttgctaatccatttcataactctagggtattacatgcatggtggtgcctaggggctgaaccaccactaaaatgattttttcttttgattccaagtctcatatctcgttttgggagaaaaaaaaggaataattcttaagacggaatcacaatcagattgacaaccacaagtcacatggactgcgtaccagggcacccagggcacctgctcttggtgtgataggcgcccagcttttcatttgggcctcaaatggctttgtttgcttcaagaaagcacttgtatcttcattgttgacaaaaataagaaaaatgctcagaagacttcttcgaaattaggtgtaacaaagtgcccttggtcgagatacatcaacttgggcgcccatagtggcctgagagtctgcattaggcgcccaggtgggggaaaaggtctccgaaaattgtctcgttgatgtccaatcttctttttgatgaaaagcgctcaccgaattttagttttgtctaattcacactggcgttacttggtaagaaaaatcgatgcccaagttgcaatgtcaacatgggtgcccatagattgatatgggcttattcgggacgtctttgatgaaaaatcatgtcatggcgttgttccttgttggatttgaggaattgtgatccaaagaagttcctgcaaacctaaaccctagtcgtcatgtagcccaagttgactatatgtcaacatgtgtgcctaatgtgcacttggtgtctctaggtaaggttttgtccaaacttacctctaaggtcaaaaacttggcttgagcatatctctcattatcctagagcaatggctaagcagattgcaataggaaattgttgagaaccgaaactgatacaagacagcgcacgccctgtcaaccttggtgcccaagtacttgtattgggcttaggttgagttgcaggatgtccaagtgacatcctcagcttcgtggtttatcattttgtggtcattgtgacatcctcgctagattttggtgcttatttgggtgcccccaatgtgcaaacaacactgacctatcctaggatgcaaggcccatagtttttccctcgtgccacgtgttaaaaacaatattcgtgtcatcaagccaactttttggctaaattgattgaacattaaaaacgtaaaaaaacataaaaagaattgtttgaaaaaaaataatttaaataataaatagtgtgcgaatcatttctgagcaagttttaaaataaagatatttaccttcaataattttgagtcattataatttctcattcagtttttaggttgtagcatatctgcaaagcccaaactaccaaactgataaatttcgactggagttgttgggccacttttgaaccttagatttgttatttaatttttggctaattagtcattattctccctgaactttgacatgtaccaaatcatgtcctctgaacttttttgactgttaaaaattcccctcaaactattgaaattgttaaa

SEQ ID NO: 112927 - DNA, 3268 bp, Cannabis sativa
  modified_base (1450)..(1459): a, c, t, g, unknown or other
aaaaaaaaaaaaaaaaaactagcgaaatactgtacccttctttgagaaatttgctaaactaactatttaaaatactaaaatttataaaataactttacactatgatggttatacaatgtaaatttatgataattttgtaatcataatagttatttatagttgcatagtataatttataattatttttgtgatataaaaaataattttgctgataaaattttgaaaaagtaattttgctaataaaatcattcatggtctatttttacaaaagagtctccctagtaatctataagcgaaatttccacaaacagtgttattttatttttggactactcaatcaaccctcttgattcctttccaactccgcaaacgtatcatgacacgctggataggacagcgctatcattgcttccacatcaactatgtgccgtggatttcgctccgttcggtcccaccattttttaaaattttaagctcctatgtggcccccactcatatatttgatttatatctatgattaatcatattatgcgattcaggttgattgatcggacggctgtcggtccatcagctggaaaatagagctggtaaaaaaatatttttttatgaagacaatagaaggctcaaactgggcttggcagggccactgaggcgaaaagagtcgctatcggatcatggacaaactcaccccgtgcatgtgggccacgtgtatctcatcgacttccttctccctcatcgtaagtcagaacaacctggtttcgaccctcgttgaccctaatattacatttacatattacagcttaattttgttaaattcggcgtgtctgatagtcatatggattttgtccttctatttttgttactttttttttctttttggtctttatatttttttagactgtgaggccctgttcttcgccaatatatagtatgatcacaaaacgtcaaaactgggtttattcgatttttttcttggagggtaagaatattgagtatcatgtaaatatatctatgcgaggtcagtttttgcatgttattcaatttaacaattatagggtcgaattttgtctaaattattaagtacaataattgagcttttttaattaatcaagtaaataattgtgttgcttattaatattcaatgagccattatagtttgtcccgactgcaataatacttttatataataacctttaaaattaaaaaaataaataaattgtaagactttatttttatttttattttttttacggaattttacataaaaattcctataacaattaacggaacaatctaaattataactaaaatttatataacaacccacatagaaattatcggagaaactcaaactcgtaaatttgaaaaaaaaaataatatataaagtacttttcctaaattgtatcatgcataatggaaaattctacaatacctctctctctctctctcnnnnnnnnnntttttttttttttctttttgaggaaactaatatgcaactatattaatattaaacagtaagttcagttacaagatcgaaaaatacaatcaatggaattaataccattccaaataatatctttatctgttcctaatgcctttttgctagggcatgagctaaggtatgtaggaatatgatcaattcgcacatagaaaaaggtgataaaaataatataactttgttatctaaatcagataaagaagatttttctctctatttgtgcttgattttattcactagcactttgacaattagtctgaaaatgaagctaaaggaaacttcacactttcacaccattgaagagctctaagaagagcatgagcttcagcaagaatgggagaaagagctccaggcatagatgaataaaacctagcaattacatcactcctacagttttgaataacggccccaaaaccaagcttcatagaatccttgtttatggttgcatctgtacttagagcaaatttcccctgtggaggcaaaggaggtaactcaaagaagttgaggttgtgtgaacagtagtagtagaggtcctttgagcacttgtgtagtcctgcaaaaaggtaactattcaacttttgacatctactataaaagctttattatcattaaaaagtgtgatatttcttcaatttcaaatagcccaaactatattgaaaaataaggaaagatcctctttacttaaactatcaaaaaccagctaaaagaaaatttttaatatcaccaagcatatgattataatagaattgagaaaatctagtttaattccaaatttggactactctggaacaccctaggaatgcatgagtgacactatcaatgtggttagagcaaagggagcaacataggttattaaggatatttcttttgaaaaggttgaaggaaatagggagaatatgcttaaaagcattccaaatgaaatgcttgattttggaggaatgttaaggatccagacagttttccaccaactttaaaaataatcaaaactagaggaagaaggggaggtaatgcggtaaggtgctagagaggtagcaaggtgatatgctgagctgacagttaaaactctagaggaatgatgaccccaaataaatgaatcttcttcggtgtgatcaataggggtcttaagtatagcatggacaatatcttcagagaaataggaaagaagtttgttcaggtcccaaatgccaagatcatttataaagaaggaaatagtattctttggaggatggatgttatctttgaaattgagaaccttaaaaccagggatccagttatagtgaagggtggaaattgatttaccattccctactttccaaataagcccttatttacaaaggtccttgccccgtaagatactgctccaggaataagagggacattggcctttagagactaaaagaaaatcattgtacttaaagtatttagcttttaaaagtctgaaaagaagagagtttggattagtggaaatcctccacgcttgtttggcaagcaaagcttgattgtgaaaaataaaggatcgaaaacccaaccccaaaaaacttagattcacaaagagagttccaatttttccaatgaattttagtattactacccatagaaccccacgaaaacaagacattgcatcagaagagattgcttggataacaactttaataagagtccctttccctgccttagcgaataaattattgttctaaatatttgttgggttttatgccctaaataaaactcatttcaaagatcggaagagcgtcgtgtagggaaagagtg

SEQ ID NO: 112928 - DNA, 3489 bp, Cannabis sativa
  modified_base (3456)..(3456): a, c, t, g, unknown or other
ttccattcctattctcatttctatgttttcattcctcccaaccaaacggcacttaaaagtgtatcgagagagagagaagagagaaaacccctatgctatcctgatgaagaactttgccacattttctttaaagtattggctgttgagtacattcgggctcaacttaaagaattcgataataagagtgatcattattcaattatgtatagtttttttttttcttttttaatcttgtcacgagaagctgtttgtaacgtaaaatgaattataatttatattggattagttgtaaactataaccatctgagatatgtttatttatttaatatataacattcacagagttagcatatttattcatttttttagcgacatttatttgttattatatgtttttattaggataagataaaaattagaataatttctcaaaagttaagatgcttaaaatcttgaaatcctaacttaaataatttcaacttacatgattagctattaaacaaaaccttacatgattagtttattaattccaaaatgaaaaagaaaaaaaatataaaagtgaagttgacatatttaattagcaacttgacaagttggagagactctcaaagtaaagattatggaatagtcctcccatatttaagaaggaaaagatcaattaaaataaaaccaaaagagcttatttgcattcatgccttttggaaagagctattaaatcaagctctagtttgggtgaagaaagtgtaactgctgctttactaataattagaagatgtttcagcttatatttctactaatgtaattttaattacaaatggataaatgctagaatccacaccttgttattaatgtgagcatttcgatccgtagttcaaattaaagccatgaaataagtagtcggaaaattaaaagtcttcgcagaattagaagtctttgcataatttgcctctgatcttgataaagttactcagaatcaattggcaagaggtcaacgattacgtgaattactcaaaaaatctcaatcagcccctctttcgataaaagaacaaataatcactatttatacggaacgaatgactaccttgatttattagaaatcgatcaggaaatttctgcttgagttacaaaattatttgaaaacgaataaacctcaattccaaaaaatcatataaaaaattattagtgtctaatattttgagatagtgttttacaaatagtagtaactttttgaagaaatttacacaaaatattatttttggtaaaaaagaatcacacttttacgttcaaatatttttttttatatatatatttttatggtattttataaaaataatatgaaaacaaaaaaaaaaaaaactacatgaaaaataatagaaaaatatcaaataatataaaaataataaaaaatcaacaacaaaataataaaagtacaataaaaaaaataacataaaaacataaaaagactgtattttctttaaataagattttaaaaattgtaaaaatatttaaaattatatataattatatttttataattattttatgtatttttaaaataattttattttcgttatataataattattaaattaattttttacaatagtagtatacacaaacaaaaggaattgcatttattattattatttttttttttggtgagaaaagataaaataaacattgaaagggtagctttatagggcggatgaatagataaatatggagaatgctgatctctcaactatctttaaaacttatccattccatctactattgattgacacattatctcaagctctatcttaaatcatcatttttaatgcacctaatttatgcaaagcaaatagataaagtgaacaaaactaattaaactaaattcatagtatattatataaatatatatatatatatattatatttttaggtcaaagctacaatgtgatagagtagtttttttttttttgaaccaaagttcgaatgtgatagagtacttaatgagtagtaaaagaggcttttcctttttccaataaggtaagaagcaaagccacaagcaatcaatgaagcaaatagcgatcctctaaaagctattatattaaattatatagaacccttaaagaatatcatcattggagatgctctaaaagatgcttaaaatgtccacataataatctcaaaatatattttattttctctttcatctcgtatcatttttagcaacctttattttaaaaatattctaatcgtaagcatttctaaaaattattaaaaaaaatattataattttaattgttattcgcgtttttgccaagggatacgtggaatccaggtcagcatcaaaggcccacaagtgggttccaaagaagataatttaggccaagtccgagttatataggaccttccaagaacgtaccttgggtctgtgattagaggatctattgtcggtgacagctcgtatctagaaggagctctactatcgtgagtttggaagagttagagctcttggaagacaagtccagtttctctttttattcccgcgcataaataagaaaataaatacttcccagatcttgacagaagattgtatcaagctaaaaggaaaaacttcttgaacaaagattaaacaattaattcatgattaattgccacaattatatgacataattttgactaattcaatcgtatctaatttgcctagtcagcatatcctctcattcgtgggctggacttcacaagacagcctaagttatgtaatttagtgtgaattcccaacagagggaaaatagaaactaagtgtaattctctaaatactaaaaatacccaatgaatccttcacatgaagggttgaactctcttacaatatttgcttatgcaaacttgagaatttatgctcactgtattctcaaaggcttttctagcttaaagttacataataacatcgactcatggactaaggtttgttagcgccccaaccacgtaaaaattgtttatgttgttcatactctttctcttttaattatttatttcttcagttctaattatttataattcattttctgaaaatctcagtaaatattttggtacttttattgagagctgaagaaagcagtgataccatctagagattacgttcagtaatcatggtactcactcataacaaatttggtgttcattttaatgatcctaatgtcaaagcaggggataaagaagatcagaataaggtaactagccatcacaaagatcaagttggcaaagatgcagacctagacgctcttgtatttgaagatgacgaatcagaagagaataattttgatgatgttgaagatgatctacaagccaactcaaaggatgatcctcaagatgcaacgagggatgatcgccaggacaaggccactaacaatgttgttggaggaaaagacaaacctgatgagacagatcctgtaaagcccgcttagttantttggaaattagcagttgtttatgattaattat

SEQ ID NO: 112929 - DNA, 8150 bp, Cannabis sativa
gaaagacataacaactccaactttgcaaggagaattgtcaactattctatattttgacttgtcaactttgcaaggagactttatcaaagtattcatcataataatagtacagtagtagttgaaagaaaagcacataatgacaaaagaaaaaaggtagcagtaggaggagcaaatactaaaatttgtgctttctccattagtgttttgaactcaaatactaaaactaaaatttgtaagataagttcaatttatgattgcagagtgtaaaaatagttgttatataagattattttgttaataaatttttttgatgatgattcacataaaagtcccataccttatgattcgattattgttatggagtatatacaaagctctttgttgatttcaattgagccttctacatattatgtctattatatgttataggagaggctcgttaatttactttaatacattttttcgattgcattttaaaaagttaaaattttaacttattgccaagtgtcaaatcagtacctacttacgtgttaatttgtaattggtccatgtagatttttgtattttatttttaaaaaaatcatttcaaagactccaaaatttaaaaaatatatattataaaattaaaaatttaaaaaaaaataaagatcaatttactttcctttttttcttctgccactcttaattttctctttaaacattaatctcataagatccttccaaaagccagtgacaacttagttgcacgtgaccctctttcctcaaagaaacaaaatcacgtgaccctaaattaccaaaattataaaagctttcttttttttttcttttttttttttttattttcgattctgaaaacggaagaattgaattttcaatggctatggcgatggaggacaatgaaggagaagaacaacacccatcgtttcccaatcacaagctctgtggttatctctgcacggttctcacttcttctcacccttctcctcctctcggcactcgatttcacatcctccgccatgattcccacctcgttttcaggtccgacgacgtcgttttgtcccccgtcgattcaccggaaactaaattgtctggctcagaggaaagttgcggaactcctcttgggatggggaagaggaagaggaagagaagcattggaatggtgaatgggagtatgagtatagtggaacagatttacgcattgttgacaaataaatgtttgcagattgatgcgagaatggtgtgggctgaggaattcaatggcggttcgacttcgaattcaacctcagttgcaggagaggtcagagtagtgttactcgtcgatgtttatcttccgattgagttttggtccggttggcagttccccaaatgcggttccgttgctggtgctgtgttcaaacacttgaggtaaattgcttctactcatactcatactcaaactcaaaccaattctttgtcttggaaacttgattatagcacttggtcaaaaacttacttttttaggattgtcatgtaaaatatttgttttaactaatcagctcaagaatgtttctcttgcagttgtaactgggaacaaagaagattgatgcttgccaatgtagattatgctaaagataccttagcagctggtagggggatgtggaatctctctgattgtcatgttcttggatgcgagttgcattataatgtcactgatacttcaaagaaaaaactgtttgaacttcatgaaatttttcagagtttacctagcattacggagatgggatatcccaattcttacagaatacaacctgttggtgactatagtggatctggcatatgggaactatctgatgacattttgattaaaatactagctcttcttggcccaacagatttagttaggactgctgtaacctgtcgtaacttaagattcttgactgcattaatcatgccgtgtatgaaacttaaattgtttcctcatcagcaggcagctgtgcagtggatgttacaccgtgagcagcatgctgaagtcatgccacatcccctttacattgctttcacgactgaagacggattttcttttcacgtgagcactattactggtgaaatagtctctgatataccacctactgtcaatgattttcgtggggggatgttttgtgatgaacctggcttaggcaagacaataacagcactttccctcatcctcaagacacaagggaaatcagcagatccaccagatggtgtaaacgtgaccaggtgtactcacaatggtgatcaggcatgtggctattatgatcttaataatgattatgtggttggcagtattgtgaccccaggaaagagggttgtgaataataaagcaaacacaggtggtgagaagcttggctactgctcatctaaaagaggtaggccaagttttcctaatgagcacaatgcaagagttaaggaattatgctctaataaacaaaaagaaaccccaggagctacttgctctgagccagcactgcctgtgactcgttgcacaaggaacttgagtcgcgtcaggaaaagcctattttctactgaaaacaaagattatggtcacttaaatgaaaaaaaagcagcattgaattctcgcaaaggtaaacagactttggatggagcaggacaagtctcttgggaaaaacatactgatttgtcatatgaactttcgaacatgtccaagaagcctagcaaagtaactactgatcatgacaactgtaacgatacttggattcagtgtgatgcttgtagcaagtggcggaggtttctggaaagcagcacgtcggatgctaatataacatggttttgtagcatgaatactgaccctctatatcagagttgtactgttccagaggaaacatgggacaaaggcgagccaatattatctttacaaggattctacaccaaaggaacctctggagggcaggaacagaatattttattctttgctaatgtgctcaaggagcataggttcttgatgaattttgcaaccaagacagccttgaggtggttaattacactttctccagaaaagctgtcagaaatggaaacaattggacttagaggccctttcattagcacgtgtgtagagtcaggtgaagatgccattggttttcagaaaatatttgaatcatttggtcttagaagagaagtcacaaaacgtattattaggtggtgttacccacaaaaccttcacaacttggtctttgatgtggctgctctgaaaattgctctttctcagccactggattcatctagtaggttgtatgtatcaagagcaaccctgatagttgttcctgcaaatctagttgatcattggaaaacccaaattcagaagcatgtcagacatggtcagctacgaatctatctttggactgataacagaaagccttctgcacacagtctggcctgggactatgatgttgtcataactactttcaatcgcttaagtgcagaatggggaacccgtaagagaagtgtcctaatgcaggttcattggcttagggtcatgttagatgagggacacaccctcggctctagtgttggcttgacaaacaaactgcaaatggctgtttcattagttgcttcaaaccgttggatattaacaggaacaccaactcctaacacacccaacagtcatctatcccaccttcaaccgttgcttaggtttcttcacgaggaagcttatgggctgaatcaaaagtcatgggaagctggaattcttaggccttttgaggcagagatggaagaaggacgctctcgtctgttgcacttacttcgcaggtgcatgattagtgctcgaaaagtagatttgaagaacattccgccttgcataaaaaaggttacatttgttgattttactgaggcacatgcaaggagttacaatgaactagttgttacagtacggcgtaatattctactggctgattggaatgatccttctcatgttgaaagtctgttaaatccaaagcagtggaagtcccggagcacaactattaaaaatattaggctatcttgctgtgtggcagggcacataaaagtaacagatgccggtgaagatattcaggaaactatggatgttttagttgaagagggtcttgatcccatgtcagaagagtatgcttttattaagtataacctccttcatggtggaaactgtgtcaggtaagtaattattgatcttttgattccctctggtttcctctttgattttctggattattaataactggacgagcttttattttaggtgtggggagtggtgccgtttacctgtcattacgccatgtaggcatcttttgtgcctcgattgtgttgaattggacagcagaagatgcacttatcctggttgtggcaatttatatgagatgcaaactcctgataccttagctcggccagaaaatcgaaatccaaagtgggatgtccctaaagatcttatcgagttacaaccatcatataaacaggcatgtttatcttaatggtgtattcttcacttttaaaacaaccaaatttagtttttcatgtttctaatttgtttgctgcatctaacttatacatgtcatttgatgcaggacaactgggatcctgattggcaatcaacatccagcagtaaagtttcttatcttatacataagctgaaggaactacaggacgctaacagggaggtctatcagtctatggacggtggcactggcaaccaaaatattgagtttttactttcttcttctagaatgaatgaatttgatgaacggacacaagactttggtagttttagaacgagttctactcacaaaagaattaaagataaagtattggtattttctcagtttttggagcatattcatgttattgagcaacaggtaatcaatgtaaactgaaaatatttctgtttttctttattttttatggatttcatctgtacgattagatctttgacttgttattgtttccagctaaccatggctgatattaaatttgctgggatgtatagcccaatgcatgctggcaacaaggtagatatcctttttttttaattattattctttgatgcttatttgttttccctatatttatttgttaactccctttatttggttcagatgaagtcgttggctatgtttcagtatgattcaaattgcatggtgcttttgatggatggaagtgctgcactcggtctcgatttgagctttgtgtcacatgtctttttgatggaaccaatatgggacaaaaggttatattcgtacttcaagttttttataatgactgttagaatgattgtttatgcaaaagaaataattttgtatttctattttcagaaacaatgtttttctttttctttttttgtgcaatatattctcatccttattattctattgatttggacctgattagcatggaggaacaagtcatcagtcgtgctcatcgcatgggtgctacacgtcctattcaagtagaaactttagcaatgcgaggtaccatagaagaacaaatgctgactttcttacaggtaaactctttggatgactctgccattgataagctcacttacaatataattcttatcatatccccctcattcttctaccctcatatttttggtatcctattcattctcattcactgccccctctcattacaatgacccatgtacttatttattatattctactaatctcggggtctatcatttcttttggttcttcctctgttggtgagaagatcatctagtagaatatttaaaacaagatatagatttaaatatattaaaggatataagttaaggatatctaatgtttcaaaaaaatatattcaaggactcttttggactaaattgaaaaaccgaagattagtttttaatttttgaggaatttgtaaacgtggtatctttatttcattttttttattctgtggccaaattgatatattccatatatatataatataatcaaaaattgatgggagaaaattattgtcttattggtttatctttcaggatcctgaagagtgcagaaaacttttaaagcaacagtttggaaggactgattctgaaggtactcgaaatcatcgctcattgcacgatttcgctgagagtaattatctctctcatattggttttgtgcggaaaaatcctaagacataaaaaggtttgtgcataatttcttatgctttcttgttaacttttgtagatattgcttgaagttttgtggattaagttgtctcgttgttccttctaatcaaactaaggaacataaaatattacatcaagcgataccattactttcgacactctttagccatatagaatcccacagcttgattctttcccaaaagtactccatgtaaatcttcttaccttttaaaaatcctgccactttgtccaatcaaataacccacagcatgctcgcacaccaaaattcaaattatccttgtggagtactctagaaacttagtccataatcttcctcgaaactaacaatgtaaaaaagtcctcatctttgactcttaattactataatgtggtgccctgatcatattgtctgattactactctcatcactgaactatactattagttttgtttttagcatgaatcattattggttttagtgttaaatctcattcttaaccacaaatggctgtttatgcatgtagcagttagagaggaatagcagaaatctaaccctttgggactaaatttatgagagtaaataggagtaaatagtaagttctttgtataattttaccccccgaattttttagtgtggcaaaaattcccctgaactttttttcttggctaacatttcctgcaaatatgccccttttgttgctttacaattaaatttcattttcttaggcagtttgttgatgcggctattggccgcagacatagttgcagtagaagaatctctttaatgtttgaattacgccacattagcaattgataattctagtaggaggcaacttgagtactttatattctttctctagcttatacaaatttattggtcttcacttcgaatatattattttctttttccttccagggattgtagatagagagtttgaacatagaaatatgcacttttgattcattatgcattgcctattgtgcggaggctgatgcatcagattgctggacatactttgacttatgaagtctgctaacaattcctaatttcaagaaacattgcctcaaatggcatctcttagataccttttcgtaatttgtatttgcaaccattttctcataaatcattattttttgattgagataaaaaaggtgaaaaggaattgggatatggtggggaaagaaaggatgtggacattgatgtacatataaattataatcatcatttatattaaggaattattttattctgatgtgtatgactatgtgttgatgacaccattaaccacagttttttttaccacattctgctgtttcagttgggtcattttttttttctgatggaatttgaattggttcattgatggggaagagttagaatataaaaataatgttaaaaggttaaatattcattaatgtatgattaggggagaaaaaaaacctttcaatcatatggtttcttcttgctttcgtgtagaacaagaaaattaagatgtgtcggagcttcagagcttcaaagaactaacaccaaacaactctagagagattaccaatttgagcaactcttgctgattttttttcttataaaaaaaagaagcaatcaataaagagcaggttgaaagatgagatcaactgatgtagttcagttctttgaaattcaatatcattaaatcaggttttcttttttctttttatttttttcaaaatgaacaaataattagaaaacactttttgaactggttggtggagttgcaactaacaagtagttgatcggactgagaaattggtcaataaatttgatggggaaagtaaaaattgaaatgaaatcaaaggtaccatggtcgattccgttaatgggattgcataagttgctatgaaccacaccctaagagcatctctaatggagtgctaaataattgttatttttttaacacttttcaataaaaagtttttccaatagagcaatttgcggcgaaacccccttatgttttgatttttatacacttaacctccttatctt

SEQ ID NO: 112930 - DNA, 3003 bp, Cannabis sativa
aatcttttgagtaaaaattgaaatattggattcaagtacaaaagagtgtaaattatattttgagaattttaaaacttcagctagcttgattaagtatcatccttgatttttgatattttgtaagcacttcatcgtcaaaaattgcataaatgttacagactgaggacttattttgctgaggattaaaacaaaaaggaaaaaagaacagtgcaacccttcttccaattccacaaatggaatggatttgattttgggttgatctaagctgcccattattaagcgctggccatcttaactagcaaataatagcattgtatctgcaagcttcctttttgggtcccctcaatcttcttagttagctctttgaacatttattcagtatatgagcaccaagttgtggcgcttagtatcagagaaaacattacaacagttacctaggcaaatacatttcgaatgcttccaagatgatacatgcatcaattttcatgatttgttcatctaattcagaagtagaaacaagtcctacaacactttataattgcaattacatgacgataatgttttcattatccaaaacaaacaaggaaacttcagagcaaattaaatgtcaactttctactttctttggtttcatagcaaataatcactcttctgtatataagattggcatatacatacatcaatataatgaggttaaaagaaaaaagccgtagactgcttagacttaatcacaaccagaagaaccataacaaccaggcaactgcaccacatttagattcaaaagaaaaaataaagtatgagcaatactgtaagaccaatgcccaacaatgagatgaaaatgaacagggaaaattacgttttaatttgtctcgcaagttagctgaaaaataagtagtgaataagaatatacctaggatccaaaagaaactctttcggaatgtagttgatgcccaccctcaaatctgcagcagctccaagatcaataatcttgaatgtacgagaacctgctcagtgtaaataggtacatgagtttaagaaatctgaaaacaattgaactttactaacttttactgaccattataaaggacatttacactaccttctgaaaatatgatattttgaggcttaatatccctatgcacaatcccagttgaatggagaccatctagtgcaaataacagttgtcttataattgtttgaataattttgttttccctttccaatcctttaggcaaattttgaacttctccaagaatcatcgtctctacctaaaatttatactttaaaaaattaaaactcggtgtttagaaagttatttaaatacttatatagatcaatagttagttatccccaaccttacactataaaattggcagagaaaacccaaaaaagtatttgattcacagcagtaatagctaaattaaaggcttaagagaaaagcacaaacattataggggaactctttactctgcatcaagtctgcaagagtagactctccttcaaaacgccatataagccaatactcagatcctttcttggaagagctctgcagcagtttcaggacaacaattataataatgggattaagtgctcaagggtaaaaacaaagtgaccaagctggaaatgatttgtcatcttagttaaataatcaaagcttatctggtatggtagaagtaacacctcaaaaaagccgtatacaaaatcagcacagctgcttgcacaagctcttcgcacacgctcgttcatccaaatttctactgcaccatattcactagcctttttcaaaacaaggtctccctccttctaatgaccagtaaaaccacaaatgtaacaaaccaggtttaactatcatacaaacttagaacaattgcaagaaaagaaaaagaaagttaacactcactacttataagtatgaaaatttacattttgtctgtgatgtgtactttgctatattaaaacaagcaacaagttcataagcaaaacctaacaataattacgaggttatgagaaaattgaaattcaagatagataaattaacttctgaactaagaataaaggtcggtcataaatagatgaaaaataattcaaatatttgcaactcagacccagtaagtaacaacaacaaactgatgcacatatattcatagaggctttttatcgaatagtacatacgcataccttggaagacgaattcttagtcgatgaaactctgtagactgtcccaaaagctccctctcccaatttcttacccaaaataaaatcatcctatcacgccaaaaacaaaattcccaagtaaagaccaccatcaaaacagaggaaaaaaaaaatcaataaaaatcgacaattttacaccttccggtaagtgggtctgataagtctctcaataaatgcaagaaaaaacatgtcgaagaaacctggagccacaccgggagtagcccaaaggtaagagagagcactcaaagccaggaccgccccaggagccgtaagcgtcaaaccatcagatttgggaagagtgcttctatatatgatatctccacactccataaccgtacagggcaaccccactccgacgccaagaaatagctcccggaccgcatcgatcagctcaccgcctcctccgacggccgaagaaactcgaaatcttttgggatcagtaatcgaaatcctattgaaattgagagcaagcttcttgcccagaaatggagaattactaatattggggttggaaaaggaagatctgtggggatggaggttggagttggtgagaccgacagcaactccaccagccccggcagcaattgcggcggccatacccgttggtggtcggtgaatagataatagtgtaatggattagtatagtaatgtattggttgagttggattggaggatgttgttggaatttagaccactagtctttggaaatagtgacagttaattcaggtattttttgtggagggaaatcgctcaaccggattgatagtatactcatactttgctaatcaa

SEQ ID NO: 112931 - DNA, 5850 bp, Cannabis sativa
gacatggacacaaacaaattaggtactacatccactgatttgccagaagaacaccaacatgtattcttaacagaggaccaatgttttgatgaggagaacttggtacttactaaacgatgccattgtggattttcaattgaagtagaggaattataatatcagcaatgagagtatagattcggtgttgtagagtgtatcagaatcggttttgtatatgatagtaaggggagcacaaatcttgctgagatttgaaacaaagcaggcatggaaagcctcatggttgcggaaaaatctcacatgtactacaaaatataaggtttattatttctctctttatcccctttgttaaagttaattatgtttacactttatacgtcatcagttttgatttttatcccccaaaatacatcaattccgtacttttttattttattcaaacttttacattttaccgtacattaactttctaatttttttcactaatatcatttaaatattctcatcaaatatattttatcttttaaaatttgaaaaagaactgatggaaaaattatgcagcagcagctgatggagattttttttttttaattatatatattattatccaaatatttggagggagaaaagtttacaactacacttagtcataaaagatatgctagatgatcaaagttgttccaacagaaatagatcttagcttttctggaaagcttgaacctactaaaatacatgtcatagaaacacacaattctgatccatatttatttatgccccgcagatgtcattttaactaaccttcaaaagatgtagaactgaataataacaggaaagatgtagaactgaatgataaaaggaaatcgtataaacaaaatttgtcatatgcatatggtatgtgtagataaatcattcaccaaacacacgtaatgcacatgcttcttttcatctcacttcactttcgttggatgaagtgtttttgaaacttcgtggactttacagtaacatttttactctaaattcaaagaacaaactctgacagcaaataaacatggggccttcatttctttctttggcctgcattccgatcacccgtttaagcaagtaatattactcagaaaaatctctctacaccatttacatgtcaatccacaagcccttccggccaaattctttaaaacagacataatcagactgaactggttgcatctgcatttattgaaataataagttacacctcagctctagtagttctttatgtgttgagacaaaacaatatggtctgtccatgtatgttatccaaattttattaaattggattagaagagcatacgacggggtaacttatgataacataattacaattaaacaacgaaaagtagctcatattaagaaaagagaaagggagagagtgaaagtcttaccattatattacttcaatgcaacttcaccaagaccttcattcatcatcattagtattcctcatttgaacttcaatgttttttagatcccttaaatgctgtaaaatctcttggagaagatccatccctttgtctccctttttaatggaactcatgcaattcttgaggaactccttgtctgcttcaagagcttgtagcctctcatagacatgatctacctcctcttcaatgcctactttgttgctctccaatgcaaacatggaagctgaggagttttgcatatcaacaggttttgatgtgaggttttcttcagttatgaaatgttcattatactcatcgccttcacctgcagcatctagaagtggaaggagcttctttgccatggaatccatgtatttcttcctctcagtgtagtcgtaattcatttgattgccaacatctgataccccattctctcctgtacttctgctaaaatcatggttcccttcaaagtcttctatgtttgacctggatgaatctgcaatcagtttaagatcattggaaaatccctcgtcttctcctcccaattgtattatcttctcctccaacgcttttagctgatccagaatagacagcctctcctcctcaaattcagtcaaagagtcatcaagaatgcttatgtgcttcacacagtctagtgctatttcctctaaattttgtactgcatcagctggtgtgctgatgtcgttactgttttcttggtggtcacagaggctgctatcttcagctcttaattcgtggtttagatcaatagataggccatcactatcccatgtatggctgcaagaggcagaagaattcctacttcttacgcttccatctctaagccttctaatcatcctcattttctctttttcctcataatcctgtaccttctttcgatattcatctagttccttttcgagttcttgcttctccttctctcttttgaccatgaggtcattgagcagctgcaaggcttcttggtcatactcagattgttcctccatcatcctctgatactgcaacgcctccatctgcattgcagccttctcttcttgaagccttgttatcattgccatagtttgatttgcagctattgcagaagcacttctctcctcttctaattctgtatataaggcacttaatgcctttcgttctgatttcagtgctgttttaaggtgttccatgcttataactccatcaccaccttccacctcacttaaaacacttccatccaaggactccttcgacccagattctcttttttcagaaagtaacattttcttatccaagtgatatagactatcggtagaagttggcgtgtcaggaaatttctcttccttcactgcattaggctctgaaagaatgcatgagtgatctcttctctcttgattggtgtcaaagaagctcgttgtttcttgttcttttggtttcgcagtaagctccagatctaccaaaacaagttttgtattagaaatctcttttaagattcagcagattctgcattagtacaataatatgattcattgagaaattacagcatcaaaattgaggtttaccaaggtcggtctgagccacgaatgcatcgcaaggtttactagaattgtcaatatcattgtgttttgcaggagagtgttcttgatcagcaacacaatcagacaaatgagctcgctccacagttttcgattcaatcaactcatccaaagaatgttttgcattctcaacttctgtttcttacattagatcaaagagattagcatgagaaaaagccagccatgcctaattgtagaacaatgtagtacacaaataagaaaaaaataaaagcattttctttgtacctggactgatatttggtgttacaattgcttcttcgctcgcattgatttgtatagcatgtacttcttgagtacaaccaacttgttcactttccatgctgaccaatttgtgttttccatcagcagcagctctaactgaagattgatcagctacagtcatgaccatttctaggtttccagctcttttgctgtcactctcgttcgtcttgtttattgatccttcttgagagactttgagtcccgacaacatcatcgattcaaaacgtaatttctcatcctggcgattaccttcctctttcaagttttcttcttttaagctgctgcctcctcggtctgcttgagttgaagaatcgatcaactcaataggaaccaatctatgattgaggtcaaatattctaagactattggtggaggtgcattgaacatcttcaatcaaattattttcttcttctggacaatggacagtagtaaaatccgagctctgctgaacaatctcactgctgccattagaaccttgtcgggcaatgtcaaaggaaccacctttgctatcttccattgcttccttctcataacatataaacattgatgaggagcttagacaatcttcttccatggtatctctcgagttaaagctacaaacattagaaggaaaatgatgttcatctgtaacaagttctgcctcatcatgttcttctccattacttctcttatgtttttttagcttatcagaaagtattctccccagaaactcacctccattgttgttctcaccttcatcatcatccacagcttccataaccaaatctcctttctgaccatactccaaagatccccaagaaggcctaaacaataagtatgaatctaagttctgtctcctactcaagttctcattgcagcaacagcactttaaaacagtctcttcatcatcatcaccatcatcatcatcattttcaagcttgtcattacggctcggctgagaagccaagcaatcccagcacattttgcttgattctgccagttttcgatgatttgaacagaacccaagctgggatatctcagcagcatggttatcacagaggagatctgtaacatatgacctcttgtgctctcctggttccaatatgtgatcaactcttgaacaccataaacatggcttttgaaggccaaagtagctagcaaacttggtgatcatgtaactgaacaaagagttaaggaggaggagcagtatcaacacccattcaaggactgcataaaccagaagtagcactagtttgtgtgtgccgtttctgtgaagcatggttgcaaacctgttggcagccatggattttgcttctgtttatttgttctatctatctatctatctatctagagagagcagagtcagtggaaaagagagttttctctgttaaaagagaaaaatatgcctctccatatgttgtattgtttttttgctgcattaccactacaatagtattgctactattttatttagaaaaggtaataagatcttttgtttggtgacaacagtaaattacacctaaaagtaactatatgttcagatactttataataaattgttacattacataattaagaatgaatttgcatggattgatattaatttaaggaaaaagaaaagttcaaagaagctaaaggtaacggtaagaggcgcctatataaagatgtttcttccttctttttggaaggtggtggggtctacaagactacaacaactcaatagtttttattaatatgtttacaagttacaactttaattctgttaagatctgtcttttgctgggttcacctttcccttttctcgtcattttttcattttttatttgtaatttggaaaatgttttttgtccgaatatacaagggtacctatatatttagagcattttatttttttatttttttattgcagggtgttagttgcagcattagactagtaattaattaatatgatttccacgttgagttcactcaagacttcaatgaattattttggcacggccacatgatccgttgtgacaaaacaattaggcataagcaataatcacataaaaatgcaatgaatgggactaatttttcttaaagcaaaatgtggggactaaggaatgatgaaacatgggtgtcaaatagtggcaagcatgagggaaaggactcagttaaaagaaaaagtgacatgaaaaagtgagaggaaatggatcaacatgagactgtgatagtgagttgggagctttttattgtattttatcattattttttatttatttataataaatggaacaaagataatgatggttaagtaagtgtattgctcttttagacctctctccgctttcttttacttttggaagttgaataattgtatggaatattgtttcaaaagtccaactaaaagcttaccaaattaaagcttaattgaaaattagagaaataatagaagaaagaaaaacctaaatcttttaccggggtaaatttagagagagaaaataatggcacgtttactatagagtattcagaattgaaataaattaatggagaaatgtaacagaataaataaaaaataatcg

SEQ ID NO: 112932 - DNA, 1512 bp, Cannabis sativa
tatgtttaaggtatagtttagaattataatggacctaccatatttttgaaattaaattacaattaatgtacttggatgtaaattttcctaattaaaagatatagttttatataaaataaaaattattaaaatatcttcaaaaaaagttggagtgtaaataaaatttcccttttaaaaatttaaattagttatttatgtacaattttaaattataaattcaaataaataaataattcattataattattaaaaatttcacttttctttgagcaataatttttttcaaatatttttaaaatatacttttacttttattgttaagaaaataattcatccacgctaaaaattcatctatttccaccaaattcattgaattaatatatacacgaactttattttagcaggaggattgttttgaaattgattgtgtggttcgggacatgctatgggagggtgattgaagcttaattatacttcaaggtagggaggaatgaaaatataagaataggaatgggattggaaattggaataggaatagaatagaataaaatttaaaatgcataaaaaaaaattaataaaaaaatttattaaattttttcaaatcttgtattgcaatagtctttactcctatttcaaaatagaataatcattccaccaaagtaatagaaatgttattccatcaggatggtattccaatgattttaaatgtaaccaaataaaggaatagaataaaaatcgtttcctttccatttcattattcaatttcaacctaaagttgcaaaaattattggtattaaagaggccttgagttggaatattgctcgacactctagctgcaagtcactctcgaatttgatagtttgatctgtgtccaagctttacgaagcagtatttttatgccttcttcggtttggtttaataattcaagatgtttgtgctttgttttaatctcttaataatgttaatttacgttttgttaaataacgtgcaaacaaagtagtttattagtaaggagttcttgtttctcttcaagtcatatgattaagttacacgattgttcttcttaattaagtgcattccattattataattgattttactttttttataaaatttactagttttatttaaaaaaatatatgtatacttctacaaaattatttataatttatgggtcatttaattgaagatattgttagggtttttgtttttttcttttattataaacagcttaattagtttattattgttaattatgagcaattttttatgtaatagattatgtctgatttacgtggaatgacatttttctttttttaagaaaacttttttttttgtcaggtttataattattgttcactatgcaatcaattataataaatatgaactagtttattttatcctgggcttatcttacccaagttcatgatgggcaggggcggacccacattgtagcgagggggggcagtcgcccccctgaaaaaaaaatcgagaaaaaaatgtatatgtatt

SEQ ID NO: 112933 - DNA, 1997 bp, Cannabis sativa
caactttgtaagtaaaaatgtagacataggcgtgtagaggtatttaggtaataaattgtgcaaaatagatttttcatgtaaaaatttctaaaattataccctatatgtagattaatatatatatatatatatatatatctaaatgtttagcaatttatttaaatcagtacgtacgtatatataatagctagtcgtttgatcatcaaattcatccaatcagagaagccaaagaaattatgttttttaacattgatttatctaaaactaaaattaaattatagtgataatttgaatttaaataatatacttttataaaaaaaaaaatgataatgatttttcttttcttgtttttttttttcataaagtgatatttagcaacaaaaaaacttgtgttgtagtagtaactatactgatcaaaaataatcaggcagtgtttttttttttttttctaagttcaattacatatctaagctcttaattataagattttatattaatgaaacactactcgtaatctatttataattaatatgataaatgacacgtgcatctatatcttactaacgcattttgccttgccatcgaagttattatccattagccatagttgaactagagacatcgatgagcttatttaattaattaattaactaattaaagatacattaataaaaatttaggcaactaatattctttgtttgatacttatcgtacacatatggtatcatttctttttgctttgtattcattaaaaaaattgatttgaaaacacaaataattaatatagtttgagatagtataatttcttaagtactcatacgaaactgatgctttttttttttatgttattcttctattgtttaacattattatttctgttttttttttcaatacaatttatttgtgatcattttattctaattgccctctattaatttgttgttgttcttattattaatttgtatgggaatatatatagcatgcatcatccaaaaattttatttaactaagcaaactagctctagattaggtagctagctagccattttaattagatatttgattaattattgtaaattttttcaatttcaacttttgcattattcctttaattaggtagattatccccaaagtatttatattatatattatgcccgaactaattaaaggaatcgacgtgacgttattcacactattccatcctctaaattattattgtatagaatatgaacattgcaatactaagtgcctagcactatgagatcatgttctataataattggttagcattccttttaatttttattgaagtaaaataagtaagactctaattatatactaatagtaatattacacattataaaagttttaaatactatgggtgtggttttacatttctcaattagacatatttagtatatcgatgtatatataattttttgctaataaggacgtaattacattaggtaaattaattagactataattatatattatctggggtaaataatagtacatatcccgcaaagaaagaaacaaccaatgaaagaatctcaaaaggaaaaaaagaaagttaaaaaaggagccaaattaattaagaagaaccttttctcatcaaaataaagtcacttgatcttagccaaaaggctagaccctacacgcacactacaatatttaggcaacaaagcactaatgtcaataccagctatttatataatacatgaatataatattaatagtacgtaataatatatatttcaagattttatatatatatatatatatatattaattgcatatcatactcgtacgtatagtatatacatatataatattaatcgacggctagtatagccatgaggcatatataaatatataatgatcactacaaaaaactctcacttttagtcacaataaaatttgtgactaaaagaaaaaaaattgtgactaaaagaaaaaaaattgtgactaattataaatcatgagtcctatgttgt

SEQ ID NO: 112934 - DNA, 3680 bp, Cannabis sativa
  modified_base (3334)..(3337): a, c, t, g, unknown or other
tttttttttttttttttggtgtcgtatttagaagaaaaacaaaattgtaattgcattgtggtcttacaaaagaacaattactttatccgtttgtagcatccatttaaatgacaaaacgaaaatgtttcatatcagattctatgtctcaccttacgggtcaaaaccttgtgatattgaaaagatgtaacaaactgagcaacctgaaagaagactatgatatcactcttctgtatcatgtgatgttccttttcaatatcctcgcggattgactgcattaaagctgatcacatatggatgacaatgagattttagtttcagcatgttacaacagaaaaaaaatgtattaataataataaaaaaaatagtaaactatcaaaacattcattcaaaatcattcataccattgtatccccctgttaaaaactggtttacaaagtcatgaagtagttccaaaattttatcctttgatgacggtaatctaccatgattccatgcaattgttttagtaggaccccgatgaattttatgtggtttaatcatggcatcactagaaacagaagcaggtttcccattaaaaactgatttggagccatcctgccaaacaaaaccattagtactgctaaaacttcaattaaaatacctgtagaatgaaaactacataccatggaaagacgagtgaatgttccgataaaatgtgaatgtcggaccaagtttcgggctctagtaagttttcttttctcctcttccttctccataattgacttgagactgtctagagaagctttgttggcctcttcatcggtctatgtaaatgaaacttgttaacttcaaattacatagtggataaattttataatcaacaaattaaccaagaaaggtgattaagttagcaatgaaaactatgtcatgtctagtaacttctttaattttacaattacaccccaagaggactatgattttatttttaatatacctatctattaatgctcgttaacaacttgcagtgagcttggaaataatataatttgcagcaagaaatgatattattagtaccttagaaccttttagatgtgctttggaaaccaattctggatcttgacccaagaaaatgtaatgaaaaatctccaacaaaagcaagttatcttgacgaagataaccaccaaaatgctgggttattactataatcaagtccataacattctcgcggaacaaaagttctagaaatttatctcttaatgataggtagtgagtagcagttccgacaaccttctgctgcagtgaaatttcttgaatagccaaaagatttcggaataacgttagtatcagctgcaccaatttccagtcatcctctgtgaacgcatcactgagcaaaaaatgtaacacataaatgtaaatatcttttctgagttcttccaacaaccccaaaaggaaaaatattaatacatgaaatttaactcacccttccagatttaccaaaggattttccagaagtgatactataactgcgataatatcaccaaacataactgaagacttcaacccccacaaatactctatctgttgagctatatcatttgatgatggctcaattggcatagttaagaacaccaaaattttaactgaaatattgcaaaataaaaaagtattagattttagaaccagtgctgtttacaatttaaaaagaagaaaaaaaaaacatttctttttcaatttacctgcatttagaaccaaattacgatcgtcttgaaaattttcgattataggtatcaagtctttagatacaatattccatttacagacttgcttaaacacatctcgattctgtgggtcatcacgccttaaaaacctcatcaaatccttcaagttatctgctccaaaaaattaaccgagccatttccgcataaactaataccgcaaaaaaatagaccagtaatctctcaaaaatcaaagtgaaacaagcatatgtatacatatatatcgataaaatttatatagagaaagaggtaattaattacctaagcagtactccccctttgtgtaaccgatccgattaccatttcggtcctcttccaccgttccgagtccagcgcagatcaccgataacccttccatatccatacttactgacactttggagattgagaattagggattttcgccccaacaagagaaaaaatacttgtgtctagtctagggctttgtggcgccaatttagagctataatttcccgcgcgttttaagtttcagatgtatgttgcagcgtaaaatctactacggcagggagtaccgaaaactttcaggactaatgacgtggcacaatttcattgcccacatcctcagggcttgagcccatttagttttggacctccgatccaatactatcacaaatgtaaatcttttttttttttttgagaaaaaacacaaatgtaaatcttttaaaaatgggaatttaacacaattatacaacaatatgcacttaattttaaaaatatcttaaaaaaaatattataacataatgataaactttattatgtatatacctaatctttcatatttgtaactgacattctcatcaaatttatacttactcgtctcaatcacatcttgtggctttataaataggtctcgtaattaaaaatagtagaacaaagatcaaatttaattggtcaaaacaaaccaaatatctaaatcacaaggatgcttattaggaaacatgtcaagtgaataccataaagtataaaatgtattatcaagataagctattacctttaatttggtaggaacatgtaactcattcaattcatgattagcataaattgcactcaaaaaaaaaatatataaaattgaccaaatattaagcattttttattgaaaatatatgtaattattatttattttgttcatatactaaattgggtgaaatacatactaactagtagttattttagaaaaaattaaataccaacaagtagatagtatatagttgaatttatatacaaatataataattatataccaacaagtagttatacaattaaatttatatactaacactactataaaaatggtttttctcgatatttttaaacagtcgtttaaagtattcttatcggtttctataactgtcgcctatacgaccgtcgtaaaacgggcaaaataagcgacggtttaaaaccgtcgctaatgtggacttttcggcggtttaatatcgtcgcctatgacagggtataggggacggttttaaaccgtcgggaatactaaatttttcccgaggattttaaatagttacttaaacttttgtagcgacggtccccgaaaaaaatcgtttttaggnnnntcgcgaattcttatatttgtagtagtatagatacaaaaagtatataaaattttgggtgacatatataccaagaagtagttaagtaataatatttttgaatgcattatataaatttatttatgtactaaaaagtatacatatttagtataacaataaaaatatgatattgactcctagtatgcaatcataaattaaaatattccattatggtatatattattattcatcttggtattatataaaaatatgtttccatgtatagaaaagaacgctaaattttttctccaaagccatctttaatattattattagtattagcatttgataaaaaaaaaaaaaaaaa

SEQ ID NO: 112935 - DNA, 4106 bp, Cannabis sativa
tatattaaaatgtaataagaaacaatacttagacaaactttcttgggaatgaacaaaatatgtcgttgatgagagattgaaaagtagatggagggatttttgaggacttctcgtttctggacttaagcagagagtggaaatctcttgagtaaaaaactattcactgatggtgtaattttctttttcttaagtcttatcttgtaaaagggtagacagtttgtgttgttttatcttgtttaccacggttttcctccgccataagtgagggcaattacactatatcggggggaggtcggtctaagactagcgacctctttctcttttcaaaaaaaaaaagtagatggagggatcgtgaggacgaatggcatcactagaaagttgtactgcccatcatgtgttcgaaatatatttttgtgaacgtcttcaggtttctttcaaatctggtgatatcctgcctagaggtacaactttgtaaagatggaaacgccatgtggctcgtcaagtagttcgtttattactataatgggatagttgttttaaatagtggctccatatagagcatggaattccgccattggtggcattccagtgatcacctggtgtggttctgagagattggtgctagtttgttgctctgaggttgtcgctcgcccttggatttcgtccctttcccttgctttcttggatcgttcttgatttttcttgaatttccaagagattcttgaatttctaagagattcttgaattgttgttgcaaagtttcttgttgtgatttttgcaactgtacttgaagctgccgagccatctgcattgaatcctgaagggcatccttgatgctcgaaactaagaaaccatagaggaatcaccttttgttggctatttccaaggttccatttccgcagctcaccgtaccaaattgttagaaattccttagattagaaactttctatcttcaaattagacaccagatcaaatccttcaaagaattcctttattgataattgtggtaaaagttacagctagctttcgagaggctagtctctccaattacaaccttttgagagtgttgtactctccgctaagattcaaactcttctattcccaagctaaccctaaatgaaatcctcaccccaaatatttataggctttggatacaatgtgaaaagccaacccgccccctctaattaaaacagccactaaaatataacagaagcaaacagcattaataggccctaaaaacaattagtctctatcccaggttactttcgtggtttcctactgtaaacaaaatgctgggaagcttgtaacaagacacctcatagcctcctgagccttccttagaaggagctgctatagatccatcccatttttgctaggtgtaggaaaatttgtgttttcctaatgttaaaatagttccttgcaagctttgttgtttctcataatattaatgagtattatcctttttctcaaaagattaattagctgtgtgatttttgttgtttcttagttccaacggctctatgaaaagtgtctttttaatgtattaataccagtaaaatgagttgaatcatttatgtcttcggacaactataagaccaaaggcttgatgaactttttaaaatttttgttttgctcatatcaggctgccagtaatctgtattgcattaatttttagctgttgattgaaacctttgatttgagaaattattactattggacctactcttgttgcgtgtatagaagcaaacaaattatactgtgatgatttcaggattatgttgggaacaagcgactggagttatctggtcaacttatttccctactttttgaggtacacatattttcctatcttatgctgtacaatgtattataactaaatctttaacttgggttggaattcttttaatgttttaggatttgttcaagacaatgattagtgaggctaagaagtctgttgatactattttatcaaagaccagcaggtgtagtcgatttgacttttctcaggtaagttttgtaaattatgactcgaaaaatttggatagaaatgtgatgggaaatctttttatttattttttttttttgaaaaagagaaaagagccacttgccttagactgaccccatcccgttatatattgaaaacctcacttgtggtgggggaaaaccgtggttacaagaattttagcatgaagcacactaaaacaagcacaaatctttttatcactaatttttacttggcttttccaatgtttttaggaggtttgcggatattggaactaaaatgatttaacttataatttatttctttgtggatacagatgaaaaaacactaacaagagttccattagttagatggtctcaagtgaatggttgttatctaattcttttctagggtgcatgttcagtggacaactgcaaatgtaattgacctggctaaattttctttactagtggaagaagaaataatgattacactgggaaaactatattgtttggttctatcctttggcatttttaggctaggtttcatttcattctagtgtagcttttgtctaatttttcttttatcagattcatttttactatatgtgctcaatttttctgcaacctatgattaatttcaatacagaaaacagattgaaatatgaagttttgatggaatgtagatctgcaattttctttttcctttgttttatttgcaaattgtgtatcatttcttttttttcttatgctcttgcagtggatagtgagagatagtataacatttggacttgagaggagcctttctactgggaattgggatgttaagcgatttaagatgagccggaaaggcatgacacaggtgttatatgcgctttcaactaatttgtttttcagcatatatgcgctttcatccaattttttggtttatactatattctctttagtatttagtactttggttggtccctaaataatgagaaagatctcataattgtccctgaattagttaaatttgaagtttttccgtaaactttctggcacattttatctcgattagttgatagaattttgttgttgaggtaattggggtcttgcaaatctgaattctctgttttgaggcaggtcacatgtgtctgctaaagcatagttaatagttaagtggaattagtgtggaacttatcagcaagttactattgttgaccaccaaccatgtgtataaaactaataattcttttacaggtacttgctaggctatccttcataggtactctaggccacatgaccagaatcctcccccaatttgagaaatcaaggaaagtgagtggaccaagagctttgcaacctagccaggtaaagtccaatgtcctaagtttattaaagggaatcatattgtgatttgcatttagggtttgcatggcttatgtttgtccttttattctaattaatttgtcatgtttcttatcacacaccgaaaggaaaaaaaataaaagatttggttaaaaaggaaaaacagagaaaccgaaaaatggtgaatgatgttgatgtttgttattttaaaatggatagtggatttttaatcaaaaaaaatatatataataaaatggatagtggagttttacatgttcatcaaccgaaattcaatatgttttctgatctttctttgtttatgtgataagtggggcatgctttgcccatgtgatactccagaaggtgaagcttgtggacttgtgaaaaacttggcgctgatgacacatgtaacgactgatgaagaagaaggtccacttatatctctggtatgttttttatttatataatataaaatgttgatgaagttttatttcttttgtaaattagtgtattgagtttgatgggccaaaaccattcttccttattattatttatttttatatttcaattttcaaaagcgctaaagagtccttttaataattttgtcggtggatgaatgttatacacatcttaaagaatatttggaataaaattattcttttttattgatacattctgaaataatggtgcgtttactaaactgtaattggaatcagaataattaataggagaaatgcatcggtttaaaatagaaaataatcagaaacaatatttta

SEQ ID NO: 112936 - DNA, 2184 bp, Cannabis sativa
taccagccattactgttcctagtgaaagaaaaattcattttgatattgccttgtcttttcaaactttcaggacttctttttctgcaattttgttggtggaaacacatgcattatgcaccaaagcttttggtattttaccatattgtatatctatcagctacttttactattattctctgccccaacatatctacatttgtttcttcaaaaatagaaaaaagaagaaatatgcaatagctttttatgatagtgtccatgttcagatgtcattttctactattttgtttgtggaagcacatgcattatgcaccatgaatatattatgatattctactttgtactcatgcataagatataattatatatgagcatcaggtgtttagtatttaagctccatctagagagagtgtggtagacaaaagccaaccctgacctcttagacaagcttgcaatgggcactttgatagggcacatagtgcctggtttggcacttgcccttctcggcctatggcacagcatcaatactatcagaacgtactttctcaaaggacctcccaactttactgtaaggttttggtacccgttaaacagtccttcaaaatttaagcacctggagcttattttcatcttatcattctctgtatttgcaattattatggaaattctcgacttcccttttcttcacttggcctttaaactcaacaactacgagcatgcaactatgttcctccacctagctatattttcaggatttaccctttgtgctgagttaatgcagtcattgcacatcttatcaggagttgctggtgttcttatatcctcagtttttggccaagaacttttcctgcttcattttcactctgctaaccatgttgggattgaagggcattaccattggcttttgcaagtcatagtcttcatttccctcatggcagcacttgcagcaacttgttttccaactagtctccctgcaactattgttctctctaattctattgtatttcaaggttgttggtttatgaacatggggttgatgctatggcttccagagtttgttcctgctggttgtgctgtacatttggtcgaaggtagcagcggggatgacaggcttggagcagttgtctgtgcttctggggaggcagattcgagagcaagagcgctggccaacttgcaatttagttggatacttgctggaattttgatatttacagcatgcatatccctaaagttggctgcaaaatatagaccaagagacttccctttagagtatgagcagttgcagagtaaagggcctgatattcatattcccatgaacaggctcactcatgctggtccatgtatggtttcaatatcttcaaggacacttgaatcataaggattcaagtacatgtatggcagttactttaggatctataatttgtaatttgaaaaaaggcaaccaacttctataagcttatctatcgacttgaaaagacaactataatgctaaaatgtgtggaatcaatatatatgggaaaattataggtaagaccattacttttgcattcattcgtgagagtatttttttatgatagttcattggctgaattagtgggtggtataattttcctatatacattagaacatagtagcatagttaattttattatttttaatacaataaaatagttaatttttaaaaataaaaatacagtaaaaatggttgagacacaatcccactacttttttttttattattatttcttttttttttcttaaatcttttttattattatttgaaaggttaaattcttcctcttaagatactattttgatgttcaatatgtcctgttgctagtcttcttttgatttagagaatgttttcatttctttttttttgttcgtaaaataatacacattgtttttgttgctgtctgttaacccaaatttgtcgttgttatgccttccattgttaaaaccttgaaactattttttttcttcatttaattctgtttgtacttattttttttcctccaatattagtccattaatatattctaaaaccctttccacatgaatttcttttttcattttaatttttttttaatacaccctgaatatttagttaacttaaaaataaaggctaattaggatttttttttccctcgaactttgacatgtaccaaattatgccccttaaatttt

SEQ ID NO: 112937 - DNA, 7844 bp, Cannabis sativa
  modified_base (4626)..(4637): a, c, t, g, unknown or other
aacatagtctaatttaggcttaaatttcagctttattttcgtgcacaattttctctattttataaatcatctttttgtgagatttgaccaatttataaatttcaagtgtcgagacctgaaattaacaaaaataaatgtaattctattctaaaaagtggtaataaagaagaaaattaactctaaaaataacataagtaataagctaaaaatatcctaacacctattcctacagttgtttttcaaaaaaaaaaaaatttactgacgacattgtcgtcattgaaagtggcatgtcactattgatgtttaattttacaaaaaaatagaaaagtgtttatcggtgacaatccttaaatgtcgtcactgatactctcacctttagtgaggactttaggccatcactgataatgttgtcattaaaggctattatttttgtagtggtacccaattctatatttgttgttcccaaaaatattacatgttatattttattggtccaaatcaaaatctatttgttttctttcttacttactttcttcttcttcttcttcttcttcttcttcttctcgttgcatccccaacccaacctgcccaacctcgatcttctcttctaaaactcttcaattcccattagcaaaaggggtggctccaaaatagaataaagaatgtcgagtgaacttgtcaaaccaacgcttagccactcttgttaaggaggttgggaataacatacatcacaagttgaatccaatattattggctcgcatcattgtattgaaattacttaaatgtcccaccggatcagtggttccatcgtatgaaaggacgtggaggttcttaaattcttttgagaattgtgaattacttatatcaagatgcaacgatttaatttctttgtctgaatcatatctaggcaattttccttgctttccatcttgatatctccagaattattcttctaattgtatgacccttaattggatggggtcataagatgtttgattgtctaattattcacgcaaatatagtgtatttctattcaatttcttgcaaaggtctagagcgatacaattcaagtgttcatgcaaattgtcttcgatttagatattctcgcagatcatgttgatcatatttttcacgatgttgctctcgccttgtatcataattgcttaccggtctcgtaggcgagacactttcagattggtaactttgcaagttactagactgatctgaacgtcttgattattatgatgagtgttacgcctcacatgttggaaaactccccatgtttgggatcgtgaggatcaaccttgtgtttggcttatccttgattcactcacaaacagtgtctgattcatttctttgagaatgcacttcttgccttgcctggcgtcgttcaaatagataagacatgtagcttctgcctgccctttgtggaccttgcggtggtcgatgatgattttgttttggtggagacctcgtatttctgtgagaaggttctgtcgcttcaggttgcatttgtctttcatttgattttttaggattttaagggatctccctgtcaacaagaattttcctagtattccctggttgttaatcatggagattttcttgattgttttcttcaacaggggcatctacattcctcctcgtccttgacccatgaggcctccctcgtggacgccttataggtggatcagtttgtgttgggggtgcatcatctcaagtccccttgacaactgccgcctcgcattctagttttgcatttctttgatttgacttggctaatttttgtggaagttttcaatttttcgattctactagaggaacataacaagtggggtcataggctccacgatttcttctttgaattcagtccttataaagtctcattctataggacctcttccaacactctaactttttgggggatgagtatactctactctaatttgaataataaatactaacagataccaactactcaagcccaaaaaagggtcggtgagccctaatcagaatatgagttataccaatctcttgggaaaaagagagaaaaccttagcgctcacaaactccccattttattcactttgttgatttttcttttggggagaaatatagaattattatgtttgtataattagggttacattttttttttgtaagggtataattagggttacaattgaactggtgaatgtggactgatttaagagatacttttttttttttaattattattttggacaaaaaaaaaaagcaaataaccgtactgggccattagttagtgtacgtacttattttatttatttgcttatcattttgacaagactaactccctcacatttaactttaggtataaatatttgtccgaatggggagtgttctctcacgaaacaaataatattatatattattcttctctctcccaaacacacattattatttatttctcccttaaagctatagccgagtcaactatgtgatcatttggttgactccataacttgcccatgtagcaatctatgtcacccatcgaaaatcccaaaccatgcctttgcctttgcctttggaccatcccacataattgattggtttttttttttttttaatatatattataataacaatatggactacgtaacatgtccttttttttttgtggggggttttacaattccagatgaatacagaattgtggcatgacttttcctatcttactccgctttatatggctatatgttctttattttcaaagtccacgttcctcctccaaataatctactctactattttctctcaaattaaaattgaaataaaggtttctttgctccttcacaaattaaagcaataataataatgaaataaatataaatcatatatataaagctagataattttgagtgcttcacatgcacatatacatatatcttaattaataaattgaaattcatttggtggaggacaaataaagctaagctaatgtatgcctgtcttaagcatttggctataaagtactgaggtggagtctccgccggtcaccaccgtctccaccgtccctagtctttctccacactttcctcttaattaatttatgtatattataatctacttttacactacacgaactcatcaaaaacttgataagcaagaatgagttgtattattagtaagagaagaggatttgttgtattaaactattattttcttttgtacatttctatgtcacttttggctggagactttgtaaaagcaacttggttttggtttttcatagtttattcgtaaatgaaatatatggttgaaaaatcaaggcctatgaaattaatactttatcaagatggtatattatatttgtaatacggctattattattaatctttgaccaattcaagaaactgggaaaaataacttttaaaaccaatgataataagattaaaatgtattttgttgcacagtgcaatttttttatatacgcggtataagtatatgtaattacttggattttatttttaacactattaactatttaatttttttaaaacttttttacaagtaatcttaaaaaattacaaacacacgtaattatgaaaaaaaaaattaattaaaaagctatattatatggtgaaatagataaaaagttacatcaaaataaaactatgtattataaatttttctaaatctatataatttggagacataggtacaaataaagctatgaaatccttaactctcctttaattcccatatttatatgtatattttgcgaatctactatataggcttagactttccactctataccaatttagtttagcttgcataccctattatagggaccttgccccctatccaaagagctaggacctacctttcaacattacccttcttaattctctactattttcatttacatatttatttatttattttttgatggaaccatttacatatttatttaagagcattcttttgtttttgttttttttttttttgaaagggaccttttctcaccacacgcgtttatcaattttccttgccccaacaaaggtatacactaatacactatttacctatacactacaccaccaaccctttattaacaaagtcaataccttaacgagtaaagaaaaaaaacttcacttttttttttttttttttatttctcttttgtaatattatttaattttatagttttgcatttggttgaaattggataaggtttttccttttcccttctttttaaagttactttaaataaatattacttcaagactcaagagggacacaacacaacacaatctagttgtaaatcttgcttgtaactctctattcaaattaagattgtaagttgttgtaactttgtaatgtcgttttttcgatttgagatgagaacaattgaattgtttataatttgctactactctctttcacctcataataaactagataattatgagtgaaagaaacaatcattatttccaaatacggattaggaataggccaaatctcagctgttgtgttacttattgggatacgggtctaatgatttcgccacctacccatttgacgaaagggaacatcctaaaccaaagaagaagggaatgatttctctctctctctctctcnnnnnnnnnnnntctctctctctctctctatgtatatatatcttaaaaataaatgtgtaattttacttggtacacattaatagaatagaatagaatggtcccggactaaaatttaaaaagaaaaaaatagaaaaaggagagagtaattataggagcagtaatataagttggtcccaaaagcagttggacagcattggggtgtcatcttcacttaacagtaatgggctggacagcatgtgcaaggggaggaaacacagtacgttagtcggccagattaggctgtacttccctggcattgactttcctgggcctattttgtcatctttataggcccatttatcatagcccaacacttaattggctaaaccaaacttgttcaccttcaacaatactctctctactttattacgactcttaacttttctttacataaaaaccaaataaagggaaaaggtcacatttaacttccactccaccacagttaatatagtagttaataatatcattactataagaaaaaggaaagaccatagtaatttacaattcataactccccgtcggcattgtaattgtaaatatataataataatatagaattaattaaatgaatccttttttcacttggtctccaccattctttttagtttgaaaaacatgcccttttgtcgtgctttttctctcaccgttttgaaaaaaccaacccctttacaaatttataattaatagtctttgataaataaaaaccagtcttataatttgattatcaagtcaacttatactattctctctctcttgattctcacatacactttcgttaaaaacactctaacgtacagtaacaatgtatcatcaatcaattttcatatatgtatatttgttttttcaaggaatcattttggagctgcatttgaacttcaaatgaaaattgtagcctagtactactagtctcgtgctctttgcacgtcctaagaaaatattgtatcattacttctaataattattggaaaaatgttgacaaaataattgttgttacattgctaaaataattgttgatgcattctaataagtcaaaagttgtgttaaaatcgacacgtaaaaattgtgttaaattcaacagacacttatatatacttaaatttattttttagatattataatttaaatttaaatttacatatttaaaaaaaaaaatttattgttattttttctaaaaactcatcgatatatttttaaaaattacttttcgattgtttttttttacatattaataaaaaaaatttctattattatttttttaaacggcacatatttaaaaatatgttttcttattaatgttttttttaaaacaataaaataaagaaagcctttatgatatgtgacatccttacttattgtagttaccatttttttttttatcttttctaaaaaatacaattaaaaatataaagaaataaaataaaaattaaaaatataactaaatatacatacattacacacataatattatcaagtttatataacactaaatattttgcttgcattttttttaattttatattattttcattatttaataattaaatttagttatggtattaaataacagattttttatagcaataaaattaataacaatttatatatattttatgtttttaaataaatattaaatttgtattaatttttacatttgtgcattagtatacagtactaaaacttgatataaatatatcataattttttttgtgtgtgtttttacatatctcaatggagtattgtgtagtgttagggaaattttatgtttaaaactgtgttttaagtggtgagagtgagtgaatagtttgtttttgggtaaagtagtagtaagagagtgaatagtgtttacttttctaaagtgaaaagtttattttgtaaatagtgtatagtatcattggtcggcggtacaaacggtgatcaaactcgcgtgtttaatttactttgttttgtttctaatcactataatatttgtttattaccttttacaattcataggacttttgattggtgacatcctctagtgctctattatattagtaaataaacaaaatcaaccaatcaaattgctgtaaatcataagtcataataaaatataataattttccctcaatttaatgctgcgtttctattattattatttttaacaatcaatatttattattattattattatttcaaaagaggctgtgtttatattgagtagctcatagctcatgaacattttatttgagtagttaccctttattcatcaacttcatgttttcactatgttctctcacattaaaggtagccttatttttttggttctgttttcttactcaaaagaaggaattggttcaaattcaacaatggggtatgaggaattcggggaatgtagtattagttacatttttctttttaaaagggatggagtttaaaataaaattcatgaaaaaaagctattacttagtagttaggacttaatgccaccacttactctacttttcctataatctagttaagagtgtaaacacatgaattattaccctggactaggaggacatgattagaaatttgatggtaaaaagaagaaacaaaatgatttgtgttgttgattattggttcattatacacactttacttttacaccaatggtaaatcttcataacaaacccaccacacatacatgatgtcaataaaattaaagaccaaagcaagaatatttgtcaaaaggacaagaaaatgtcttaactttgtggaaaagcagattataattatgtcaaccaaagaagttacaataggttttggcttgaattattgcataataagaaaaaagagtaagagaaagtaaaaaacacacaatcaatcaattcaaaccaatgtttagcaagagagcatttatttaataaaaaatatattaattccaattaattaaaaacacacacaaagaacatgtaactctttttttcccatccacaatttgttttgttcttttttttttttttcaactggatccttaaattgaaaaaaatttcttccccactttctcccattttcttcatttcctatagaaaataagcataaaaaaaaactctctctcttccacacaacaacatcgctcaaaccccaacccaaaacttccccccgaataacaccagcagcatagggcttcgttcctcgccaaaccctctctctctctctctc

SEQ ID NO: 112938 - DNA, 863 bp, Cannabis sativa
gattgaacctaatcatatcaggatttagatcatttgataatttgcattccaactatagataagcatatatagttcggaacgtgctttcaaacaatataaagaactacccaaacagagtcccaagtcaaaagttatggtgaaaacaaatattaatacatctgccctgaaaacccctagcgggccgcggcacacaaaggccatgctgtgacttctgggtaacaacctagaaaacccaactagcgggccgcaacatgcaaaacccatgccgcggctcctaggtaaaattccagaaaaaccaattttcaacctaatcaaatttgaccacaaattcatggcaaagcacaacaaagcatgcatataatcaaattcactatttcacaaaataaaacaaacatcaacaattaatcttaaactcaaaactaagctccacattaaattcaagaacaagatattcaaggttataacatacacaacaaattcatacctaaatcaaagcttcaaaactcaagaatcaaaggccccaatgtgaacccaaaatttaagaatattaacccagaaattaagcttcgatttcaaccctaaaatctcactaaaacaagctagatgcaccaagcatgatctcaacaacaaaagtacactaaacacaccacaaactatcaaattctcaacaacatgcaccaatggttcaaaatcatcataaacaacatcaaacaccacttcaaagaacattcaataatcagaatttatacttaaataaagggaaatgagaggtgttgacctctcttttagccaatgatagtgagtctaattttataagtgacaagtagtttaatacgattgaaatattgtaaagcaaataaaga

SEQ ID NO: 112939 - DNA, 2918 bp, Cannabis sativa
ttgtgctattttaatcacatggatgaattttgatgaactattttggtccttttatttacatgtttttgttctgcgagttgttttacatgcacttagcctgcaggttttcagacgggtgtttgggtggatttatattgtattttgtgtatcaggaaggcttctgttttatttacacctatggaaaatgagtttttattgaggggcaggtagtaacattattgattaatactcatttgctctaaatcatgtgaaacttttactttgacaccaaccaatgataaattttgtattttactgactccaaaatgaataatgaacgagagagagagaaagtatactggttgtatgtgctacatgcatctgagatatgtgtaggctgttaaattttaaattgacaccaagtctaaatgctgtgtgccctattttttttaactcctactcaaccaactatgtgggtggagtgtataatttctatcttaatctcctgataatgtttccctgcaccactaaatctgaccatggcattggttctggatatgagtgagtctatacactagtgatgtgggagtatgtgtcgtacatttctttaatggttttggcttgtatttcaggggtatttactgagcttatccagcagatgcaagttaaaggcgtgcaggtaagttttaatccaataatatgacatttaaatgtaaaagtactaagcgctaatgctagcttgcagttcatttacttcttagtttttattatactccccttataaatgctagttttgtggtagtttctttgaatctttctagaggtcttgctttccattatgattgtgtttatgctggctatttcattttgttaagagttaccagttggcgtataccaataccattgtgatcattttgtatgtttttggcaggttgaggagttgtattcattggacattgattctctgaacaacctaaagtgagtttgtagtgtgtttaaaaaagtaaaatccaattagaaccagtcatggtggtctatagttcacacttaatttctaacgaaactactaatgtacttcttcctcctttacagaccagtatatggtttgatattcctattcaaatggtgtccaggcgaaaaggatgaacgccctgtaattaaagatcccagtcctaacttgttctttgctagccaggttagtttcataaaactttatctgctggtctcgatgtccattttgtaatctttacctaatttctctctctatcttgttttaggttattaataatgcttgtgcaactcaagcaatcttgtccatcttgatgaactgtccagatattgacattggacctgaactaaccaaactgaaagatttttcaaagaattttccgcccgaactcaaaggtttggcaataaataacagtgaacctatacgaactgcccacaatagttttgcaaggcccgagccttttgttcccgaggagcagaaggctgctggcaaagatgatgacgtataccatttcatcagttatctgcctgttgatggtgtgctatatgagcttgatggtttaaaggagggacccattagtcttggacaatgccctgttgggcaaggtgaccaagaatggcttcagatggtgcaaccagtaatccaggaacgcattgagaagtacgccaaaagtgaaataagattcaacctcatggcagttatcaagaacaggaaagagatatacacagctgaactcaaggagctccagaaaaagagggagcgaatcttgctacagatagctgccttgcaatcagacagaccagtcgacagtagtaaatttgaagccctaaacaaatctctttcagaagtgaattccggtattgagggtgccactgagaagattttgatagaggaggaaaaattcaagaaatggagaactgaaaacatacgtaggaaacacaattacataccctttttgtttaactttctcaagcttcttgctgaaaagaaacaattgaagccccttattgagcaagcaaaacagaagaaaggaggatctcggtgaatgcggtgttatggctaactgttcaaaaggggattttggtttccttctcagttaatgtaccgaatttaaatgagttttaagataatgacttaattttattccatcaaatagtttgattgttgagaacatcttgggttgtttttaccttaaaatatcactttcccccaggttttggatgatcctactactattgctctgtcttaggtaactcctctcaacatggaatagagacatgctttgaattcgttttctttgtatgtgaactaaattacttggcttcttcatattaaatagaagatattagctgaaagaggtctggtaaaattttgatgtggtatttggacattgagagaggggaattcgaattcgctctcttgtttttcttctcttttaaaaaatactttcttaatattttaaaccaatatttctttctttgttatattatttgctccaattgtttttagatatgattatccctcaagtattaacaacaataatattcaacttggtatgttttaaatcattgaagtgaggtgtaagtatttaagcaaaatattaggagtaaaatactaatagtgtaaatcctctctaaatctaatattgataaccttgcatcttcatgatcttgtgtggatatatattaatttatattttttagataaattttttgtatattattttggtaataattaaataagaatatttgtgttattataaataatgtttttttcttcttctttttaaatgtgtagataatttaggggtgttcattggatcacaatcaatagatttggattcaaccgatccaatctaattatttattggatattgaattttatcatctgattcaatccaatcgaattaagtaatccgatccgatccaat

SEQ ID NO: 112940 - DNA, 2642 bp, Cannabis sativa
  modified_base (33)..(38): a, c, t, g, unknown or other
agtatacgtgcctcgcacgtaattttttactannnnnnatatatatatatattaattatagtactctgcttgtaatataataaaggaaatttccatccatatatgtgagggtatatatagacaagaaaactatactgtagctatatatatattaggtataggtgtggaataatacgtgacacaagcacataactctactaataagtaatgtttggttttgagcgattcctcttcgcgcgagactaagaaaaccaccgaacgcctcgaccgttggtgatgtctcccaccgactgagctccgtcgctcaatccgcgtattcacgagccccagaaattcatagagaactcgagataattggatggcgttgtcgagatttttcaatcgattttagcagaaactctcgcttaattagtaaaggctttattattattattattattattattatttacaatattattattaattaactaaaatgtcttcataaatttattttgagtaatggtactatataattatttttctattttcataaagtttcttaaattaaatatttttataaaataaattattatttatatatacattactatgactactttttaaaattcttattatttcaatagtataagaaatattgtattaatttcttattcattttggtttactgataatgttaatttaaatatcgtgtctatttaatgagtcatattttgaaccgttttatttttcttataatattacttattaattttttatttttttaaaactatttttttcaccatattttattttattttgtacatagaggagcgtgatatagtattctcatattttttaatttgttagtatatttttattgtgttatttattttttaagtgtatatatatttggagacattaaaaattattagaggatcaatgaatataataaataaatttttcttattattttatttgttatatatatattgaaatattggtttttaaatttagtttattttttataagttaaatacttacctcatttatcttttttggttgtttatctatacttcaaagcacgtaaattttatttggagtctgattatttagctttggtttttacttttcaaaagcgttctttcttttgtaatgagctaggtttttcttagatttttttgctagttaatttgctttttaattttcctaggtatccatagttcatgtcggtttctcataaattagttgtgcatgcacttagggtggatggtgtagcttagattgaggattatctatcttttcttattaatatgtattaaattttggttgttgtttataagagtttaatttaaaaaaaaaaaaatcaatgtctagaagaaaaataaaataatagtaaacaaaaatttatgaaaaaaaaagaataacaacacaaaaaagattaaaatcatatgcatgtttgtacagtcttctacataattatatatttactaataaaaaaataagaagaaaaattaaaaaaataagaaaaaaaaaattgaaaaaaaaaatatagaaaaaaatggtaaaaaaattgtagaatatagacttaaacaaaaaaaaaataaaagagaaaatgaagtaaagaaatgagatattttttgagaaaaaggaaaaaatgtgaggtttaataaaaacacaaaaacattaataattggtacactcaaaacaaaactcacaactgacaaaaaaaatacaaattactaatagaatcttatttagtttgagaaaatacgaaagagcaaggactatagaaaaacctcacctaagtcatgcgcaaaaggtctgaaatttttagaattgtaaggaaaattttctcaccgtataacgtagtggtatagtcgctcttgtcatgtgcaagtggtggtgctcactgatcggtacgtgcaggcaaaattgtctttttgtacggtagagataccgtgtcccttgtttggaaaggttttcctttttgaatcaaattagggttttggtttcttttatgccctctattttcttatgcaaagttgaatctgctctgattccccctattgcttcagcttcgtgtgccttttttgcaaaatttctttgctcacagtcttttgataaatgctccccctcttgctggtctatttattttattatgagtttgtttgctgttactgaatcaagagaaaattgactaaaacaagaaggaagactgctaactgtagtaaatctttattagagattatccacacttgacattagtggaccttattccatcacgaatgcagaaacaagtatattataactcttacagatgatttttctcaagatggctttacctacttgatcaaagaaaaatctgacgttcttgaaaagtcaaaatcttttaaaatgttcttgagaaataattaggaagagttatcaaagttgttttttaagatcgtggaggagaatattatggtcgttattcagaatcaggactacacatgaggccttttgctgaatattttcaagaaaatggtgtactttctcaatacactatgtcaggttcacctgagccatatgacgttgctaaaaggagaaatctcactctcacggatatggttaaaagcatgatgagtagatcaaatcttctagagtttttatggggtgaagca

SEQ ID NO: 112941 - DNA, 1817 bp, Cannabis sativa
ccatggatttgtagctctaaattttaatggacaaaatgtcatggaaaagagaaaaaaaaagatatagaataaatgcttgtaatttttttaaaaaataatattaaaaaaactgatataaagaattacacttattatatttatatttatatataaagataaaaaaattagtatgagaaaaaaataaaagagagaagagaaaaaaatgaaaaagagatgaaaataaaagtcagtgttatgtgtttggggtgtgtcaaagtggttcacccaataatagttaacaaagcaccaatccaagtgttctttaatcgtatccacacctaaccaatttttaatccatgtgaaagggtccccttcgcatggggtttcatgaagcgagcaatgatctagagcctttcaaaagccttccatttgttgctcatttctaaggcagccacctgatttgttattgttagaaaggatttcattaaaatctccaattgctagcaatggttgaaggggagaaacatcagcaaaccattttaaaagtgtccaacaatcagctctgttttgaccatttggggcaccatataagtctgtaaaatgaaagctagcttcaccatctgccatcacaacaataaaaaaagttatgtccatagttaagaagagtaacatcaacactatcatgccagagaagcattatgccaccgcttgagaccaatttggggtgattcaagaccattattgagattaagggactgtcaaaaataggaaattgagttaacaggaagtttcgttttcataagaaacaaaacatgggttgattattatttgacaagcaattgaagatgtctaaatcactcgggttccccaaaccccgtgcattctaactcaagatttttatgatgagtcgtgggattgcaaagcaatcttcgtggagttttcaacaaagccatctcaatccatgtcctcataggaaacaaaatgacttaaaccttctccttgtgacatgggagaagcatcaatggtggagtgttgattacgacaccgtttaaggaatcgtctcattgttagagacttgttgtctctttggtaagttggagggtgggacattttccttatccattgatagtgtaaaaacttgtgtagttgtgatcaaaggggtaattgttagtaaggtgtcttggtggaaatattgtttgagatatttattgctgtcggggttggaggataggtggctatagggaaaataggacttgttgctgtcccaatttctggtgtgaaaatgttagaaaggttagtggttggtgattggctattgtcgtggccaatggttctgttctagtgtaaagttgtagtgcaatggcttgttaaagaggagggaagagtggaaggcttgttttgtgaaattgttgggtgagaattggtgtccaaagtgtgtattgcagatcgtggaggtgcaatttgagaagggggaaccagggtcaaagatggctctcccctaagcaagactttaggctgtggttgggcagcagtgtgtaaacggggtatagttgaattaagagtggttcgtgcaaggcgtatcaatagaggctaagcatttcttttagtaaaactagttatatacttgtcgtatcccgtagtaggtagtttggcttctttcatccaaggtctatataaaaagtcaagtgtcattacccatatccatgtgctccatgaatctaatacatttagggtgcgtttggaagtaactgtgtaattactaggtagagtaattactagggtggtaattacacagtgtagtaattacactatattttaaaatgcaaggtgtgtttgga

SEQ ID NO: 112942 - DNA, 4008 bp, Cannabis sativa
aaaaatagttaaattcccctcttaaattgttcttgttaatgtgcatttatcctcgattgttttctcataaatgaagactaaagagtagaatgtcgtggcttggctcattcattagaaaatttaaattacagtgtagctcttattggtatttggtgacaggaagatccctagttgcgtttccataacaaagtacacgtctttacttcgtaaaaaataatgataatcatatgtggggaagaaatctttactgattaatggataatcattttgaacatataaatgaatcccaaatcaattgttgcattgaaatagctatgcgaagtgtgattttaaaaaatacatttaataatgtacaaacaaaattcatttcagcatacaaaatgcaggtggtcttaaagttatgatttttgctcctaatcctaatcaggttactcttcctcaaaaagaccaaacaaacctttcatgacatcttaaagtaatgtactcatggatattaacttgaataaaacctcgcaaatgtggaggagaatcaagagttgaaaaccaacattctagaccccaaaaaaagaaagaaaaaaaaattaatttcacaaggctgtgaatcaatattaattaacaacatattactactgtatattaccttcttccaaaaattattacaacgagattaggaaatgtacttctaattccactctgtgcaagttgcaatactgcaaatgctttaaaagatggcaccattctgaaatgtgttgttggttttcatctaaatgcgctacggcgaaagatcgactttaagaagagactaaaaagatgaaaccagaaaacttctgtaccatcctagctgtgtcaccgccattcgatcctattagtctccttgtaagcagtaaagctggcgaatatttccagatgctgaaatatcaagaaaattagttaaatttcctcagcttggtctgaaaatatcaacaatatatataaatatacatatatatatatataataagttaattgatttgtctaaagtatggagattagccacaaaccacaagctctaaatcctaatcagaagataacatctactacaaaataaaaatacatagtcaagagtgaacagaccagtgtttacttctatctttcacttataagatctcctatctacatgaaacaataacaatacaaggacgatcatggtaactagtcattaccgtataaccagtctttaaaatacacatggagtgcacatgacaattcacgtttccggttttcttcaagaggtgcttctctcagttgttgctttatctctgctaaattctttagctgcaagtgcatgaagaatttacacttaaaatacaattttcaagaaataggttaaactgtgaggagagttgttgccacaatgttaatatgcaacctaattccaacaaattataatccaacaaggttcagtatgttgagctggcatacatttctactctgagatgacaaataaggatctggtaaaggaaatgggttgtctttcgtggaacccggggattcaccaccaaaccagcgcggaatctgcttatcaaagaacaagggtatattatgatataggatttcaatttaaataaccaaaaatctcagcagccagaactattccctcaccacaacccaaaagaaaatatagtttattagtttagaagatattttactctttcaacctttaccaaaaacaaacacattacacactgctgaaaactaatagtataccaaaaaatttgtgaactgatcagggtctatgcgtgttgctgactcagcctgagcatcagaaacacctgctggatgagataatgaatcatgtggatcaaccacaccaagggccaaaggctcgtcccatcgattaatagtagcctcaataccaacttgagacatgtgctcctccaattgagagtaaaatgtattgtatggggctacctgataaaaatcaagagttaaaacgaatgatgatacccaatttgatcacaacaaaacaaatatactgctaaataagatgccaacacttcatgatagcttttgaagaataaaatcatatttccatttcaacttcataaggagttgaatttaacacagatttcataattcaatgaacctatcattgagaatgaaaacctaatttaatgatatactgcaaaataagatgccaacatttaatgatagctttcaaagaataaaattctatttgagttgaatttaggacacattacatgatacaatgtaaccaaacattgagaatgaaaacctaatttctttaactcaaccaaaaacaaaagtccactggtgcaaggaaagaaacaagagagccaaggcttattgaatggtacacccaaacttttaaaagttaattacaaataacattgtggttcaggggctctgcagttatacattcgaaaattaaaaaaaaaaatagtaattttgaaatattagaaacttcagacattaactagttatataaccaatagccaagaacagtaacactgacctgtaacttatggttatcaccaaccataagtggtcgctggttcaccccaagaaagaatacacactcacgacagttagcaatgcagacccgtttagaagctgttatcacatgaactctctcacagtgctcaactcttacagcctgtagaacaccaagggaaccatccaatcaaaatatattttggtaacttcaaattcatctaagtaaaataaattaaagagtggtcagttgagagaatcatgaacagcatatcagtgacacttcccaaaattgaaaagggctcacgagaatgcactggtttctcaatctatccatgcacgactttaataatcattcatgaaagactaaagaaagtatatattttaccttcccaacagctccaataactatagtagcatcagagcaaccatagatggtggcatatctcaaaggtgctaagacataaatgacagaatcgtgacaatttaatacctgcaagggtatgtaacatatattagacaaagctaaaagagaatgattttacatttatatacatagggcacaacatttttgaccaatgtcataagaagatgcacttacacttgttaaatatcatttgaaagaaaaagaaagaaaaaaaaaaactaattaaataagctcacatggaagcataaccttgatttgtgtgttctatcactgttaagagaaattaaatttttcaatcgtgcgagggcaaaagcacaaattcaacggcttagaaagggtttttatgtcgttttactttgttttgcatttaagtcccttaagaaaatttggcactcaagtccttgagttttagaatcagtagcaattaaggcatttcaattagtttttcacaaaaaatttagttattgaacattgttttaaaaatcattcgaggcgtacgcctcaaggcaaggcagtgaaaaaatgaattttgcagttttttcagctgctggacttgagacgtatgcctcaccctgatgaggcggtcttgatgcgtacgcctctgaggcgattcgtgttgaggcgtatgaggcgcacacctcaccaattgagtttaattagtgtgcttttagggtttgttttgagctgacttgtttaatagctattgatttgtaattgactttatgggcgttagtttgggccttttctaacataattttaatagagtagatagatctaaaaaataaaccctaagaagctctcttcttctccgactcctttttcccccaatctcacgcagccctctctctcctccctcctcctctctctcattcaaaagaagataatgatgatcatgaaaacaatgatgatcattatgacttatttgacatttgagttggaatgaggaatatgtttcgatatatgtttagaacttttactattttcataagcaatctaacctttttatgaataaaaattatcatttgaagacctaattagtacttttcataaattttatgactttattatggattatgtgttgtttgtta

SEQ ID NO: 112943 - DNA, 2268 bp, Cannabis sativa
tttaaaaaaaaaaactatgaattgacttattttggtaaattgttggattaaaattgatttgactgatgatgatgaatagaccaaaaatgataatgacatagcaatttgcgtattcaatccgaccatgacgacttttaacgaaggagtcgcatagttagaatgggtatacccgtgcgtatgtgataccaatccgtccctccagtccagtccagaaaggcagaatccaaatatctcagattcgcacttgtgctgtgccaaagtgccattaggccactcccattaccatacacacacacacacacacagggtggtccaattcttgaattaaacttattaaatctcacaacagccaattccaattccaaatccaatttcaattctttaataacacacactgattaaaaccccaggtacgtaaaaccatctcaatttttcacgttcaatttcgatattcaaacttgttctgaatctttaaacatttgtgtttggaacttttcttttctttttcgaatattctaagcgtgaaaattctccatatcattgcagctatttttttttttgttaatattcttattctaatattaataataagaagatggagaaatccaatacttgttcaagaaagcatcgaccattgaacctgttgagactagtaaggggtttgatatgtttagtggtgtttgtatcaactgctttcatattccttgtctactttgcccctccattagctgtaatcttgaggtttttaagcattcgatggagtagaaaagtaacatcttttgcgttcagtctttggctggctttgtggccttttctgtttgagaagataaacagaacaaaggttgtgttctatggagatactgttccatcaaaggaacgagttatggtcattgctaatcataggactgaggttgattggatgtacctatgggatctagcattgagaaaagggtgccttggccatatcaagtatgtcctcaaagacagcctcatgaaattgcctgtgtttggttggggatttcatgttttggagtttgttcctctacagagaaagtgggaatctgatgaacctgttttgcgccaaatgctttccacttttactgatgctcaagatccattatggctagctattttcccggaaggaactgattttacgtattacccctttctttctttttaatttactcttaatttcttttttgtcttttcttcttctttctgggatctaaatctttcctatctttgaatacaatcttgagtcttgatctagatattggttggagacataataatatattgttattaacttaattacctttacttgtttacaaagcataataacttgtagttgcttgacttctaatacagtgaacaaaaatgcaagaacagtcagaattttgctgcacaagttggacttcctgtgttgtacaatgttctactccccaaaacaaaaggtttttgcgtttgcttagaggtcttaaggggttccttggatgcaggtgatttgttttctaatttatattaaaatgaaaaaacaattacaacaaatcaattatggtcttaatcacctcactaaaatatcacatatatttgagatttggataacaggatctaatcatatttggtgcatggttactaatcaaatagcctcactctgtccattacttttaaacatcatgacaaggacaatcttttttctttttctttatttgggtttaaacttattcttctcaatttgattgctgcagtttatgatgtgactattgcctacaagaataattgcccttctttcttagacaatgtgtttgggttagatccttcagaagttcatatccatgttaggcgtatcccagttacagatatcccatcatctgaggccgattccagtgcttggctaattgattcattccatcttaaggacaagttactctcaaatttcaagattcagagccatttccctgacccagtttcacaagaggaactttcttctttcaagtgcttggcaaatttcatgcttgtaatttttttgactgtcgtatttggttaccttaccttttcatttctttggtccaaaatctacatttttttatcttgtgcataccttgcttcggctactaatctgaacattcggcctaagccatttctaggctctattagagctttgttttgtttcaagacaaacaagaaatgactatatacttatcgatgaagtaaaagatagccaaataaactacatatgttgtttgttttctttttctttctttcttt

SEQ ID NO: 112944 - DNA, 4773 bp, Cannabis sativa
  modified_base (305)..(307): a, c, t, g, unknown or other
ttacatgttagtttaattaagagattaattagagaacatgtggtctagaacctaaaagatcttaaaagagtgatgttaatttataatctgtcattcaaatcaagaaaaagatagcaataaggcattaacaattgggtaaacaaacagcaggattttcctccctattttctcatcttgattaatattcacttgtttctttaagtttcttgaattacttttattctttttaaatcttaaaaagtattgatttgccaaatagaatcataagtataatttagttttaattaatccaattccctgtggtnnnacctcacttgcgtgagtttactacttgattgcgtgcacttgcgtattgttttacaattttcgtaacatatgcctccacagcttataatttcaatgtcacagtattttacaggtcgtgtcaaatttaggggaaatggaatattttataagataaaagagaggtttgaagatacgaattgattgagagggtgaaggataaccattttggccaattttagaaagttggttatttgtccttctcttcggtgttagtacaccaattaatgttgtacaaaatgaatgttacagttgagaagggaaaagaaatgtgattttacatcggaaggaacgaggctagaattgggatggttaagtttgctcttataacatgcctaaactttaaccaagggccaacagatgatgagaagaatgctcacttgagcttaaaccaagggccagcaggtttgatagcataagtttggataaacttatagatgctttcttaacttgcaatgttcttgacgacatatacaagatagggttgtgctttcttgtggagggagttatgttgagtcgtgagccttttgtggatatttggagttttatactcaaatttgttgaagatgttgatttcttttttgagtttccttagggaggctttcttttgccaaacttatgacctccctccgaagacattataaaacagaaggctaactttgaaaagaagctaacgcagaatgttcagcataagtcgaagtacacattctatggatatgcacaagcattacactattgggcctttgaatccattttagaggttgggaaaaaatttgttgtgaagcacgggattcagttcttgaggatgcttagttggagcaacaagaaaaattacaagaagtgtgacattccgaagaaacaacttgcatcactattttcaaaacggctataatattatttctgttatatttgttttgttataattttgttatattactattagaagaaaaaccttaagtttgcaaatattttattattaggtgaaaactttagtttgatgttgttttcgataggcatcccccagttttgcggtactttcaatagattttgccaatattgttaggtgaaaagcttagtctaatattatatttgatagaaattcaacattttgcaatagccttttgataggttttgccattattgaaattgttaggcgaaaaatttagtctgatgttatatttcgatatgaattccatagttttgcgacaacctttctataagtttcaacgatattgaattattaggtgaaacttttagtctgatgttattttttataggaattcaacattttgcaaatattgttaggtgaaaagcttagtctaatgttatattcgatagaaattcaacattttgtgatagccttttgataggttttgccattattgaaattattaggtgaaaaatttagtctgatgttatatttcgataggaattccacaattttgcaatagcatttcaataagtttcggcaatattgaactattaagtgaaatctttagtctgatgttattttttataggaattcaacagttttgtgatagcctttctcaataagttttgccaattttaaattgttggatgaaaattttagtttgatgttcttttttataggaattcaacagttttgcgatagattttcgatagggttagccaatattgactttaagtttaaaaatttagtttgatgctgtctttttttgtgatagcctttcgatagtttagcactaagttattaaatttccatttttaaacttgtgtttattgttattaacattccgttcgttttttgtcctaaactgattgtcatgaagtgtatatttgctcgtccaaatgtggaggagtatgtcaggacattcactaataatgatactcagattattattaagatgggtatcaacaaggcgcaagctaaactctaaatcctaaactataaactctaaaccttgttgccttctaaagccaaccattgaaaataaacacatacataatgttctcttggttttcttgagagctttataaagaagaataaataaacaaacaaaatataaaatgaattgatgatgatgatgatacgtgtatcaaccgttgaaagagagctgacacttaaaatagatgatttctaaaaaaggacgttaaaattcataacttaatttttactatataattttttttgaatgcaaatatcaacttttattaaatgcaaacttcagctactaagcaaggtagcaaatcaataggaacagactccatactgaagagacgttcaggatataatataacaactttagcgaaattatgagccaccacattatcagatcatttaacaaaagaaaccaacacatttctcaaacttacaagcaagtttttacagtcatttattacttccccaaacaaagaaaccatggatagtggactctgtaatgcttgtacaacacataagcaatcagtttccactttacacatttgtggtcttgaattctttatccaactgagggcttcccgaacacctatggcttcggtaagggaagggtctacttgggcgtgggcaaaagtggtacggccttcaattagcatgtcgttaatgtctctaataaccatccccaaaccatagctacaacccccatcaaatattgctacatcgacattgatcctcacactattaacatcattggaaacccactacccattaccaactgtaagctgaaaaccagcttgtgttgtatcatttttccgagcatctagccattggtgaagataagttttagcgaaagcaactatattatcaggtcgtacctctttccgattctaaacaaattcgttccttgtcccccaaatcgtccaacaagtgactgccaataggcacttcaggttattgcaggccacctgaaacaccttgctgcaccagtcgaaaaaatagtctccagggatagtctgggtacctattcccacacagtcccagcattgtttaatgatgttggaagtaactaaacaatggagaatggtctcctcatgctcaccacaaattagacaaatactggaaacatctaccctcttaacccgaagctgagtaagagttggaaggcagtttgcaccagctctccaaaccagatttaagacttttggggggagtttcagactccaaagtttacgccagaactgggacgcttcatcctcaaaccatctgccctttaatttttgaagtgtcgagtatgcactcttaactgaataaatgcccgagttttctttacaccagaataattgatcattattttgagtgatcgtcaaatggatgttaatgattagttgtttgtccctatcattgacgagatcagagattaactcttcatcctaagataaaccatatgtggtcattaaactggacacaaacgcaccagtaagtgcgggatgatctgattccaccatgggattattgtcatcatttaaccacggctcacctaggtctgggatagaacaaccactccctacacaccatctaattccacttttcaacagatcttgagcttcaatgatgcttcgccacacaaagctcggttggcgccaatttgggcagataaaaacgaaccatgcggaaagtatcgcgccttgaaaccttcaaaacaagtgagtttggctttgtcaaaattctccaaccttgcttccctagtaatgcaagattaaaatcgtgcaaatcaggaaagcccataccaccaccacttttgtgtttacaaagcttatcccatgacatccaatgaattccttttcgatcccccttagattgccaccagaatctattcgtaagcttctcaatatcccgagtgatgtcaagaggtaggaggaacacactcatgacataacttggtaacgattgaaccacagccttcacaagcacttctttcccagaacgtgatagaaatctgccttcccaactctgaaggcgcttcttcacttttgtttttaagtagcccaatacagctgttttgttgcgactcatagtgctagggaatcccaagtaaaagttatcctcagttgctgcattcattcccaatagagagcacaattgattgcgaacattaggctccatattggtgctaaagaagatcgaggacttggcaaaatttacttgttgacctgaagctctttcaaacttttgaagaagctcatgaattctccttgcctcatccaccgtagccttgcaataaagataattgtcgtcagcgaacagcatatgtgaaacctgagatgcaccatttgtaactttgcaatcgtggatccatccattattctcatacttacgcaggattacagaaagaccctacgcacaaagaataaacaagtatggggataaaggttcgccttgtcttatcactctggttgggacgataggacctaggggtgttcataaaatagctgatccaatccaatccgcacgat

SEQ ID NO: 112945 - DNA, 3324 bp, Cannabis sativa
tgttaagtctaattcataaataaaaatatattatttgataattaattatatatattagataaatagttttgataattataggactgaaattgaaaaatatgacattattgaaagaaagaataaattattgaaataaagtggcaaaattgtaactagtgaggtccacataagtgggcgacaactggagtgtatttttgtccattattttattcttttttaatccatataattaaatcttaaaccctagttaaaatactataaaaggaacatgatgctctcattatcatccaactcaactcacttcaaccaaaataaaccaagttttcattctctaataactagtagatgagaggttcctttctatagtgattttgaatccttattcattgttcttcattaattcgagccatagtgatagagtaccatacccacacatagcaagtcaaatacttaatcatagtgtggaagacggtggttaatcaaaccgaatgagagaaggagatctaggctcagatatagttattactttgtgatagaaaggaacaagggttagagatctgagcgaaaagagtcatattattcaactgccatcaattaaggttttctaaactcttgtgtgcttaattttattgttttagaaaatttatttttagtgtgaatgaaatatacatgctagtaaatctagatcctggtaaaataaattccaacaactagcttcagagccatggtagtaatttactttcatgaaatatggatttaaaacgatgattgaatgatttggatgtgttcatgttagtttatgtgtgatttgatgaatgtatgtgaattatgaaatttttctataaaaataattttattttcattatgaaaataatttatttggatttcttgtgaaaaattaagctattttaatttttatggaactcgattctgataaaaattgagaaagatatggtgttttgaagtttcgggtgcatatggttgagcaccataggattgtatttcttagggataagaactgattcatatcattgagattacccgacatcacacccaaaacaaaccagtcacaaacagtttggaccatatcatcgcacacaattgaccaaaatttttgatagaaagccagagtcatgccattaggccttggagatttgtttggatgcatctagaatagagttgtcttgacttcattcattgtgagcagttttaacaactcagcgttattcaacgaagaaatagatggctaaacacaataaatgaccccccaatccacttgagattaataaaaaataccagagaaataatcatccatcacatgaggaaggccatgctcccaatcaacccattcttcaacttcatttttcaacttataaatcaaattatttatgacgaaaagtagcacttgcatgaaaaacttactatttttatccccagatttaagccacaactttttagatctttgatgacaaaaaatctaatgttgatccataatctcgaccatattcttttcacctcgacaaaaattctacacaactcatcatcccgacaaccttaacattgtttagtaaccctccttacttgatcaattctttatttaaactttcaattaatattagctccctaatgtaacaaatgctccccataagtagaaatcttactttgaatagactaaccagcataagactcccatacatcatgaacaatctgagtacacatgggttcttttaaccttacagtctcaaactgaataatcttcctacctttacccccaacctaaacgactgggtccaccagaagagaataatgaccagatgaagcaaaacctaaattaaaaagcttagcagagtgcaaaatgtccatccaagccgaggtaaaaaagttcaatcaaggtctaacagacctccacccacctattttaacctcgcccccactcccacttaaactgatgaccatggagctcaagctcatatatctcacaatcacctaccaccctttgaaacccatctagtaaccaagtagggtaaggccgacctccccttttgtctccttaagaaagaatattattataatcacctaacaagcactatggtagtgttgaacgatcttgcaaagtatatatgagatcccaagtgtgctaataaagactcatattcagctcaccatacaaactagttaacctcctctcctccttaccaaccactcaagctatgagatctatatgattcgtggaataaccaataattttagcttcctctcttgacttccaaagcatagccaacctcccccacccccccaaacgcccttaagccgccatcgagaacaacccttcataccccaaactacgtttcaaactctgaacacgagtatcatcacaaagtgtctcataaagaaatataaaagttggtctattttgatacactatctctttaaggaattaaacaacccctggattcccaagctctggcataaacaactcataatgattggctgactcttgttcacaccatcaatgaagaagagaatcgattttggtttagggatttgagtgtctaagccactaataccatattaggaaggatgttgggccttactcaacctaacaaaacctacttgttatgggaggattgccttcaccttagtgaattgagtaaataacaccagttaatgtgggactttaatacgctctctcacacacagcgttgaccttgccaaaaaacttcaaaaaaattaatgttagggacacccaacattgcaaaactaaacctactctaacaccatattataaatgaaaaaaaaattcttcaaaatgaattctcttagtggtttaattacaagtaatgctttatatatgtattataaatggaaaaaagaaattatttataactaacagaaattagttatcactgatagaaaactaaaatagagaattaatcttacaaaaatattgttcaaataaaaaatgataaaatatatcttttgtcccacataaatcgattatatcaggtagctgcatgaaaatgatcaaaaacttgcaaaggctaagtaagtcaaacaacactactctaatggcatgtttactaatatgtaatgggaatcaatggtgagataatcattcccttacatttgtttcatttgtttatattatttattaaaattaagaaatttaagaaatataagaaatagagaacttgattaaataagggagaaagaaaaagagaactcccctcaccaattttataaggaatgtcattaagggtaatggattttaattatttttattttatcttttaatattaaatatataataacaattttatcctt

SEQ ID NO: 112946 - DNA, 6758 bp, Cannabis sativa
  modified_base (26)..(27): a, c, t, g, unknown or other
ataaatcacttcaaatttcttatatnnataactaatcagattgtaaagggttttatgtagggtacaaaacccaacaaaagagtgcagcgaacaagaagcaggaaccaaatactgtggctgaactagaagttgaaaatgatactgagcttatagagggagctgatatggagaaacctgaaggcaccattgtgaagagtgatgaaaggaagaaaacagagaagagaaagtcgataactacagcagatcgagaggttcaagggacttgataactcttaggaagaagtggtataaaccagtggaatagcttgtctgaaggccagtaccagtaatgtatatggtgtgctacaggataatggagatggatatgggaaaacaactaaaactcaaccagattatggacagtgttagtttaatgggatggaatattagggggtttaataagaaggagaagcagcatgtgcttttagaggtttgtaaaataaacaaggttggtttttttggctctttttaaaaccaaaatcaaccatgatcgggtgttagatgtgatggacaatatatttaggagctggaatttctactccagtcctattatttcttaaagaattatgttgttttggcaagctagctacgtgaatgtcgaggttcttgttgaagatgctcaactcattcattgcaaaattagaaggatcggggacaaagaagattcttatgttactgctatgtatgaaagtaattccatgacataaaggagttccctgtgggacaaggtctcagctcttggtcatttaaaagatccctcgattatttttggggacttgaatgctatgtttaactatggagatagaagtggaggctgtcatgtcagtcctagagatattaaagatgctcaagactagttagcaaaaggccaggtgggggagttccaccgtacgggtgccaaatttacctagtcaaacaatcatgaaatgggggacataatttattctaaactgaatagagttttctgtaatgaaaagttgttggatgtttttttgaaaacagttgctatgaacaaatgggatgctatctcggatcatagttactgtataataaagcatgttgaggctgggaacttagggaccattccttttagattttgtaattactggatggacagagaagggtataacgaggttgttcttagttgttggaataatcagtctagtagcaagggtcttaaaggtattgttcaaaagttgttgagaaccaagcatgtgctgatcagggagacataattggacataattggctcttacaaagcaaccaaagaggacttcaacattgcttgagggaacctggcagcgaacctgaacaaccatagctttcatgttactgagaaaagtactcaacaagcgtataattctgccaaacaggattattcaagctatatgcagcagcatgcaaagataaactggatgaaatttggtgatgagaacctaagcttctttcatgcctctttggaaaaaagaagacaagaaaacaagcttcttttttactgtaggaatgaagaagttattgaagactatccgaaggtcgctgagcactttcttaaccattttaaaaacttcatggggaaaggaagttcagctaccagaagattagatcagactattctcactcagggcaagattcttgacatccaggagcaagtaaggctcataagacctttcactaaggctgaagttaaaagagctattgatatccattcttccaagagccctggtccagatgggtatggttcgggcttctttaaggggctttagaatgagattggggaagacattactcaaggatgcctaatatgctcaataaaacgataatttctcttgtccccaaaacagacagtcctaaagatgcaaatgactatagacctattgtgtgctgtaatactctatacaaattcatatccaagatgatttgctctagactgtctgagattttgccagatattattcatcataatcaaggagcttttgttaagaaaagatattttgcttacaacatcattatttttcaagatcttctcaagggttacactagaaagaacatctcggccagatgcataatgaagatagacttaagaaaggcctatgatactgttgactggacttttgttgctgatttgctaaatggtttatgctttccttctagattcatcaattgggttttagtctgcataaaaggtacctcctataacctgatgatgaatggaagactccagggttcatttaaaggtgaaaaaggtctgcactaaggagaccctatctctctaatttttgttcttgtcatggattacctgactagaatcctgaactatcatgctcgaaaagttggcttcagttttcatcctctctgcaaatagctcaagcttgtcaatttatgttttgcagatgaccttgttatcttttgtgagagcaatgaaaaatctgtgagatttacttttatgaagccttctccttgttttgtgacacaacaaggctaaaatctaatatgaataagtctgctatctactttggaggggtcaatgaagttaccaaaagggccattttgaacttgatgaatatggaagaaggctcttcccctctcaaatacctaggagtgaatcttcgtcctactaaatggaagattttggattgtggttgcattctggataaggtgaatatgaagctaaataattaggctaacagaaacctttcatttgcagggcgtgcataattagttcattcaattcttttggggattagaaacttttggatgaatcttttcattcttcccaagaaagtgacgaatgctattgacaaaagttgcatggattttctcttgggcgtcaatgttaatcaaagtaaattccatttatcttcttgggaaaaaatctgtctcccaaaaaagtttagaggaaaagaagtggaatgttactttgatagccaaaaacatttgggctatctcgaaaaagcaagacaatctttgggttaaatggattagttccatttgcgtaaagggtcaagacttctagatgctgacttttaaacatgatagcagctggtattttaagaaaatcttgagtctcaaggagatcattaatcgagatgctctcatgtgggcgggtgagaatgggaaatgcaaagcaaaaatgttttataattctcttatctctgctgaaaaatctgagtatgcacctacaatttggcataagatgtgtgtgcccaagcataggtttatttgttagcaagctataaatgaccaacttttgactagggatcaccttagtcgagtgatggagatcactaatacgaactgccctgtttgtgagttgaatccggagactcacaacaatgttttctttgagtgttactttgctaaattggtaacgacagatataggttactggtttggcatgaatctctagccgagcgacttcaatcattggatggactggtgttcgaaggcgatgagtaattttctggataggttgacgaatgctgtcatgactgctgcagtttattacttatagcagaataggaactgctgctggtttaacttgtactgtctagttcctacattcgttagtagggagattaaacatgctgttaagtatagagtcttgagttgtagctttaacaatttgaaagggagggagttgcacattattaatgtaatcaattgttggtagctggtgtttttgtgtagcagctggttctcaacttgcttttgtttgtagttttgtctgtcttttgaataaaatcttatcctttttgttcaaaaaaataaaatataaattgatgatgaatcatacaaactaaaatatacgtgcctcatagcttgctaagctctcttttttttttttatcaaaatgtttgttttcacatatgaactgacctaatggtaaagagaaacaagtcacttctaaagtatggttgagtctcttattaagagacattccattcaaacacatacagatataactttctgattaataaaatgaagcaagatacaatttattttagtaagatgtaaatgtaatatatggtattacctttattatatacaacatcccattaaaaaaaaagatacaacatttctctctgttctccacctcaggcaaatctaaaatgaaaaacatgcaaaaaaagtttttttttcagcattatgtaactaagttgtaacacataatttactaagagtacctcctttgtgtaatattttggtgcatgtatcataactcatttactaataaagtgaaatgtctataaaagttttttctctttttgagtatttagcgcaatcaaatctgaagcattgtaccttactaaaaaataaaaagacaagagtaaaagctatataaataccatgtgagtatttaatgtgaatttgtgggttgttttataatcttattgtgaatttcaaaacatgatccgttctttggatatagagcaatccattgctgccttaaatgcatctcagatattgtctagctaatatgtcgcattacaaaacatattcctactgattgcaaaagatactctttaaaagctcatcatctttgcttccaagatgtactcatattatcttcctctgagggtatgaaccttaataaattcaaatataaatataaaaagtagttaattttttgaataatttaatcccccaaaacacacttagatatataaaatagagcttctgaatctatagagataatttggcagtaacaccatacaaataaatagataagtgtaattaacaccaaaatatataaagagagagagagagaaagagagagacaaagaactgcaaccagataaaaatggttcaaaacttaagtatcgatatccttctcttaaggtatctttatcgatttctcactactataattcatgactcaatatatatagggatttttaatttatcttatattgtacatatatttattgtgaatgtgattctatatatatagaactattacaaaattaaataaaccagataaaaatctacctaaaacccaaggtgaaatacttgagaacaacataaaacttctatgttcctggattgagatatttttttctagtaaacctaaagtgaaaatctacatgggagagtgagagagtgactgagagggagagtcaaagctaagtgggtgctgctcgaacgagagaggagagacgaggttaaagagagcgagattgagtctcgggctgctggtggcggtggctgggtgcgttgttggcctactactcgtggtttggtggtcgaagaggtgaatggaagaaattgtggctgtgctagggttcaaaacttgatgaagacaaaatgatagttttattagtcaaaaggttgtttagaaaaaattaaaacatttttcttcagtggataacactcgctaaaatattagtgtcagtttccaactgaagcaaaaataattagcatccattttcaactaaagcaaaatgtaaagatatattttaaaattttcaatttttttcctcagttcctcttttagcgtcgaagagttaactgacgctaattgagcttttttagcttcagttatcctttgaagcataaaattactggctatttattgcatcagtcaactatttttgtgtgacgctttgaccaacgcaaattgtgtattttgtagtagtgtttacgtggtattatctcttttcaaagattaaaagtaccatagattttgtatcaataataaaatacaacacataaaaaattaacatataaatataatatagtattgtcgtacaagttaaagaaaatacgaagctcaatttcataaaagcaattcataatgaaaatttcttaaagagaaatttattaatactctaaaaatatcataataaattgtccacaataatatgaaatagggaataaaatcccaaactaagaattaaaactaaattgttcaataactaaaacaattaattataaaatttaaagaaaagacgagcttcatcttcaacttggacaatctccaccattctgtccaaccatccgactcaactcgctaggatagcaatccaagtttaagcagttggagctgaaataagaagaaaataaatatggttagtagatccagaattaataaccgaaaggaataataattctctaaaatacatgaacttatatcaaagttagagataccttgtttttttgacaaaaacttaggacattggggtttctagtggccctttttcattgtaatagaagcactttcctttttccttggttttggattatcatcctttcttattcttgttagttgtgttaacaactttaagagacttcttgatatttttccatttgttcatctttctgggttttgaagaagaggcaatgtttgcctcaggcttggccgtaccattagtagctgtaccagaactaggagctttgtttcctcctttctgtggacctcaaattaaattttcaaatgtctgaaggttgttgattaacttgtggaagtcaaaagtcaacttattcatgacataatttgaagtaaagagcaaaaaagttggagtcaaactatttaagatgaaactcacttgagtttcttgatctataatagctccatatgtaatacccagaattaagaaatagattagcaaacccctaaatagataattatgtttaattgaggaattatattattagatagttcaatatatgtgaaattacatgaattttaatatgttaagaccctgtttgtgagccagggg

SEQ ID NO: 112947 - DNA, 5330 bp, Cannabis sativa
  modified_base (3655)..(3662): a, c, t, g, unknown or other
aagtatcaaccacgctagttcccaactgagcagtgacatacatttgtttcatatattaaatatgtacatacacacaaaaccaagataaagaaaagcatacaaggaaaatagagaaagagagaaatcccagctgtgcatatagactatttacatatcataacattttcttaccacgctagaaagcatgacaccaaatctcacatgtcttgtgctccattagtgctacaccaagagacaagactgttcacatgagttaggcaggaagcagagaaagggacacgtccgtttaacatttcaaccttagtcatctctttgagttggaagttataaacataaaatgagccatcttcatctctcttgaaaaccatttcgcctttgattcttaagctgaaaaggggaaccatgtctaaaatgcaacccacagttatactatgttgctttatccacacatcaccgtataagcctttcaagatccacacatctatttgattaacttcatcatgagttacaaaacctaagaggccactcacctcgacaatacgatcataagttctgcaactttttggtagagttatctggcgaaacttttcctcctccaattccaaggacactatgtagtcattatgatcgatttgaggaatccaatgtagagctccaattgcagatacaggacaatagccaaaccaacgaatgagtccaaaagaaggaccatcaacctctctccatgatttctttccaatgatcagaatctcacaattgatgtatcccaggttatctataaacaagtgcacaactttgtagttaccagtaacactgcttaaggcaaaaccataagattcattatgttgaggaaaaagagtgccaagaggaagaggcaccaactttctagtcactggattcatgagtatcagtcctcccttcttcattttattatcaagcaaaattagaccattgcaggaagctctaatcttgcctaaacaacttatattgtattctcttatcagactcttcccatctttaaattctatgaactgaacagaaaactttgaagatgcactaaccaatggttgctccaaaaaaaaggcagagttagactgattaagtcttgcttctactgaaacaacattaggcttctctggaagtatgggaaccatggttgtttctgttcgaggtgaggaaacgaaaatcaaaacagattcagctcggcgaagatgggcagcaatgaatttggcattatgaattatattaaaccaagccttacagacaaaccttgacctttgaatagagtcaagaggaagacgtacaaggatatttgacacacaatcatcatgaaggtaaggaactaggtcagtctcttgttgctttcgttttccttcttctatctttttaatgtatgctcttttctccactaatcttagtaaccttgccatgtcctctaagttttaagtgttttaaacctatagaaaaaacaacggctcagcaattcctctgatagatgtatattattggaaaaaacaaacaaacaaacaaaaaagtggggaagttggagcaaagaaacaaaacattcaatcaaaccatttgaagattgcagaaaattgaaataaatggagtatgaaaacttttgaacgattagacagagagaaacggccagtgccacaagttcatatatattctactctggaaaatgttgactgctaaattctttgacccaacaatagagagcgagacctatttacttgaagggaaaaaaaatgtcagcgaaactgacaaaccagtatcattcaggccatactagttcttgtgtcttccattttagctctgtcaaatgatccaaaatccactcagattgagtatatgtacatatgtatcatttggatataaatagaacacacaagcttgacaattggccaagttgtgatgcttaacacacgattcacagtctcagactacataactcatgtcacaacaatccatcagaagaaaggatatgtaatcaaaatcaccatagaatcccataacaatttatcaagcatgtcagatggacgctaaagtgccatggattaattgttaaaaaatgcatggaaaaagccctaatgataaatcacaagacaaaagacattgtcaaattatctggttactactttcattactgctaggctagcaaaacctctagagtaactcaacattatgtagtaaaagaaaaaaaaacacgtaattatgcaagatgattaataaataaagatttaagaacttaacttattaattccataacaaaatcttgaataaatcatacactaacaatctctacaatttgtgtacgtgtattgtgaactgtaatggaagaagcacaaatttataagtagagatgaccagtttcctgaaacagtcatttacatacctcccatggaaacttacacattctcaatatttgattgataaataataatattctaaatctttatattatcaaattaaataattcttttttaatttgataaatatcattttaataatataaagtggccacaacattaaaaattcccacacgcccaaacatacatgaacagaattacagaacataatattatagcaggaagaatcgaaattcgagatctttcattaagaatagaaaattataatatacccagtaagttacagatgcctgttttttcccttaaaaaataaataaaaacttaagaaaaaataaaaagcaaaggcggaaaaacaaatacaaagaatcaaacaaaataaagatctcaatgacagaagcaatctatatttcttcaaagaatcaactattctctcataactcgtatttccacttgatctatagatgtactttacaataagctgagcattttacataaacaaaaactaaaaaaaaaatatgaaaagcagagtcgaactaatataattcccatcaacgaattcatgactcaaatcaacattaataacacaatacccttaccaaactggattggtaaaagtgagaaatcccaaataagcagtgaaacgtttctcagtaaatatatgatcaaaatacaaatattaataaagtgagtagttcaagagcattaggaaaagtgaaaacttactttgagagaagagtgtagattgtggattagaatggttaattgatgggaatcattgagtttacagacctgcctggcttccaatcaaagtttgtgtgctctaaaaattgaagacaaaagctccatacattgttttggttttggactggctcgctctattcgtatgggtttttctccgcagtagattgacgttgacttgacaattttgaccctggtaactttggcgtagaaatctaataaatatgctcccataatagagatagagatcctcgtatacgtatatgtccactaattaccgttacctattataatttttttttctcaaccttcacgttgtaaatatatgttttgtacgtgtttttgtaaaaaaaatttaattagatttttattttattaaataaaaaaaatacacttttaaaatagtaaaaaaaaaattatgagcttaatttttaatgattttattttttaatataattaactttaagataatttttaatacagatacagaaaatgtaaccagttttgtcataacatctctatatcgaattattattaagttttannnnnnnnaaaaatcagttcagggtcctatttatataattttaaaaaatataaagttcattttgtcatttaacaaaatagagagtctaattggtaacttttgtaaaacacatggtccaaaataatatttatccaaataattatgatatcgaaaccaggtttgaagtttttgaataagaatggtaaactggaatattatgaactttattttcgatactgtaactattcaaagttttttaaaaatttacatggatgatactgtaacactattacacaaaaaaaaaacaattaaaaaaatattctggcatgtatttcgaacaaaaatattaagaaagaagtcatcataggggattgtaattagcactcatctttatttctatgcaaaaaaaaaaattataattttctctaacaaaaagaaattatggttgaatttatataatacattccaaaaaagttgttcgagtacactatttcgtaagagttttatatttttattttttacgttgtagctatttaagctcactgataaatttttaaattttttaataatttatagtatcaaaaataaaataacaattttatctgttgactctgaaaattgtcaatgatgcctagtcaaaagtacgataatattgtttatgagataataaagagctgagaacttcaagtaaacaacaccaaaaattatagaggttgggtcgcagtatttaataataacctactcccttattagttgtatttcacttagaacactcaaaatcaaatgaaacttgacctgttgagtttcttaagaattctcccacgattacaataatatttcatcaaagtttttgcttttactgactgaatttgaatcccatttctcgacttataggttcatatatttataagtaaaatatacaaatattattaatgaaagaatattaattaattttgaatattctcctaaatcctgaggcccaagggagcaataaagagctggtcatacaaaattataatcagattctgtggatctacaacagacctccttatctggtctgcataaaggagcatccatcactctaagccactcctcggtagcagaagacctgttttgcctggtcaatcctttgcttgattcgtgtcaacaacattcttctaatttttggttcatccatcctcttatgtaccgcctaggttgcttttgtgtcacgcgtcactcagatcaatgccacgtcactcgtgtaaatttttagaataacattatctatgtacaagtaaaattaatataatagaaaaaatattgtattgttacgaaaatttgagcttcttatgaattgttgtctattttattgaggaattatttcatttaatgaaggtgaatttatttcaaaacatatgaagtgaaaaacataattacaaaataacatacattcttttttgacatagtgattagaatcactcatgaatttacaaaacatatatacgcaatcagcgcatgaccctcctcaaactaggatagtgttaggatttctaccctgaaaatccaaatattttctcattatcaaataaagaattaaacatttaaaatatgtatgaatgttaagttattaaaatttattattgaataatttatattaaatatcaaaaaaatctttattcatatatgagcagtgacgaagccagaaatttagttga

SEQ ID NO: 112948 - DNA, 1755 bp, Cannabis sativa
  modified_base (1296)..(1308): a, c, t, g, unknown or other
  modified_base (1714)..(1729): a, c, t, g, unknown or other
ttttcgtgttattttttagaaaaccgtaaaaatgtaaaaaaaatattctttgaaagtaaaaatgtaaatattttacaaaaaatggtgccttatgtaattattcctattttgtttatattttcattgtattaattagttaagaaaaaaaaaagaatatgattattactaatttgcttctctattttttttcttcacaatttgcccctaatgtatgtatgtttcttgattactgtacataggtccgtgttatgtttattaataagtaatacaaatcaataataaggtagtaatttccttacatttactttattaaattagaaattgagaactttttaaatataagataaaaaagaaggaatacttccccatcaattttttaaagaaagtcattaaacttttatttatttttagtttattttttaatattaaatatacaatcactataagaaattttatttttaatcacaacaaaacttaagactaaagtaaaaaaattgtgactaagtataaatcattatttttatattgtaactgaaaagtctgtgactaaatgtattagtcacaaaaattacaattttttgtgactaaatgtgtttttagtcacaataagtttaaattagtgacaacttatatctaaatattatgttttaatcacaaattactttttgttgtgtaaaagtcacatttagtcacaaaaaattatgttgtgattaaaatgttgtcactacaattagttttttttttagtgaatgacaattttttccttcaaaatatgtcttacaaaataactactatatatatatattatagtttaacaaaaaaaatgacaatttagtcaatttaagcattctaattacgttttctggtaaagtaaacaagataaatcactattattctatttccaaacaattataataaacaacatattataaatattgattctgatttatttcattacatgtctccattaatttatcctgattctggatattgtataataaacgtgccgtgtgcattcaaaatatgcatcaaaattttgcataaagagatataacattctttttagacaatcaatgtatttaaattagaacccataattttaaaaagagtaatttacgacataaatatttaaatgttatttctaattgtaaataaatactttagtttttggcggtaataatacctaagttataattttaaaatttttataggtatctgaatgttaagtgctaagtaaactaccatgtactgataattcttgattggtcaaagtcataatttttttttttttaaaannnnnnnnnnnnnataccaataagaaaatgacacatggataataactgaacatttaacgatcatgtacttacagaattctagaaatataacttaagtattattatcgtcaaaaattaaacttaagtatttatttgtaactgaaaattaaatttaagtatttatactgcaaattactcttttaaaagataatatcataatgttttagtacattttgaaaaattttgtaaatatattctaggagggtgttccttccttgtagaaagagtttgctaagaagtacttggtactataattatcggagaaccaatacttaaatccgaagatgtttcagaattttttcaattacttgtttgaaaattaggtggcggcgtttggttggaagtaatgaaatggaaaggaaataattttcattccattnnnnnnnnnnnnnnnnttttaaagtattggaatggcattcca

SEQ ID NO: 112949 - DNA, 7163 bp, Cannabis sativa
  modified_base (5006)..(5007): a, c, t, g, unknown or other
acatcctggtaaaataatttctaacattttcacgatgcatgctatgaaggaggttaaacgtttggaactgatgcatcttctcagctccccatccatcacgttttcaagtaccatttttttggtgaatgatctgaatcatttatttctcgtgaaaggcgtctcttcttggctctcaataaattctcacagcacctttcattttttaagtttcaattttttcgtccttcccacaagagttgtagcattttggctcatctttttgtttgcaagacttgatcaaccgaatcattctcaggcgtgaacataaccagtcacggtgtagtagaaccatacctcataatactttaattcatcaatcagtaagtgtctttcgtcacttttttcttgatgtaaaaatatcgaggttgaattggtgtatactatatatgagtcactattctgagaatattggtcctgtttgtatgatctttgtcaaaaagggagacttggcatcttgtcctgtgcagactcgcttaaccctacattggcttatgtaggtacgtttaggtctgccatggatagggctagttcttcaaaagctgtgagagacagcgatctttgcaagaagagacaaaggcaagaggctgctactggttcaaggggccacctccagcgacacgacctccagttaaggcttggtaggccctgcccacattatccaaaaggtcccatgccttgtcaaaaaggcggtggtgatcaagttgatctattattcactctagagatcacggcgctaattcttagggcaatcagatggatggttgaagaattttttagaataatggagaaaaatgtgataatcccaattcgggcaccacgtggaacctcgtacccagatcacaatatttagagaaaatttacagcatgtggcgttgtgtgacttcatcagaaaccaaagaatacattttgaaatgatgtatactcttattttacctaattaacattatatattaatttctactgaaattattataaaatattaatacttaacaatttaatgcatgcacatttgggaggggttacatgatttgagacggatttttaagttttacgactcggagtttctcgcagtgcatggtaacaacgatatagagaaggaagagtcatttaaggttgcatcagaaagattagctcattggttatcattgatgaatagccaatactaaatattttttattccttggaatatcgagtaaatattacttaagaaataatatttaaaattattttttttattataacttgaaattatttttacactatcttatatacatgtatatatatatattttagtgctcatgggatgttagaactcattgtgctagaaaaaaagaccctataggtggccaaaaatttccccaacaaattcatgcgatgttcaagaggtaataatttaattactctttatgtaacacatcttttaattaactaagttatgtatatatatatatatatatatgttaattaattgaaatgttaatataattttcaaaacagtgcatacgagaatttaggggaatcaaatgtgtttattggggcgtatcgaggaatatcgcttccaaattgtccaaaataacataaaaccaagaatgtggtttttatgtagggaaatacatgagtgacatcgttacacgtgcaaatcctaacaattatttaaacgatcaaaaagttgtaagttttaattattaattatcttatttattatattaacaaacaataatatatatactcacgtaaatatttacttcttttttacagtttgggaaaaagaaaatatacgattcaaaaattgaattgttgtcgttacagtgacagtggataaaataattgctggcagtgattcacgaaagcttggattgatgctgaaatgtataaaataatttcttctctagcttatttttgtatgttaacttgtaattttatatgtttaattagatatattaacttgttaacacttggactaattataaaatacttgtgtaatatatttagtcagaataaatacatttaagtatattgttaatttattttttaattgtatggaattaatttaaataaattaaattcatgaaattatattaggttttaaaacaaaaaaataaattgatttttataccctatggctttgtatccatatgagctttgggtctacaaaagataaccgaaaacaaagttagtacgggtaatcggacttccaaactctctctaacgttcttagatagaattattgttttccacaaaatgaatagtgagatcgggaacttgtacttaatatttatagataagatattctataagtatatgtgttatattatttgtcaaaatactttaacaattaaatcaaacaattaaaatatttaataattaaacttaactataattaattatattttataaattaaattaaataaaatatttaatttattactgtatataaaattattctaacacttacaggtatatataaattttaaatatataccgacgcagaaatatttttttttgacaagttggttctaatatttttttttagttaattgtttgtgaaatattttcttagttttttaaatttgtgaaagaaagtttgaaagtaactgatgtattttttttccagtttcaataatttaaaatatgagtcttacaaatgtcctatttaaaataccaaaagaatatgaccaaactttacagtaaaattaattatttagtatttacgctgctataaaaaaaaaatcatcaaaaccttagataattataacgaattacgcatatatcactttatcacgagtatttgatcttttgtcaaaaataaagaaagcattggtgtgtttaagaccacacttgttatcatgtcatgagcgacccattggtaaaccgtaaactagcagcccccaccttaaaattcgcctgtatttatatttatatatatatatatatatatatatatatttcttcctaaagacaaccattaaacgttctgcaagagtaaataacgtaattaagagtatggtcgaaaattggtggttggtgggtggagatgggtgtttgacttgaaggtctgtgatctggtttttattaatttttaaatttttaaaagcatatctttatattttgaagaaaaggggtctggagatatatacaatgatcacttattctacaatctgcccaccaaactagaaagaacgccgccccaaaagtcctaccgtacagtcaattgatggtacttcaataaataatcagactgagaaattatacgttacaaacacgtgtccaaaaatgtatccaatattttttttttttctagtatgtttgggccagttaatttgattttaggtggcaaagctccaaatgcatacaaccaagaaatataaattttaagcagacaattatctacaaacactatttggtctaggtgttctagttcaagtttacaacttacatgtatattactgaaaatgaaaatgaaaacactatgtactagaagattctaaaaaaagaaaagatcgatacaactttatctatatatgatcaactagtcatcactttcttatggaactgaaactaaccacatggagaataaatcttgaggcgtatttgtttaggttaggacgtgaataatcacgttttttgccatctgtaactgccacgattgtacaagtttgttttgccagaatgcaaactgtaccaaatgaaattaccaactataaatagtactatacgtatcacatgcataatgcattttagtcctcacgatcctaatagtaaaactaatctctcaacgattggtttcgatttggcacataagccagtcaacatctagctacttttaattagtttctcattattctttatagaaaaagtaaaaatatatgtatttatatatagaaatttgttattagttaggtatattgtaataatgttatacataccccacccatatcgtcgccacctcatgagctgtatgtgtcttttcttctcaaatttcattacttgtcggtttagccgacaaagaggtttgtgtggatgattgatcagtattaggttaggttaattcaattaaacatagaggattgctctgctacgtacaaggaaaaaaaaaagaaattatagggaggatattgctaattccaatatcttatttcaagtactttctccacttccaaccaaaaaaaataagtagatatttatgtttttttttttatgatgttgtacattttttaaaaaattgccaataatttatagtgtaaaaatataattaaatttttcaaaagagcaacatgtttaaattttttaacacccttagtaaattaatactctgaactatttggaactttataaaaatatttacagtaataatattataaatataatgaatactaaaaatattaacaataaaagaaaatatttaattgtatgatcttatactctaatacaggtgagagagcaagttaaactcacgtcactccagattctaaaggtcacgggtacaagtattataggaaatttgaaaaagataaatgttaaaaggtattaatggtatagatattactcttctacgtgtcaataattctattagtccaactaaatatcgaatcttatatagtttaatgtaataatttttaaagagtatcgctagtcaattacaaaacgatacatctagaacgtatcagacaccactagtgcttaatagtaatgcaccttgaaaacctatgcggtccataattaaaaagatattatctctagtgaatcctctaaaaaatagtaaattagcacttataaaaaaatagtaaattagcatttataattaattttttaataaaattatatttttatccagggacggacctattaagattgatgtgggggctataacaaaaatattgccttttaaaaaattaaatgtaaattttttaatttaaaaattataggcaaaaatagtaaaaaagcccccacaaaattagataattttnntaagagtgattataatgtagttataaatatgttttttaataaataagcccccacaaagtaaaaatcatgggtccgtcactgcttttaccctctccagcgttttttttttttttttgaaggttttaacttttaatatgggtgacttatatttttataatgttatcactggttactaaagtaaaaattttattttcagacttaaattaattataataaattatatatttaaaataaattaaatttttaattgaaatatttaataaggcttttctacaattaatatttataaataatttttattttttaattataactgttatcccaattttcgtagagagtgacgtggcatcaatttgactgacatgtgagaagatttcataacctagacggacaataggctccatgatgtagtgtctcaagtgatttattacttataaacaacttgtttgaagaagaagctggagcatctggatagggtatgttacatcgtccgaacaccatctactttgcagttagctcgcatgcaccgaatagagtaaaagtggctggaacatcttcagaattatcttccttaaatgttcaagcatgcaaatctcgatcacatcactgattttgtgggatagactcacatcgacaggagataagaggaaacctatacttagtttttccttttatttctcttgatttaggaaagtaattaagtttccttatttatttcttatttgttttgggaaactaaacggatgtaattatttcctatgtatagtggagctatttcactatttcgggatctgaaattattcattcactagggcacttaagctgctaaaactattgtaagagctttcgaggaagatcaagaacttcttgcttcttttctcataagtcaatacaagtaaaaggagagtaggctattactaccatcacggggccgaacttctgtaacaatcttagtgttctatttgcttaatcattattattaatcttttctaatcactttaactaactcattatcattggctaaaaacgaggtcaatattttggtattttcatcaagagcaaaagaacacaattattaatttgtttctcttcaagacacacaaagatgtctgtaactacaaggaggggtaatcccaatgagataattgatccaatggtaacagatcctaatgtgaaaactcctacaaatcagagagatcacatgaggacggatcccaaggcgatcattcctcaacctccaataggtctgcaatcagcaggacatggggtgacaacccctctgattgggttcactccgggcgtacaggaaaccagaaccactagtattaaggtcgagcaaactgcccctggtatagaaaatccatcttttagaactcctcaaggagtgattggtgatgatatggaattgcaaaatttgagagttgctctagggcaggtgcaagagcataccaacactcttcaccacgatcagcaagacactcgaggagctgtgaattttgcactcgaatagcaaaagctctaattccaggagtggatggattaacaaatggaggttgtgagagcccagcaggcgacaattgataatcgctctaggtaggccaacatgctgattaggcgagcttatcagctaactggatagcaatcaatggggaatagtttagttattcaggatttgaacaggacagacgtctatatccctgatggatcgcagtatgggctaggagaacatccagccaataatactcaacaaacccaaggtaatgcatcgtccaatccgaggccacaggatcaaactatggcccacacggtagaagagtaggtcttgccagtgcattatcttgggggagtggtcagtataacatttttccttagacgaatataccgaaccaatgaactactaaaaatagttgaataagaagcccgccaggtgttttagacattgacagaaggtcgtgattacattgggagtttccaaaataagaagcatgtgtcattgggtccttcctcttcacaaacgacagtggctgctccctcttctcaaccatcggtgaggcctcacctaatttgtgttgggaatattttaccaggatctagtatgttgaattaacatcctatatatgaatatctctaatatgatgaaattaaacacataagag

SEQ ID NO: 112950 - DNA, 5304 bp, Cannabis sativa
tgcttctttgcaatatctccctcgccaatttaatatggacgcccatgtccttgcaaaagaagccctcaggccaagagaagatagctagaggggtttgttttgctccctctttgctgcgtgcggtgatggttcttcttcttcagcagcttcttttgttcaaaaaaaaataaaataaaaaataagtggaacctaaaaataataaaataaatgaataagtaaaatagaagcctagcaattattatttgaaaaaggaaaacatagaagcttatcaatataattaataataatttatttatttttgataagaacagcaaaataatgtatattttttaaaaaataaattagtttttttttttccttttctcttgagagattagttgattcggctgttgtgatttgtgaacaccacccaaacaaacaaacccaaatatacaaaccctcctcttctcttactctgcaactctctcttgtacaaacgaccactgttatttcaaaccctagctctctcttctgcaacttcaactcctccctttctcatactctccttccattcctctctcttcttctttcccaatatcgatcccctccgctctctctccctcgctacttgctcattttttcgatggctgacggaaagttcgatctaccggacgttatccttccctctaattccaaaccctccgatcagtcctggactaacagaggtatttcattctcttcctctgcttatttgatttactttcattctttggtgttgaaaatttcttagtttcgattccttattggcggattcgatggattcgtagcgaatgcaagatttaggtttattgatctgaaacttcctagtggaacatgaaatactttttaggttttagcatattcatatcatttgtaggttatgcttcggatcagtttctttctccctcatgttttccgcttttgatttcgtttactagaaataaactaaaatggaaatcttatggtaaatcagttcaaattttaaaattcacaatttctcatataagttttctaggtaaagtaagagattcaaggattttgatttttctgcagggattagatctcatttctgtaaatgtgtaatttgaggtgttattattgtgtttttagggcttgtccccagtgaagatctttttattaaaccaaatctattttagctgatttgactctcttatatagtttcatatgtgtgtttttaagttttgggatcggtcatgggattcatgctgaggaagtaacctcaggtgttttgtcagtttgactaattcactgtggaaacttgtcttgtgtcaaattctttttgactagttgatattgataatgcatttacatgtggtgttgtatgaaaatatttttggatatttaattggcatttattcatgtttattttttcatatatgtaatatttgttatcgtggttagattatattgataatattatagtttaaataaatatggttgcatgtgagaattatatagctttattacatccgattagacatatatttctggaatgttattactggagtaattttcaaccacggatggtctgagtgtgacatgttactcggttgaaattttagaaaatctggaaaatacttcttttggtaattatgatgaacagttagaaccaaggggcctaaatgctcccatgtaataatttaaattaattaataacatcaaaggcaattataaaagtgatggtgcccagcctcctccaaaaatgtttttgatttttatgttattagttttattagcagtttgagtcttaagaacaaaactggtaattgtttttagaaagttttataattttctgttatctcgtcgatgctttaatagttgaaacttctggagaaaatggcgaggaaaaggtggttactgggttacttgatgagtcaaaaggtattatatttctttgggtgttctttcttttgagggtgggaatggagcaatgaaattgagaatttattttgtttaactaatttattatgccgatttatcaattcctgcagatttactggtttcagaaagcagcatacctttgtccccccagtggctttatgccaaaccagctgaatcaaagatggtatgttggttactttcaatttttattttccttcttttttcctaatgaaaaaattaactgtagatgtttatagggatagtgatgtatttctttccttttatcttattttgctaagaaagctacatatgcagtgccttttgtgctgagcgttatgttaaatatggttcaatatcattaccaccagaacatagataatactataattatatgctcctagtattttaacttggttagttgctacggtgattgtcttcagcttttaggtctcctaaatgtatctgagctagaaaccagtgtatcttatgctaaattatcttggatttctctcttttagagagattctgttgttttataatttgtatttcttgaacctttatcttactcaacttaatatatattgattcaactaagctgtggtcaattgactttttatgactttggaaccctgttccatcatttttttatatgatgacaggaattacgtccttcaagctcactaggaaactccacagaaagcaaccagaaggatggttggcgtttggaagggttggaggacaaaaaggaccgaaggcgggttaacactgatggtgaaagtagtcgccgctggcgtgaagaggaaagagaaactagtttacttggcagaagagatcgcaggaaagtggagcgccgagacaacacttcaatgagggaaacaactgacaatagagcattgcctacttctgagcgatggaatgatggtcgtaaccctgtacatgaaaccagacgcgacagcaaatggtcatctaggtggggtcctgaagacaaagataaggaacctcgaaatgagaagagaacagatgtggagaaggaagatactcactctgaaagccagactactgtaggtagcaatcggtccactactgaacgtgactcagattctcgtgataaatggaggccacgccacagaatggaagttcaccccagtggttcagctacatatcgtgctgcacctggatttggacttgaaagaggaaagggagaggggtcaaatttgggatttgcccggggacgaggaaggccaaatggtagtgggacatcatctagtatcggtaccgaaagtgttcctggaaaaccaaggtactcagctggtaggttttgctatccaagggggaaacttcttgacctttatcgtcagaatcggcttgatccatctttcgtttcaatgacaaatgagatggaggacttacctcctataactgaagaaggcttggttgaaccattggcttttgctgcccctgatgctgcagaggaggtagcaaaaagattccaacaatgagcttattaattttctatatagccttgtgtaaaatttttgcttttgtttcactgaaataataaaatttatttgtgtaacttgactataacaggccacccttagcagtatatggaagggaaagataacaagtagtggtgtggtgtacaattcatataaaaatgggagatcaactgaaaatatgacaggtaatttgcatgcttataagtggccactgtcctctgcccataactattttcagttttatttataattgtgtttactgtctaggtgtgggagacattgaatctgtagatggagctggaaacattttgccttcagcccttgtcgaggaagctaataataccgtgcaagatgttgcaaatggtgatggtactttggtggacggtgggtggaatttttatatttctatggatatatattttgcctaccatttcctcatttgtctctctaatgatctttggctgatattatatttcaggaggtattggcactggaagtgatgttgatattggtggtggataccatggcgcatttcagcatgatgtcaatataaatagacaaaagttagattcttctttcaccagccattcttttgttgacaaaattggttctgctgattccaacgttagttccaagctgtctaacaatcaaggctctcaacatattttgccttttaccgaggacaatcataatgggaacaccatcaatgtggcgaacgggttggacaaggatgtcttacctgaagatttatgcttgtgttacctcgatcctcaaggaatgacccagggaccatatctgggtgttgacatcatctcatggtttgagcaaggtttctttggaacagacttgccagttcgcctggcagatgcacctgaaggaactccttttcaagatttgggtgaggtcatgccacatttgaaagcatgggatggacaagaatatacttttaataaaaacgttgagctagaagaatctggagcttttggagtaactttggggaaattaacttctgcccctgcttctggaatcactgagtcatctattggaaacgaatccagcccaccattggctgatttcaacagcctcccagatgagcttgttcagttgagaatatccgaggctgaagatccaaaactcccacatttcaagggtcaaacctttcatagttttgatgggcgagatgaaggtaacttttgcgatttattgcatctgtgggtttttctttgtatttcattctaataactctctggtttctagaaattttgtttccaggaagaccaatgaacactggctatcctactgcaaaatcatctgtgaaccctcatgatcctttggaaagttctggcgtccacatccctcccttccctgaattcacagaacctggcttgcgtaatcaaactgaaactaagttgcatcctttgggcttgctatggtctgagctggaaggtgctcaaacgagctatgcacagtcatctagtgtgtcttctagcatgggcaggacttcttcttttggtggtatggctgatccaggtcttgttgctgactcttggtctgatgtttatgggaaaaatcaaccttctgataccaacctgtatcaagatatgatgactgctcacaatttgtcacgcatggaacatgaacccagcaatcttgatttagctgaccagctgatgtcacaacagttacagcaacaaaaactccaacagaggaatgtgttacctaatttttcccagttaaatgactcagttttagagcatttgcaaaatcaaaatcttattcacccccagcaattggccaacctttctgcatcagaactagatcatattatgaagacgcttcagctgcaacaacatcggcagcttcagctccagcagcagcagcagca

SEQ ID NO: 112951 - DNA, 2315 bp, Cannabis sativa
  modified_base (854)..(860): a, c, t, g, unknown or other
gttttagaaagttcatatttaagatgttaataaacatacttgtgagtagatctaagctcccggtaaaataaattccaacaagtaccccttgtgcctgctagttaagttgtttcctttgttttcaataaagaacttaattatcaaaaaaaaaagctcattgatcagatatatgtcattttattaggactaactctaatgcatcctcattacgcttgtgcgtagaaagtgttggtataactgttaagagaccacatgaccaaacgtgacatttgaaagaatctcacatgattaaatcgagaattttgtaggtgtactcgtcaataaatttgtgtacttttgagacatgtcaaaaattacaacagtacaaactagcagacattggccgaaatggtccccagtagaggttaatagggagatagccaaagtttttttttcgactttgataccattttagaatttcggataaggtgcataaattttcatcacaaattaattagtaaatagaatagtagctcattcatcttgtataagttattttatttccacacattagcaatgcgagactaactctaatagctttaataattttattgaaaatcgtacgaattataaaagcctcctcatagtggtgctaggcattttgataccccatatcaatgctcttttaaaatagataaatgctaaaggtcacttatgatgcctagcactagggctgggcatccgatccaatccaatattttttttccttattcgatctaattcaattagacattaaaatccaatccaattactaattggattggtcggttttttaattggatatccaattacatacctaaattttaatattaacnnnnnnntatgaagaaaaatacgtaaaaaataaatatcacaatgtatttaagtttaatatactccataaatatatcatcgctacaagtgtaatgcaactaaaggtttgaaataattaaaaaaataacattgctaagtaataaaatataataaaacatcatgaaaaaaatacacaaaataattaagtgttataaatttaacacaaaaaaatccaataaaaatatatttaacatatatattatattttttattatataatttttttaacacatataaatctaattggattggtcgatttttcattgaattttgaaaatgatatctagtaaccgatccaatctaattagaatctaacttttagcaatctaattcaatttaattgtaattagatatctaattttttgtaattagattagattgaattggattgaatgttgtccacccatacttaacactcttatataatgtcgttgttagtacaatttattatcgaatatcactaattttatttcaataaaattataaaaaaaaagtactaactaattataaattataacctagtattatgcaccatagtagtccatattaatactctttaaaataaggtcatttcgtcaatcaatggaatagaattattccaacgttgctagctcttctattatttaatttgtttattcattttttttaatggaaaatgcatctttattaaccatcaaaatccgctaccaaagaaggtagcaagtcgaatggagcagactccatatcgaagatacaaccaggataaaatatagaagctctagcacagttatgagctaccatatttgctgatcgtttaacaaataacagataaatagttttcaattctaacaatagttttttacactcatgaatgacttgaccaaaaagcgatatcatatcaactgtacttcttaacgcttgaaccaccgttagacagtccgcttcgagtgtaacatgttgacaattatgactcttaatccaactaaaagcctcctgtatgccaatggattcagccacttctggtgtaaccgaaccagaaaaaagcatcatcttcccttcaattagcataccataatgatctctagcaactaaaccacaaccatacttattaccactgtcaaagaaagcagcgtcaacatttaccttgatattgttcacatttggtacagcccaatgctcagctccgtcattcacttgaagactcgaccatgtctcaatacgagaattttgagcatttttccactgtccaagctaacctgttgccaacactacaatgcttgttgcagtaacagatttcttttgccacacaaaatcattacgggcgctccaaatagcctaacacagcaccagaatcaactgcttttttcctgcatcagcagcagcaaaagagccgatacaccaatctaaaaaacttattgtgtaatacccggaattaagaaatggat

SEQ ID NO: 112952 - DNA, 790 bp, Cannabis sativa
agagagagagagagagggtttttgttttctttcatggcaagagaaaatgaagttgctagatcaaaattatagctttataatagttggggaacacccgacggtttaaaatcgtcaggtattcttcatttaaaaaattgcattaaactcttaaaaattgccgcggatagcctcgtgagtgttctaagctgtcgggaatacctaatttttcctgacagtttaaaatactcatttaattttattagcaatagtttccaaaaaaatatgttgaggagtgacaggaatgcccagttttgtactaatgttttttttaataattttgaagctccttaacttattgtgattcatagttacttctggtcactcctacggacttctatttcagatcatgaatcttactcttctacagctaatattgacactcaagcacttcatgaagtacatccaacaactcctttgtcatcttcacaggaccctggctcacttgcctccagtttttctttaggtattgcatgggaaatatactatgattttgtctagtatgatcatcatggttctgatataaaccttgatcagtttcatgttcaagctcctgaaccaaccatctctattctctcaatcctcaactactgatgttcaatagcctgcttatccacctgctctagtcacccatcccatgtgttatattatttataataatttaatatatagattaaatatatgtaataaactaataaaatgtaacatatgacaatgtatattagttgtcatctttttgtaatatttggggagt

SEQ ID NO: 112953 - DNA, 2890 bp, Cannabis sativa
ggcttcaactgctcgagcaagaacgcttttaaaacgagctgcgttgtctggtgtggtgaccatggtaatcttggcaccgcgttctgctaacattctggctatatccaccattggaatcatatggccttgtgccataagaggaaacatgagaaagtgaagctgtttatcttgggaagccattgaaatttcaataggaaaagaaaaaaaattaggtaaaggagatcttagtaccagatgtatgtgcttctgtttgtatatagctcaaagatattttcaattggtcctttgtttgtatatttatatatatagctccaagatatttactttgagatgtaacgcttcactcagaggctcacagccataacagatttgtgtggacagtgcttacctcatctcaacatcaatccaaaacaagaaagaagtttatttttcttttcgttttaatttacaggactaaatttattattttttcttaaaaaaaatgaaataacaaatatcacctcaacgagcatattttaaatattaataggctttccttggcaaagagattactaggattatatacatcgacattggaggaatacataaaaacatgaactaacaaaaatatagagacaaattataaggggtttgtagtctatgttccatacatcaactagacttgatgtcattttcaagcgtaagcaattgttgttttttcacatattggattaatattcccatgttaaggtaagaagatccaccttcttctattgctcttttggccatttcaccaagctctcttgctttctttcttctttcctcagcttcttttcctttatccattaacttgtctatagcatttttcacattctctcttttcattaccaaaccggacttgtcctccaaaccccatgtaacagcagcctcaactcctacactcacaccactccccaacacctccacaaccaatttttcattgaagaattgctctgcgaacaacgggcatgttatcaatggcacgccggctcctacaccttcaagagtcgaattccaaccacaatgtgtcaagaatcctccaattgcaggatgagacagtatcatcaactgtggtgcccaaccatgaattacaaggcctctcccctttgtcctctcttcaaatccatcctccgaaatccatttctccaagcctactgatttctcacctcctcttaccacccaaatgaatgggctctctgatgcttctaagcctaaaccaagctctttaagctgcctttctttgagtccacatatgctaccaagacaagcataaatgactgagccttgttcccatgagtccagccatttcaagagcttgtttacatcaatggaagccatttcacctctctcaaccttgtctaactcagatttgttataacccgaaacaggtccaatgcaccatatgttgcctcccttcaccctcttatactcgttgacataatattctccttccaactcttcaaaagtattaacaacaattccatctgagacagcttcagctgctctcattttgtttcgagcctcagtcaagtctgctgatcccggatgaagattctcaggtagtttggctttagtcaactccacactatgaggcaatccaggaatcaaaaagggctctgaattagaaatattctcaagtactccactagtctctagtctattcgtgcatgagaaagaaaaacatcccattccatcaaaaaagatccttggaatcttaaacattcgagatgtttcaactgtccatccaagattcttacctgacactatgcaactcgctggaggatccaagctttgaagcaagttctcaaatggaatctgcaacatgttagtggcttcataaaaattcttgatcaagttacgtgtggatagctgggacatgttttcacacccttctggtaagccagcctccaaagttgggaatgggagtgtgagaatctggatttgaagattggactttcttgctctttcaatcatggatttgaatttgatggcattgagtggtgtggtgacaatggtgaccatcgtgccatgttgagctaatagcctagccatgtccatcattggtatgaggtggcctggagacattaagggtatcataacaaaatgaggctgattgagtcctgaatccatggatggtagtaccttaatcagaagtagttttctgatgaaagaataaacaaaaagtttaattagtaaatgagaaggacaagcagaccaaagagccagaagcttggttattacaacagtttcaggggaaaaaaacagagttgcaaccaaaactaaaataacaacgcaacttagtagtatagtgtttattttttttcatgaaagcaggaatggcaaattaaaatgaagaacaaaaaaaaacctgcctgtgatgatcaagatgagttgttgagcttcagagttagaaaaacaaaaacccaatacagtgtggagtattagataaacaacaaaaagggctaaaacaaagaattggtataatggtcaagacaagctttgaacttcaatggcttcttaatatattaaaaatggaaaagacgaaggtgctaaggagttttccagtttgttgagagtagagaaacatgtataaatataggaaaaatggtattttttttaattttggactaggagtttttttatttatataaatttttttttttcgaatttgtcttatttgtaagaggtatgaaatcactaacttattctatgaccaccttctaaatattataaatgttattcttattcaccgcttttacctaaatatttgacttactttctgttttcgaaaattttaaaatattatcttctattttacaaaactgctaaagctaactctccatttgagataattattttttttattgtaacc

SEQ ID NO: 112954 - DNA, 2160 bp, Cannabis sativa
agtggcacaagctttacctagttatacaatgagtgtttttattttttctcatgatattagtcgtgaaatggagcaacacatggcaaagttttggtggaaagcttccaattccaaagagaagggtatccattggatgtcttggcctaaactgtgtatgcataaaagtgtcgggggtatgggttttcgaagtcttagagatcacaacatagctcatcctagcaaacaaggttggagacttcttgttcgtcctttttcattggtatcgaagattttaaaggctaggtattaccctcatggctcttatctctcggctcacttgggtcataatttgagttttgtttggcgtagtattcgggaggcacaaagcgtggttcaaaatagagtaaggtggtaggtgggggatagccaaaacattgttgtaaaaggagaaccatggctgcctttgtttgataatccttttatcacttcaactcacctagctcttgacacgactgtggttaaaaacttaatgctcctttaaggtgttggttgggatttggagctattgaatgacctatttaatgatagggataaagtagccattctagtattcctctccatcaaactgaatgtgagtgcctattattggtctcatgaactaaacgacatgtatactgttaaaagctgctataatttgtagtaaaaattacatgggcagtggagcattacaaccgcattagatttttggaacgaattatggcgtttgaagatcccaccgaaagttaaaaacttggtgtggagaggatgtacgaattttttaccaactatggtcatgctcctaacaaaaaaagtagatgttaacaatttatgcccaatctatggtcttcatgatgaaacagctatgcacatttagtcacttgtcctctggcggcacaatattgggaaagggcaagagttacgaccactttaattgctggtatgaccttgctggactagtgtattagtactttccatgattccaatgccatgaattgttgcctcattgctactctttgttgggtgatttggggtacgagaaatgacaaagtatggcaaaataagccaaccaatgcctcgtatctttatgcatttgcggttagctactggtttggagtcttcacaaactggtttagtgccaggtgatggtgtcgagcggtggtgtgcgcctaatgctaatataatcaaggtgaatgtggatgcatcaatctatataggtaattaacgttatggctttggtatatttccaggaatgatagtggttttctagtctagggagcgacaaggtcctgttttggagctattagactagaacttgcgaaggcaattggtgttagagaggtgctaagttggatcaagaaaaaataatggcaatatgttattcttgaaattggttgtctagtagtagtacaagcaattcgaagcctcattaaaataatttctttatttggtcaagttattaaaaaatgtaaaacttatcactttagaacatgtttttatttcgtttattaagcgttcaacaaacttaataactcatttctttgtgagagcttctagtttataccatgattgtaattttcagtataggagatgtctcaacttatttacttccctgtttggtagcagaatttaaagtttaataaagtttgattactttctttaaaacaaaatacaaaaatacataaattttattttttttgagaaaaaaaaaaattggtgccgttatatattggttgttgaggtggtgtaatattaaagccgccccaatagaccgaaaaactctacaataaaactgaaatagaaagcagtgatgagattgagattgcgtggaatggaatgtttcttttgtaaagaatatgcgtttatgcctttctttctctttcttattccatagaaaatacaaggaattgcaccaatatagttctacatgtcacaataccaacaaaattattgggttttaatttagtttggtatttctatctaattatccttatttttggctatataatgatcctttttttttttggctatcattatgtttttattttaacattttatttttacaaaaatttagggcccatttggaagtactataataattttaattatttaattaatataatatgttttagtcctttttttttt

SEQ ID NO: 112955 - DNA, 2691 bp, Cannabis sativa
tatttttataaatatttgtatgtggactgtataaatgtttaatgggccggcccaaagtatttttgtaattttttttccttttttgtatttttttgtttttttcccttgattaaacgcctaaaaaattcaccatctagagagattttaaattaattccaactttggatctctcccatttaccaacctcaccagcctaatgacttattataatttttatgtatgctatatttacttagaatctcacgagataagagaatggagaagagaacaaatatagttaactttatgatcatatatatatgtagatgtatattgttaacatattaatccaagaggcaagatcatgatgttatgatttatcttctatattaacttatattttaggtgttctggctggtttgaggcaacactaaatgaaaaaaataaaaaggaggggtatatgagagaatagatcatataataattgttgacgcatggttaatatactattatgcccaccttctttattaacctttttcaatttgttttctgtttaatgagaattaataaacatttattagtatataccaccatatataatgattgcaattaaacttataatatataaggttcacctgctccaaagaaatattacttcagatcgatcttggtattttctttgacttgttttatttactaatataatataaaaaaaaaaaagaaaaaaagtatacagtctgaacaagatgatataaaatgtacatctctaattaatgtgaatatataagtgatattgataagataccatgaaggtgaatatatataacaattataagttggccctttgagcctttaagctagcttttttttctattttattcgtcttatgatcatcatgaataatattgtacatttttttttatatataagcacatggaacttatactgttcctaatttattatctatggtgttcattaattattaccacgtgcacgaatggaatctttgtcgagtacagcggcagaaaattttataattccattttagatttatatttgaattttataattcattttaactaaaatatcaaagataaaaataaagaaccaagttgaaaaataatatactgtatatttatacactgattaattttatcatgaggtgtaaacttagaattactaaaaaacagtatcaagaacaaagtacacataatatataaatattacattttttttttaatacaagaaatgaataattttcttttacaagtggatatcaaagatctaataatttccattagcatcccatttagaattgaagaataattatatatataccttattattaggtttcaattaagatccctcaactgatacacctctttaatcccaccagatcttacatattgataacaattaagaccgaaaatttcaagattgaagatgatcgatctccaactaataatttagcaactttactgcctcgttctcacatgtacaattcgtattctaacaacctaacaatggcgagaaacagaaaaaattatctattaattatatagcaaagacaatgttattctcgaaataatttatgataaaatttgatttcatcagctaatttgctttatatatatgtagagaataaattgtatattatgctctaaattcattttaatcataatatataatattttatttgttatatatatatgtttaaaattattgttttcatggtacacaaaattgtaaattaatttttgatctagggtgtaaggtaaaaatttgaaataaaatatataaagtaaaatttttgtgaagatcacttgaaggttgaatttttgtaaagtttaatacagtgttaatatatatatatatatatatatttatatgatcgtggacttcaacaatgattatatgaataaaaatgtctttccaaattgtagcattggtcgtttttggaaaccaaataatagaaacatgagaggcagaaaaaaaagacaaagtttggtgattatatataagtcatgccacggatctttgatattaaaaattggatattatcaaaaaaaaaagtttgatgatcagctgatcaatatgttgacaaaattgaattaacaagctaccaggctttcataattgtttaaatactgtgtttggtgtaataatttatccaaaaaaaaaaaatacttcaaattttttttctaaattgagccagaaataaaggacaattattattattatttttgtgtagaaaaaaattattagaaacaattattataattaatgtaaggttaaaaattattgtatcttatttttttgattgattaagttttggcacttagaatattttaatgtaattgttagccatgcatggatattaattcgcattaaattcaaaagaaacaacacaatgagaaaccctgcacaaccgaacaagatcaattaattagaaaatggaataaccagagactctttcagttttataataagagtcgatctattaattgggaaacatcagtcataaatatataaatatataaatagatagatagatgtattaattgctatcactcatattaattgttcattcctcatctccctttggtagatttatttagaataattatcttttttaccccctgtacttatgacactatactattatgccccttaatctattcagcttgttacaaatagtccttgtataatttt

SEQ ID NO: 112956 - DNA, 8888 bp, Cannabis sativa
ctgaaatgagttttcagggtccgacgaagcttgtaaatctgagtgtcttctgattagtttcatgcattttattatccattaagaatacaacactgctagacttttcacttttgaattataaaaattattgatttgccaaatagaattatttaaagttatttgtaaatttttatttatttattttgaatagttacaaagtttaaataattatttactacacggttttttataaaaaatcatgtttaccacacgtattaagaaaaaataattacttgttcaataaaatattttaaacttaatttttacattgtaaattatttgaatttttttaaaaatttacaagtaactgtatataatttcaacatatataattataaaaaataattaaacttaataacttgggtaaatgctcaaagtttagtgaaatacctttttaaaatggtatactataaatttattttttttaatcttcaatctattttttaaagtgatatttcagttaatcaaagaaaagaaataaaaaataataaaaaaatgtactatagatttatgtattttttttaatttattttgtgaaatattatattatttaatcaaagaaaagaaaaaagaaaaataatactcgtcattagtgtaaaatttctctaaaaataaaaaaatcattagggtaaaaaaagaattatttttttttgaaatgaaatataaaattattaaaaatatttaaataaatgattgctacaatatttatcttttagaaggaataattgtttaaatatatattattgataaaaaaattgtttatttataatagcccaataaatatcgaggaattaaaaagactagaaagaaaggggtaattactgataagaattaaacttaaaaagttgagtttttttttcttctaaaaacataaaaagagattatgagaagatgagccagccagccagccaggctgtcaaacgaaagacattgaattgaaacgaagaagaattgtagtgtctgtctgttcccaccgaaacgaaacgtcaaactggggcttctttctttgctccatcatcggactccccccatacccaaccaaccaccacccatctcaatatcttccactttaagcttcttcaaactaccatcactttatctctctcctcttttttcttaattccaggactaacgaacacccacatgggggttgcaacaatgggggcggatccactcagcgacagagctgccatgatgagagagtctcttcagaagagtcagaccataaccgataaagtagtcaccatacttggctcctttgaccaccgtctctcagccctcgaaaccgctatgcgccctactcaggtgggttccttttctctttgaatgtttggttcctcggaaaatagaaaagggtattaaaaaagaggcagtttttgagaagggttttgatcatgtgaattgcttgttttgttgacttgtcgtttactttcccaatggaagctaaacgaaagtatgggtctttcaaatcgtgtgcttttttttgccttttacactgatttatctgcatgaaaatagcagatcttggggaatgctgtgttattttgtttgctttattttatagctctgatattgccgtttatggagtttttattgggtttcctttaattctggacagtacagattagaactcattctattcggaaagcccacgagaatattgataagactctaaagtctgcagaagttatattggcacaatttgatcttgctcgtcaggttggtacctaagcttttcccgtgtattacttgtctttagctttgattattttcttttttgatgtttggtagagatttagctatatcttgtttgtttagttgatttttattctatctaatttatagtggtattttattcaaatacacgtatagaattgcatattggaagaagatggtgacaaattaatcttatactcaactgggatgactgttaagattttcttcagattagttatcataaaccttgctgaatatgtctcactggaacattaatgtgattatgtgattgagatggcaaaagtacattctttgtagtaactattcatatttatttagcttgggctgattgcaattgtgctctttttgaggtgaattgaatgttttaggcctctcatgttaatctaatggtccttccagtttttatgtttgaacctgtagggttatatagaatgatgatatatatttttatcttaaagatatgtattctaatggataaagttataattcaatgtcaccattttgacatgtaaacgctcttttcgatgacgttatgatatcattttatgagattagttgtttcttgtcaaatacacaggcagaagcaaaaatactcagggggccgcatgaggacttggagagttatctggaagctattgatcagctaagaaagaatattcatttctttagtagcagcaaaggctttaagagtaccgaaggggtcctcaaccatgcaaatggtttacttacaaaagctatttcaaagcttgaagacgaatttaagcagcagctaacatcttataggttcttgcttccacatttattttcttttctttcatattatgtttatagttatactacatgttagcaaggtttttagagttttacttgtttcttaatagtttatacactgtaacagttctttgttgtactaatgcaaaaatgcatgaaaaatttcatatttgaaatgaatgactacttaatagagagaaaaatggccatatttcagtgctggtctcaacaatgatgcatgtaaatttaactgatttagggagcaggattaatcttgtgtggtataaaattattgtactttgtttatccctgcaaacaaacttgatttctatttttctaatattttttctattctgaatttccagcaaacctgtggaacctgaacgattgtttgattgtcttccaaactcattacgaccgtcaggatcacctgggaagcatggtgatgctagtggcaatcatcacccccataatcattcagaacatccgaaccctgacttggaaactgctgtatatacgcctcctactcttattccaccaagggttttgcctttgctacatgatttagctgtgcagatggttcaagctggtcagcgacagcaattagtgaaaatttataggtaaacaagttatttggtctcgattattacacaagaaatattcttcttgtacctattatatgaaaagatgatgcaagtacaatatgtacacaaacccaataaggatacatcactagtgatggatgtactggctattgagattaattggaatgctgatgataaaatgatacttgtaaaatttgttgcaaacaaagatgtcgaatatatatggatttatacacacagatatatatataaatatatatatatatatatgtatatatattgagaaaacttttgcagactctacaaatttgcatgtacttaatgatgttattatctaattatcttcatagaggcaaatgcatgcattgttagacaagtcagaccttttttagatgtaaaacacctttttattcaatattgcagccttctttttgtgttaatttgtggagtgaaattgcatactatgccacttttctgattatactctgtttcaaactaaaatcaatgttaagtgtcaagacattgcaagaagtttaatacttttgcattctactcagggattcccgctcttcagttttggaagaaagtcttcgcaaactgggcgttgagaaacttagcaaggaagatgttcaaaagatgcaatgggaggttttggaggctaaaattgggaactggattcactacatgcgcatagctgtaaggactcaaaatttgatgaaactttaaggcttttttttgggggggcttaaaatatttaattatcttggacacatggacaggtcaaattgctatttgctggggagcggaaagtttgtgatcagctgtttgatggctttgattctcttagtgaccaatgtttttctgaagtcactgctggtagtgttttgatgcttcttagttttggtgaggcgattgctagaagcaagagatctccagaaaagttgtttgttcttttagacatgtatgaaataatgagagagcttcattcagaggtaccaaattatctttgcatcattatttttctagattaatagaatgcttattttattatatatatatatatatattataaaatataatctaatgcctaatgaaccctttgtttaaatttaaatgttaataaatgaaaaatgattgtattgtgtaatcatagtgtgtcgcatgtcagtattccttgcatacttttataatgcaattcaaccattcttgttgataaaattgtttttagtcatctaaagatgctgctagagctttgttacttggagcatgctcaccaagcttaggactgttaggagcagtcttttgtgttaaaatattcttcagctaaaacagaagagaaagaaaataagagtttgttttgcatgcaaaatttctaaatgtttctatgatacattattctcatgttagaatgcattgtgaaatttgttaattttcatccctgaaaatggtgagtaaaatctattctagataccagcgaacaagcttgcctgccccactataatagcccactataataggagaatcacttttccacctactatgggaagaatcctttatctgtcacttgaccatagtcaataaaagataagaattattacacattaggggtagttcaaatggttaggcatgtggctttgctcccatgtggtttgtggtacgaatacctctcaagtacttacatagcaagtgctatagtttcctggtcacaactgtaatactagtcacggagcctaaattagacataaaataaaataagaattactcggttaggtaatcagtgactattttcttgcaaggtcataatgccagtcatgcagaatcttatttgtaggtgtctactgtctaggttgatttgcttgcatgtttaggatacttttgttgcatgataggtttatttattacattgtctgaaatcatatgcagattgagacaattttcaaaggaaaagcttgtgctgaaattagagagtcggcaacaagtttgacaaaacggttggcccagaccgctcaagaaacatttggtgattttgaagaagcagttgaaaaggatgcaacgaaaactgctgtattagatggaactgttcatcccttgacaagctatgtgatcaactatgtgaagtttttatttgagtaagatcagctgtccttgctttccctatataaaagagaaatttttcaatgattctactgtttgtaaaagctgtcatatttttatgctgtcaaactttttattatagtaatttttgttttaacaatggaaagtgtcaatctgctttacttatgctttgaagtatctttttcttttactctaacatgatttcttaactcttacagcaaaattttagtttttcatttttcattgaaatgtcgacatggaatatctttttctttcatatgattttttatgaatttaggctttgcatcttgattaatttaaaaccatgtttgtgtaaattattaagagttgacatgcaatatatctagcttggatggcttgacctatattttttttcttatctgttggttgatgtgtaattacatgtctatatgtttgactgaactgttgttttgcagttatcagtcaactttaaagcaacttttccaagaatttgaaaatggaggtgaacctggttcacagttagcatctgtaacaatgcaaataatgcaggcccttcagactaatttggatgggaagtctaaacagtacaaggatccttccctaactcacttatttcttatgaacaatatccactacatggtcagatctgtgcgcaggtttgtctctggctattatgttcagaatctctatatgaactttgcaagcttgatttacttacatagttctgtttcttttcttattttattttagatctgaagccaaagatttgttaggagatgattgggtgcaaaggcaccggaggattgtgcagcaacatgcaaatcaatacaaaaggatttgttggggaaaggtgcagttttctttacccaatcattctgcagttctaattatgtatttttttgttataacaaatctgtgttataatttaccttgttgttattcttgcacactttttaagtatgtaattattcattcattcattgctgggtcatgtctgctgcttgtgaggcattggaattttgattacaatgagcagttataattgctaatgtaaacatggtgcacgtagcttgtgtgctttttccattttatgctggaagtagtagatcactgttactatgcttttgtcttttggttggacaaagaattcagactgttttgagttctcatcttcttggtgggactagagtgcatggaggctatccatttctagcttgttttctattttgtcaaaattatcacgcacaaatcccatgactaggatgttggtgatctttgtcaaaattaacacttttacatattgcaaatttgtattagggggaataaaatctcttgtttggaagtataaattattccttagcaagaatgttgccctctaaatattgtcttcaaatctggggttttgcctgtgactcactgatggtgctcttctctttttccagattctgcaatgtctcacaattcaaggtctgacctcatctggtggtagctcagttgggggtgatgggggaaacagtagtggtgtttcaagagcattggttaaggacaggttataaatgaaatcaaccttgaaatacatcatatattaattgccttttccatgaggcatgcatggtgctcataatgcttttgacttatctagagaatgtaattgattgcaggttcaagatatttaatatgcagtttgaggaacttcatcaaaaacaatctcagtggacagtgcctgacactgagctacgtgaatcactgaggcttgctgtagctgaagtattattgcctgcctataggtctttcgtaaagcgattcgggtatgctctgtttaaatgcagacattttgttttgagggaataagtacaagtatttccaccttgcttacatgcatgcatgcaatgaagttagatttttatatgtgaatataatatcctgcatgtacaaaattcatcaaagtcatatgaactcttaagacaattatatccacattgctaagttggctgagaagatatgcattgtttttattatttgattttcaggcctttggttgaaaatgggaagaacccccagaagtacataaggttctcagcagaggatcttgagcgaatgttaggtgaattcttcgagggaaagacattgaatgaaccgaagaggtagatggaggtctagttggtgaggcagcgctgacagtggactccgacttccctgactggtgcatgttttatcttttattcggagagttcttttgcattattccttaggtggtatttttatcatggtaaggttgcggtattccaagattcatccatctaaattgtttgctgagaagggcttgtgttttgataagtataggtaggtgatgggtttactgctctgcggatcacaaataaaaaggggtctgttctttcacagaatgctattatagtacctccctctggtgtgtggctatttattgtttagagcaagtgtatatctgtattaataagtaggtggttttgtatattatatttttgttggtcaaaagtttcatgaatactcgtaagtgagttgttatatcgaaatcttgctcgggtgtcattgatttgtttgacaagtggaccttattgattataactttagtttttggtcggtcataaataaaaatagaaatggagaatggagaatttgagttctgttgtttgtaagaactacgtacattgtgtcacttgaagtacgaataaaaagagaagtgatgctttaagaatcaacatcatataaaataaaaaaccttaataatcttaagcaaaaaagaaaaaagaaagaatcaactttaatagtcccaagccaaaagattaaaactggttttgaaaacttaatgtgagtgtccacagtatttttaaaaagtaaatctgaatatgaagtaactctgaggaaatatatactctctccaatcttgagatataatgagagcgtcatctataaaaatgagtatatcttaaaatttttaaaaaaataaaagtaaaaattaaaataaataaaataaaataatatacaattcaatttcctctaatttttaatataatttttttaatttactttttttaagcaatattatatactttaaaaataatttttcattagaaaaatatctttatttaaacaagaaaaaatgtcataccattcttttaaaagatacaacctaatattttctaaaaaagtacagtaaaataaaataaaacagagaatatcataccattctttcagaagataaaaacaataaactttattttatttcattctcagacaaaactaaataaaagaattttagttatattactgtattttattagtgttctccttacaattctaattctttatgatgatgaactaaatacaacctataaagtaaaaatgtatacaacataatttattttttcactttcttttacattctcttaactcttatacaaatgttttttacatgtgtttcaaaaaaaaaaatgctttttataagggtcgtattgtattaaataataaataacactatgtttagataaaacaatgtattacgactaaattttttaatataatgtatgtggtattatttaatacataacaaatggtccttgtattataatatttacaaag

SEQ ID NO: 112957 - DNA, 2020 bp, Cannabis sativa
tgggcgaattcaggggcaacagcttggcttgtggaagaaggatccttccatcctcatacattttgagggagaccatgaagagtgcctgcaaagggttcttactgtcgacaacaacacatatctaaaaaagtacatttatgaagataacaacggcgagtcagacaaagactcaactggccgtacagaggcaagacactcagcggaggcagtggcttctttcgaaactacctcccaagatctttagggtcttccccaagacaacccaacagacacttcgactctgactcaaaaggaacccctagtccaacctaagagctacctagtatttcgaccaaggaagtccttctaagctaattccaggagcagcacatttcccaaattgggaaatgagcttcatctcataattcctccctttcttcattatgtttcaactttggttttgcgaaaataatttagtgatgccctaactgtggggccgtttgtaacaatcttagagacatttgttgtacctatgcttgctttatttcaaggtttattacatgcttctttttctcgcctttgtttgcttgatattccaactgatagatcgatatttaagactttgcaaaggttttggttctaacagtctaaacatgatgctttatgatctttctaacttaatcattgtcttgttaaaccttttgaagtatgttacttcatacatcttgtaggtgtcaacttttgttaaagttcctcgtcatggcattcctcaagcttttggtgaattaaccttacccaaacgaattgcaaactatgctctcagatcgttacaagagtagaagagtttgcctttcgtccacattttccccagttaactaccttaggcaagatatcacaacacccttatgttatttgaattagtgagagaggggggatcaaaagagcaacagagtcctagccaggttcttttcaagaagacgaggctggaattgtgttactattttaaacgtcacttcttaatcaaaagtagcaatgctgattcaacattcagacagattttttgtgagttgtaatagtagagctgctggactgtaaagaatttccaagcgtgctttttttcttacttctcatgggaaacttgtcaatatggccaacaagtcgaagcgactgcaatggcattcaagcgatgttccttttgagggatcatgttgaagccatattgggtgtgctttttgttaggaccatttcgaaccctttagtagtcttcaagaaattcctccttccaagaaagagggttaaagttgtactagggctcaagtgatggcttcacttccaagaataaaggtgaaaattaaactggacatataatagacttcaagcgattcctcttccaagaaggtaggttgaagacgtaatgaagctgttatccgtattttatgcaagacatgacacgtggaattttaatggaaaaggctaaattggtcctccgtgagttagagtctttaaatgaaacacagaagttgaagggtctccccaagcttagagccatctagggaaaaagacacccaaaagcttacttacgacatcctctgcttctcatagagtgggataaaagtgttgcacctgaatcctgaagggattaacgaggaagctcattttgagaggctcctaaataagctctagtaggatcggatacagatatcaaccctcataggtgattgtggataacaacttttactatgtgccaggttaccaagtgcgcgcatcaccaccatccttttacgatacgaacattatagaatactgcttagaaagaagcaagcgtagagtaacatgtgtttgtcactttagaaggttgaacctttgcatgacacatgttcgagtggtacaaaatggtccccattatccaacagtagtgtgcacgggcataatgttatccacgagaccaaccaatcagctctacattgtatgtaatttagatatataatttatatatctataaatatatttttatatataattttttattaaaaatttatat

SEQ ID NO: 112958 - DNA, 1486 bp, Cannabis sativa
gacgctcttccgatcttcaacatacttgtgagtagatctaagatcatggtaaaaatatcacaaaaggttaagttaggagttgtaataggagtgctatggtaagttgatattagatttatcagggtatttagaggtactcggggttgacttaatgacctaggattagagatttcttagtggctaagaaatgactaaaaaacttttattaattgagttttattatcatcttactattattatcgttattcctactattattattatccttatctcattattatcattattgttgttgttgttgttataaataaattagaataaatatataataacttagaaacccaactctcacacaccctcactctctctttcgtgtgatcaaaccaccaccaccaccataaattttcttcttcaattcttagcctagagcttatattcttaacccttgtagcagctaggtgttggtccttgaaggagaaaagcttgagttaagagatttggtcttcctttattttgaaaagtaaagattataagagttgactttgagttttggagctgtagcgggatctgtgagcttatggttttgtgtctggggtgtcatgggattgattttgatgtttacttgatggttttgttgtagcttttaaataggaaccaagtttgagattttgaagctcaaagcatgagctttaatggtactttttgtttaagggcatgattttgagttctgttacgtagggattgtagtacggatgctatgtaagtgttctgtaaagtttggaattatttagataggtattggtggagtttcgagatgtgtaaaactcagggttcccatttcctttagaaaatggtccaacattttggaaaaatggctaaccttttttcctaccaagaaacgccaaaaatagttaaccctttttctaaatggcttaccgtttttggaaatattcaaaacccatgtttcatgttttctcgatattcgatgtaaataccacttagctttaatttaaaaattagcagataattagggtttaattatgaaatatgtatattagttatgaattatttatttatggagatttatttgaattaagaatgcattttgtatgtcatatatggaatttcataattttgcataatttgtgcccgacaatattgaaacgcggtgtttgcctattagaatcacatcctagtatttttagtatagtggggcaatatagttagacattgggaatgtcagaattagtcggaattctagaagtgaccaaaatacccctaagtgaccttttgtgactagttagttttgagaaggggcaaaatagtcattttgcctaagtaactttttgtcttttagtgagtttaatttgggtttttattctgaatattaaattaattatatttgataaaaaccaaacttttaattccattttataaaaaattagaaattaaacaaaaaaaatcatatttctctctctctctctct

SEQ ID NO: 112959 - DNA, 1433 bp, Cannabis sativa
tctgggtattttgggtacaatacacataaaaagaggtatgtttcaaataaatataaaattagaggcaaatttggttaattgattaataaaagaggcatttttcaacttacccccagattaagcctctgcttagggcccctagctcaagggcccaaaaaaattgtccccttttaaaattacatatttttttttttactgattttgaaaaatactacaatttaatttctaaataagggcctaaaaatattattttttcctatggcccactaaatatcaaggtcaacccaatgtctatctttatatacccatgatccgtcccatttctagctaatgtgggactttgtttacatttccaacaatccttccctcaaacgcaggactacatagcctcccctcaaaagatcttccatcttggatcgctgttattacaaacaaaacacgtcgcctgactttcattgtcaagaagacttttaacacaaagcaccaaacaagatctccaatctgtcttctctaccaattagtgtactttcctccaatacctcaccaatacctcgagagttttttgcacattactaggctcactctgtcggattagagcacgctttacatggagcctcaccaatattgctcattactaggccaactccgtcggattaaagcacaccgcctaactgaacacatccacaaacatcatgagagtacatcaatacacatcaccttaagcaaattcagaggattcattcacatggctaatgttaggatctggctctgataccaatttgtcaatgattatcagacaccattcacctccattccaggtatgatattgtctgcttggaacctaagctctcacgattttgttcttggacaccttcccaaaaagcctcataccaatagagacatgtccatccttgtatactcattatccttgtcatttttcgataatgtgagactttatttgcattctcaacaaaactctaacaaaaatttatttagcttgtccaaataattgtgccaacaattaaactaaaataattctgatatatatattttgaaaacaccacactatcacaccatctcatctcaaatatataataatatatatagctattaattaggattatattttatttttttgacatttataaaactatgttcaaaaaacttttaggccattaaaatttatttaaattattaaatttaaaattttctaattaattttattaaaggtcgtgtgacgtaaacagaaattcaaagaatacaaaaattttagtacttgttaaagttcacaaaaataattttgtatacgagtaatctctatgatgagcatcttaataaaaaagctaattagtaattttttcccctgaactttgacatgtagtaaatcgtgcctcctgaacttttttggctaaaaattctccccgaactattga

SEQ ID NO: 112960 - DNA, 4570 bp, Cannabis sativa
  modified_base (4461)..(4470): a, c, t, g, unknown or other
  modified_base (4519)..(4522): a, c, t, g, unknown or other
ttctcgtgatgggaggcggttgtgcagggttcgtctaagtctgtggtgggagcagcggcctctgtcgtctgggctccatcgttgacaatccgatagtgtagagagagagatagaaccaagagagagagagagagagagattctcgtgatgggaggcggttgtggaaggtttgtctaagcctgtggtaggagcagcggcctctgtcgtctgggctccatcgtcgacgatccgatagtagagagagatatagaaccaagagagagagagagagatagagagagattcagaggaaatggagggcggatgtaggtatatgttaggttttatatattggtaggattttttaaaatggcccgtagtccaaatttgtcattcaaatgaaacagagaatttgcgccagttgttaattgacgccaatgccttaaaaactgatgtaaattgtgcttcacttaataattgacgcaaaattcaacaataaatttattgtgtcaattttattatttcgccgacatcaaaactaataccaaaaactatatttatagtagtgaataaatttatgataaattaagtgatattactttaaaataattataacaataagtttataataatttttttactgtcaatatcagtcctatccttatgaaccatatacatccaatttaatattctactaatgccttggagagacatatcccttattagaagtgttaataaattttattattgattatcacgttggttttaaatctagtacacttataaactatcatacttacaccaagttaaaggaaaacgtccattttttaaaaaaataataatcatatcaatgcacatcttaatgagtgttcgcccctgttttgctttgtaacggttaattttctttcttttcttttgcttttcaaatcgtgtgtaactccatcccaaccgcccttcccaccttcattcccatctccgacgccatgaaccccactctctatcagtttttcatcagcatctccactttgaaaattctctatatataccgactcttattctccttcactcacctgcaccctaaaatttctccaatggatagaatcatcaaagatatgtcttcccaagttacacttactaaaaaagaaacattgtccatgaaattggtgaatcgggtacctctgctatctctactatttctgagtggagcgtgtttgcttttgtgcttacacacaaaaaaaccaatccatgtgctttcatcctccagatgtctgaactttggtccaagcgatttgaagttaccatcatagaccgcaagggttattttctggttcaatttggttgtgctggagatatgcagagaaccctttaccaccaaccttggcacttcaacaatcaacccattattttttctacaatttctaactttaaaattcctattgaatctaactttactcatcttcccctttgggttcaggttcatggtcttacttttctcagtgaaagcaaatatctggcactgatatgggagaattcctagaagttgatgatgattctctccttgaaggctgggcaccttttatgcgtatttgggttgacattgatgctacccagcctcttctccgtggcacatttctcaaattcaccaacatgcctgatagtctttgggtgaacttcaagtttgagaaacttctagatttttgccacaaatgtgggcggtttggacatgcatatatgagtttccttcaatttctagaagtagaagataatagtggtgatttatcactcccttatgaagtcttgttgaaaggggatcctcttccccgatctggctccggtcgatctttgcaagaaaacagagccaataatgtggcatggcctctgcttactcgctttgtctgcaacaccattagccaagccttgcaacctccacaaaacaccaaccctgcctctactcatcaaactaaccctatcaacaataaaattaaccttgagccaaaatttctcaccataactgacccacattccactccctactattctactgctcctcctacccacatacctaaaccaaccataccagagaacactagccaaatccaaaccaatactactcctgtcctcaacaatcgtgaacaatccacacaccatcctgttgtcacacatacatacaaacgctaggccatccttattggcgactctttccgatccatactgtaacatggtcgtctacagccaattactgaaagtccctctgctcaaaccaatgcttactctatgattgacactattaacacttctgatgttttgccttatgaagcttctgaaaccaatgcagcctttgtgactgaatgctcatctccacattctgcaactgaagaagaagctagtccggcgggtgttgctcagtagccctgccactcgccatgattgctattagttggaatgctcgagggttggggaaaccaagcaaactccaccaattacgcctgcttaactctcaacatgctccccacatcttgtttctcatggaaaccaaattaccatctgggtctattaataagattataaatgtattaaactgtcctaattgcattgaagtgtctaggaaaggtcttgggggtgggttaatgtcgttatggaaagatccttttggtttaactcagctgaattattcaatgagccatacttctagctatgttcagagtgacaatggtcctaaatggcattaaactggattctatggtgctcttgaaacacatttaagacctgatactcggaaaatactcaaaagacttgttgatatttcccctcttgacccttggttggttatgggagacttcaatgaaattttttcacctgatctcaaatttggaggtgcagccagagacctttctttgatagaaaattttcatgatgctgttaattatggcaagctcatacgacttgaacacaccgactgtgatttcacctgtaacaatagagcccctggctctcttcatgttaaagaatgtcttaattgtggctttgttaaaacctcttggcagcaaacattccaatattcttgtcttcaccacttggactattattcttcggatcatcgtgctcttaaaactaaattcaatgtcatcaatgatactgtttcaaacacgaaatacagatctcggtttcgatatgaagcactttggttaaatgatcctgaatgtactgatataatggaccgttactggactgatactgatcacagtcccttgcaccaggttgttcataatattcagcatgtttcttcccatctttaatcatggcatagcaataaatatgggaacatgagaaggaacatagctgatgcacaaaaaaaggtctctaatcttcgacaatctgatctttatagccaggattttttttttctgaacttcaccaatctgaaaaaaaattcttgatgactttcttgagcaagaagagacttaatggcaccaacgatctcgcattaactggttgcaagctggagatgctaatactaaatactttcactcccgtgcttcaggtagaaaaggcaataaacatacaaaaaaaagttcacacagataatggaaacacagtcactgatttccaaggcattgctgatcagtttcatgcttatttttccaacctctttcacacaaatggtattgatactcctgccataaattatatcttagactctatccccacaactatctcctctgacatgaatgacacacttcagcaacctttcacaagtgatgagatcttgtctgcattacatagtatgggaagtgacaaaagtctggggccatacggtatgtctgttatgttttttacgaatcattggaacaccattggtccttaaatcactactgttgtcttagatgttctcaacaaccgcattaccccttcgtgtattaacaaaacactaatcaccctcataccgaaagtcaagcatcctacttcaatcactaaatttcggcccatcaatctttgcaacgttatttacaagctcatttccaaggctattgttctcagattgaagcctttcttgcacttagaaatctcagaatatcaaagtgccttcatatcaaaaagattgattacagataatgtctttgtagctttcgaattgctccattgtctgcgaaacaaaaccagaggcagagtaagttacactgctcttaagctcgatatgagtaagacttttgcaagagttgaatggcattttgttaaaagtgtcttgttaaaaatgggcttcggacatggccttgttgatcttattatgtggtgtattacctcaacaagctattccttcctcatcaatggtcatgttactggacatcttcagccaaaatgtggtattcgacagggtgacgcactttctccgtatatttttcttatttgtgctgaagcattttctcggctgcttcaatctcaggaacgacaaggcgtgcttatgttgggctttatgccctaaannnnnnnnnntttcaatgtaatctctatcttttaaatatcaataaagagacaaaagtannnncatcacttatttaatgtgtcattcggttcatgttatcatttatatgtt

SEQ ID NO: 112961 - DNA, 4556 bp, Cannabis sativa
  modified_base (33)..(33): a, c, t, g, unknown or other
cgctcttccgatctagagagagagagagagagngagagagagagagagaaggttttataatgcaaatgctgaagcgaaaaaacatttgcaatggtctagtagcttcctagctagagaagaaaacatgtgatcaatggcgaatcaatattagccactagaattgatgtttcgaatgattttaatttggtaggcacatcataaaaatacgacatgaaaactatcattgctgtcaccaaccaaacaagttgatgttgtgtaattgaaacagctagccatttcttataatctctacacaactcaaacgaacagcggtagataaactacttatatagaaggggacaagaaaattgagcctaggaataaagaacctcaaatgatagaacttacaccactcgagaagccatttccaacaccttgattctgctggttgaagcatgaaactgtatgtgctacattaaaaaataatcccaacccccacaaaaaaaaggacaaaaggaaaaaagagtcaatacattccttatcacaacctctactaataaatggtcttggtcagttacctcccaatgctgagttaatcggatcatttggatcaagaagttcatcccattcaagtgtattaatatcatgtaggctctgctcataaattttgtcagttgaagtgttcccagactctgttgatccacagaaaagcaaagggtgagaagcactgcagaatcacttatttaaggggaaccaaaaaaaatgactttacattataggaggactacttcaaattgatcaaaatcacattataatgcagggttatattatgaacaagatttgtttctataagacttcaaaataaccagccaagacagaaacactgtatagttaagtagagagtgcacctaaatgttcttctccagcgtcataatgtgcatttttagtaccagaatcaagttcatctgataaaattcgagcatgtggatcaggcgaagaactagaatgtgaatatacaggtgtatgcaaaggagtgattggagatccctgcgactgtatcataatgaaatcagagccaaaagtaaggttaggcacatagtttagagcacagagcaaaaatgacaaaatgagtctaaattgggtgtttcgaatagcttattctgccagctatgagtacatccattcccatgtaaggctaagatttccattctcaagacaattagccaaagaaaaaattattttcttccaagccttaagaaccttgcaccaagagtgtacagtttttttgtatattaaattagtattactagtttcattatactggacttctctctattaatttaaaacaagttccagtgaaagttattgaattattgaagtaacataatactgccatataaaaatcaaaagaagaataaatagatatttactcaattatactttgaatcaactactgataggctaaaaagaatactaacctcttgtgtttctcgataatgaacaaggacaatgtgctctagactcctggaataaaattaacaatgaattttacatggtactgaactgatagagtttgtttacacgagacagtagactaatagatgaagcacaaaaattcacttacttattaagtagccaataacacctccgaacaaaggttggggaatcctggccatgtgcatagtacacatgtatcttttcttcattaccaacctgtacagttgcaaaaaaatgaaagaaggcaaatgaatgtataatcatagttttctaatgagggaatgttatttcaagacgattcagtccatgaaagcaagactaatgtcaaccaattaaaaaattagtaatcaaaaggcccctgctcagttaaatatccagagatcaaataggtggtaccgaagataaacattttagagatacaatatatatatatacacatacatacatatctctctgtacaaattgaaacaagattttctaccaccagaacctgacaaagctgccccaacttgtaacctctcttaacttccaacctcagtccaaattcctaccaacctcagtccaaattcctatgttctaaactccacatcttctactctcacccttccagctgagggtatcactttccaaaaattaaacgggaagagctataaagtaatcgaatgcatgcctaataataagatacaaaaatggtacatagaacagctcacacaaacttctttttaacaaatcaattttataatcatccaaaacccccattaaccggaagtcaacttagactgggtagttagcaacaaagttttgaatgactagcaagaaataccaatcatatatgaacatagataagcccgtatagtcattatatacaaacaattgtaacaattcatgcatttggaaggccgatcatcagtagaaagatttatccatccagagatttaatgcatttttaagcatccacataataacagcaaacatgtcacaatagtaggcccaggaaaacaattctgtaaatattggaaaaaagagcatcatcaacccagtccgttcactactccatataacacgaatgagtaataggataaagataacatattgaggaagtaaaactcacttttaagtgttcgtgagcttccttaacagtcttcccatcctttttcttcttccagttatgaccatctttcctaaagttcctaagcatcttacgatcaaatagtacgatagtgccacctgttatatcacacagatcaaaagcaaagaaattggaccaaaatcaaaagttcttgtgtcaggatgtcagcatatatgtttacgtttacaatttaatgcagcattgcaaactcctcttcataatagcttctattctattatacaatgtcgattcaaataaaaaggaaaaggtgaaatgcacaaactaaggtaactgtgagctaattatgaacgaataatccaaggaataacagggacataaatggaagattatggagctaaaccatagagaaaaaaacaatacattacaacaaacatgagaaatatgtagttacctttaggtaagttcattggcttgacatggatggtaaaatatttgtaattggacaacattgcataaatttcattcgggcgaagccatctgctcggggcctcagccatgatggttggaacatccaaatctgcaataaaattcaaacttattgtacaaaataactttttattctcttaagcacacatgcatatcaggtcaaaacttattgagcttatctccgaggtaacaaacaaaaactaacagaacatccaaataaaaggaatcgacataaagaacaacataacccaaaaaaattaaccagacaaaagtagaacatgaggaactcaataatatacagattgaacacttaaaaatctacactatacagactataaaccccttcaatcagcctaattcagtcgaatcctcaaaacaaagaaaatacacccaaatgtatacttcctccatagaaaacatgaaatcccaaataaaaaaaggcactttttttttcacaatttaaaattacttttctcactcttacagaaaaatcccatgcagtttggtcactcctcagttcagtaaaagaaaccatatataatttaagttttgtgctaataaaaaaaattgaaatcaaataacagagacaagtacaatcaagacaaagaagaagaaaaaaaaacccaattatcagtccaaagagcacaaaattacgcatttacacacaagaaaatatcagagagagagagagagaccacgtcgtacgtaccttgcaaagtgtggaatccatgaatgttcgaatccacgagctgtcctccttccattgtggaaaaatcgtccttaattctatctcaaaacttcaacccaatattatacaccttaaacccatctaaacccttcaatcttgaaaaagagtaatacagaatcaaactcaaaatcgactgattagatggataaaacaataataattgatgaaaacttacttgataagaaagaaaggaaggaagaaacgaaagtgtatagtctgaaatggaggaggagagaaaattgagaagaaaaagggttaatgaaagtgatcagttttctctttcactgcaactaaaaatggtcacacagacatatacatacatacattgcatatcataaaagagaagacgacttttaagcgctgtactttttatttattattatttatttatttatttatttacttaaataatattatttatttgtttgttttaaaaaaatatatgtatttattcttttgttgttactaaaaaaaataaaaaaaaaaagtgaaaaatagcaataattcatttattaaatagtgttactgtacattgtacatgtgttagtgttacactggtgaaaggatcagctgatgactgctcattctgtcctttatactattttttgttttgaatgtgacatattagttcccacttattttacttttataaatatggctaattgagatttatgtcctcttaattttaacatgtactaaatcatgttccctgaacttttaaggtcgttaaaaattgagattattggatttaaggac

SEQ ID NO: 112962 - DNA, 4419 bp, Cannabis sativa
  modified_base (35)..(40): a, c, t, g, unknown or other
atattgaaagtaattttttttttgtttttaaaatnnnnnntctcaattaaaaaattgaaaaataaaaacagttttatagagcatgtttttggaaaaaaaaaatcactttcttacttttaaaaatagaaaactgattaataagtgttactaaatgcgacctaaatttataaagtattttgtaaataaaattgattttaagtgtagaattgaaaaaattcacatatattttgcgtgtattggttgttgacttagctagaagctgggcatgtattaatatgggttaacatcaaaataaattattgattgagcttgaattgaaactctcatgattcgattaaaaatagttgattggatcatgatatatgaaaattgaaaactacttctgcatgaaaatagcaaagatttgtgctgtctctgctgttcttgggacaccatatattaatgcttgatcctcttaatgcagctacacttatttttctctgtaacctgtaactgaaaaaaaaaaaaaaagaaaaaaatccaaaaatatgcaataattcacatcttaaaactcaatcatatagagtaattaggtgtaagagaaatttttgtatagcgtgtaacaacgctgctcacaactttgaccttttcttatcaaatagtaaaagaagttcatttgcatcatttattgacgtaatattgtggatgtggtagttaataatattttattttcaaagtgatatgatcacaccaaattaataatgtgcacgatttgtcaatttttagtacacaaaaaagaataactagctaatgtcgaccctaatatacattccgaacacctcacaacaacgtgtaaaacttgtttatatacaaaacaaagatttctgttgcgcactataagtgtagcaaccaaattccagtcaatatggaaataattacaggaaaataacaataataatactaatgatcatcattatatatatatggtcattaaagggcaaaggctaatgggaactactgtacgtactataccttttttcttctttttttttgaaatcataatttatgtgttggtaatcttccatttcacatgtatatatatactatataatcagataagtaattaattaagtcctatagttattctacgactactaccaatatatattgcaaatacaaggtggcatcctaatctagctgattcaggttttaggactttaatagcccatatttgaattcttcttaacatataggccattcatcaattacaatgagagtatatattcagcaaaaaagaaaaaaaaaagagtattaataattagataataacaaatttatatgtctagctaataggtgctgcattttgattatttagctaaagcttatcttaattgccgtcggactatacgtatatagattaccacaataaaagaattacgacatatcaaaatagagaggataattaataacacatttcgtactcgtacacctatttttttttcaacagcagacaattttatatttataattagtgagtaattaaaccttattagcatatatgtatataccttagtatagtagtaatgggcattacagataattgatatacatacgtatataaggatcctctttatcgtcaccagacactaccatataaaaatcataataatggcgacttgcccaaaaacaactacaaatattggactttcggagttaccaaaggtcaagcgccaagactcaatagccaggttttatcaagaagctatagctgttcacaagaggggtcaacaaaatccaaaaaaagccacacgtgtacacattcatcattcatcaattcatgtggtaccacttagttaaaaaatcacacatatatagcttatttagtactactataatgagattaattaagaagttaattaattactctctaacttgtaggtagaattaatgtagctagaactgctcagcacgaaacaaaacaagttattatcatgtaactttacaaaatgatgttataattataattttgataatttttacaaaataatggcaactagctagaatttagatcatgtgtctgaaatcaaggatattttgcagccatctacagctacacatgtcttacaccgttttcattaactctgtttctggagtaatatacaatattacttattgttctcatacataaaaacaataacaaaattaataattaaaacacactaatttaacaatgtgcatgtatatctagtgtcttttcatatactatcatgtttaaacccaaattaataatatcatattatgtacactccaaatttatatggctatattatatatcttaattaaatatattttaaatttttgtataactaaaaagttaaaaatgttctgcttaggcggcttattaattacgcggaaacacacttgctcgtggtcgattttcaatgtccaagtcaagttttgtttgctatataaatataatactcatgagatattgttaagttattaattctatttttgtgacgtatgtgctaaagtaaatgttttatgcgtgttggtgggtaatatggtagcaaatatcctccatgtctttctaaaaaataaaaaataatttttcatatataattactgtatatattttccatttcaaaagtatctatgcaataataatattaaattacatcaataataattaaatattattaaaagataatattgatgtctagcattctcttcagtatctcttggaattaattagtgaaattttataaaatgagaagtgaagtgtgtgagtgtattgaatcttataggagataggaacacttcgttaaaagtgtatataatgtgtaaattaagaacttggtttgggaccccaagaggtacatagttttgtgcacgtgggtgaagattcacacaccggatcaccacacgcgcacatcgccgccgtctgtccgtctgagctggcgggtgtggtgtcactttatcttttgaaaaaaattatttattaaattattatttttgtttaattaattaaaacagtttttaattgtgtttaagtaattagtaagcagagacaatttctcactccgtattttctgtaacgttcacatgatcgttcacacgattcccacaatcagaaaaaaacgattttcttctcgttacgtgtgtttctatataatacatcagaattaacgggagaaagacattctttttttctcagaaaaaatatacaattctatactacatatgtagtccgaccaactgtagtaccattattaggtgtagtatttcgacggtctctatcgtgtaatagagtttcgatatagtgtttttgactgggctattttattttgggaacgatgaggttaatagtctactttcacaattctggacagtactacaaacgtcttaaagagatcgatctacttcgcgacttggcagagattgtaattcgttaaagtcgtttactttattttctgtagcgactttttcaacagtgtcatactattaatagtataattaagtatcgagtcccatgtattttttaaaaaaatattattaatcaattataaaacgtgacttataaaaatactaaatactattagtacataataacaataattataataatattatacctatacattttaacattaataaataataataatgtagttgagctctcgaatggagtccacgtgtaattccataataatttaaactattatacctcaattttgtttttattatatattttggtccatttagtcgtttttaggcttgactactcgatggaagcatgttgaaatatttggtaatgtaattcaattatgtcataaagcatcgaacaacatgtcgggaaaggactttgaaagtggactctatagtaagattgggatttgggagatcaaatcgtctcttcatttatataatattatttttatttaataataagaagaaaaacagtatccgttatccacatatattattggggtccaataaattggaacaaagatgctcttttgtaaattaattaatcaataatcattcttttttatatattatatagttaactaagttaatagaatctagctatatatagagcccactatccgttgatgttattagtcctcaataaatatgatattgattaattaattaattatatcctattttgatatagttttcagaacatgccgcccgccggagaagctccatcttcacttactgccctacacaattttaataaaagcatttttattaagtaccactataaaatattgtcttataattaactagaaaacaaaagccgcgcgttgttgcacggtcttaacaaaatcataagctatatatatattattgaaaaaagtttatttttaaacgtgaatttttttacaaagttatatcataaaaaaactgaagtttctaaaaaataataaaaat

SEQ ID NO: 112963 - DNA, 2698 bp, Cannabis sativa
  modified_base (59)..(61): a, c, t, g, unknown or other
tattggggtccacaattaaataaattcataaataattataaagtaacagaaattagtgnnnattgcctttactaatccaaattagtaaagcggtgattacagaatggaactataagcttcagaggcatctgcgaaagggaaaaaggtcagccacataatcaaaaaaaaatatcgataatattattattccttaaaaatcaaaacacatacaaaaaatcgataaatcattgataacaatcgagaaaatatcgacaatattattattccttaaaaatcaaaacacatacaaaaaatcgataaatcgttgataacgatcgagaaaatatcgacaatatgatactatcgacaatttgaaaatatccagaaaatataaagcacaagcaactttatcgagaaacatcgacaaaatgtcgatatcctatcgatattcaataaaagaaatgaaaaaagtagacaaggtaacactatcgattgctcaattgatagtttattgacatcctatcgatatcatatcgataattcatcgacatgaaaggaaaaaaaataagcaataggcaaactagaaaaaattgataaactattgatagcagttgagaaaatatcgataatatgtcaatattttattgacaatttgaaaattatccagaaaatataaagcataagcaactttatggacaaacatcgacaaaatgtcgatattctatcaatattcaataaaagaaatgaaaaaaaaaacaagctaacaactcaattgatattttaacgatatcctatcgatataattcattgacatgacaataaaaaaaaaaacacaagccataggcaaactagaaaccatcgataaacaaatagagaaactgtcgataaactattgacataatataaatcctaaaaggctccaagcctaaaaaaattgtcaaaaaaccatagacaaaatgtcaatatcctatcgacagacagttaaaaattggaaaaaaaaagtagaaagtcacaatcctaaccaaaccatcaacaaacaatagatatcctatcaataacctatcgaaaaacattaaaaaaatttgaaaaacagttaagctaaactatcaacagccccttggttccataattgatattctgataaattatcgatatcactgtgaaaatacacagaccaccatcaacaaaacacaaactccacaaaaatctacaaagatccataaaaattaaagtaatttccacagcatacacaaatccacaatttaatctatgaaaaatttacatttttttaaagaaaaacttacaattcgattgtgtttaaggtgtcgttgttcgtggtggtctgaactctgttcttggtgatggtggcatcgttcaacactaaaaatggtggtggtggtttcaaacttttattaaggttcgattgggtttcgtgttcggacctttgtgatttacgctagtgcgtcatggtgacggtggttgggcgacagaagacgaggacggggtcatcgtgtgtggcgaaagacgagggggggtcgtcgtgagcaaagagagaaaggaaggaagatagttgggcggcgtcatggtcacggttgtaagttgcccttggtttgtaacattaaggagctcgacgtttgggttcagtggagagggaaatcaggggaagagagaaggacagagagagagagggagaaattaaatgaaaagagcagtttgggtagtttaggaaaatagtggcattattttgtacaaattagtggaaggtataaattttgatattggagttttattatgtatagataataaaatttcccaatttaaatttacatatacatcatatgatgtatattctttatttcttatattctttactttcgtcaatggattattatacttcatctcatttgatgagttgctattgaaagaaaaatattaaagaaagaggatatgaaaggaaaggaatgaaaacacttttttctttttaattgtttggtgatgagttgcttttgaaagaaaaatgttaaagaaagagggtatgaaaggaatggaatgaaaatactttttttttctaattgtttggaacgtaagtagaaaagaaagaaagctgttaagtctgttttattataaagttagtatatttttttttagaattattagtagaatcaattttttaatatataactttatttattttattttgttgacattgaaaaaagagaatttgaactcaaaactttctctttgagagtaaaaatgtataactactaaactatggttaactttattttttatacttttatagtatttgtgcaagagattttttctctaattttcttttcaaaatagaagaaaaaaaattagtagatcccatactattttttttatttgaaaaatttatataatagaccaaaaatttgaaattttttacaaaaatacatcaatatggaaaaattttcatttttactctttcaatttttttatttacaaaaataccactttagtaaaaataataaaccgtttttttaattattttatagtttatttatagttatattatgtcacgtgatttttttttgttattttatagttaattaatatttgtcgtggggttgattatacgttaatttttagctattttttttttttacttttttttttaaacaaagtagatttttataattttaaaactgttgctccagaattcgcccaaaatacgtgg

SEQ ID NO: 112964 - DNA, 5436 bp, Cannabis sativa
  modified_base (5354)..(5389): a, c, t, g, unknown or other
tatatatatatatattaaattcttggatttcttatgtattttttgtgcatcaaacataacacttggcaatctcaaatttatctttaatccaaaggctgataataattttaaataaaaacttaattgttctttttctttctgcagattcatcctagttctttgaaacagggagggattcctttggtcgcatgttgcatagcagctgctgaacaagccagtgtaagtagaactttagataccaataatatgatgatagaaaggagactttacatgcatatcattttctaaattttgcaattctgaacaatatattcaattcatttccaatttatgtaccttttcttgatcaatttttagaaacataggcgttctgctaatatataagataatatgttgagatgattaggccattttcactgattagattattccaaatgaagtaatgtacagcttcagctctgtgattttgctcaacatgtttcgcaggttcccatcactgtccattttgatcacgggacttcaaaagaagaccttgtggatgcgcttgagttggtaagttgactttctatcttattttttcatgattcagtattgagattctgtcaaatttgtttattgtccctaagcattacctaattatctttcataatctacatcattttgctccagggttttgattcagtaatggtagacggttcacatctttcgttcaaagacaatatctcttacacaaagtttatatcacttttggctcacacaaaagggatgctggtagaagctgaattaggaagattgtcggggacagaagatgacctgactgtcgaagattatgaagcaaagctgacagatattaaccaggtcaatacgttctcctaattctagtatctgagaaatcttattgcttaaaacttccaaattcgtgacaaagctgcaataaatctcaggctcaggagttcattgatgagactggcatagattctttggcagtttgtattggaaacgtccatgggaagtatcctgcaagtggtccaagtctgaaacttgatttgcttaaggttagtgttaagattcttgatgcttggtcaatcatcattaataacatctgtgtctaaaagttgcaaccttttcttacctgcctaccctgatgttttatgtttcatttgcatgcccaagatattcataggcctataattagaagatggtaatacaccattattttgttcccatttttaagcttactcatttaaaagttattaaacatgaaggatttgcatacattgtgttcaaagaaaggagtctttgtggtgcttcatggagcttctggtctgtctgaggaacttatcaaggtgtgttcttttatagcaaatacttaaaagtttcagtttcatttccatttcaaaaatcagagacctcattagacattttcataatttcaagacagctttgatcattaaacacttttatcttgtggcttcttcttttctttacaggaatgcatagaacgaggtgtgagaaagttcaatgtaaacaccgaggtgcggaaggcgtacatggattctcttggaagtccaaagaaagatctcgtccatgttatggcttctgcaaaggaagcaatgaaatctgtgatcgctgaaaagatgcatttatttggttcagctggaaaagcttgatcacattataatgtcaatacatagttgaagcaatatatcaattggcttcccaaaaaattggtttgtttcattaaccattttttttcagttctgttgtaattatgatttgaaactgaaactttcattagctaatcaacaataagaagagcttcattccaattttatgcactagaggtgttctttcacagtaatttgtttggtgttccccgttcatttaattagtcgatgcttattggaaaccaattcaacacgagtattataaaattggccaagagaaatttcaaggttgctattgctaactaaatgacttttgaatcttcttcttcttcaaatccaccaccttttcttactctaatattattattttgtattctttgccccttgattaatcttttaaaccaaaattcgtttatttcgtgtgagttttaagtcatattagttaaatttctaataaaatgatattgcaaaatttagcacaattaaatactgaggatttgatttctatatatattcatgagtcataaggcagttacacaaaatgagcacaaaaaacgtcttgaatacaactggcaaaatgaataacagaaaaggaatattcagggtacaatgattaaatcatcattacacaaaatgatattgctgttgttatcgaaccaggctcttggagcttgcttcagcccatacaaaaaattatttagtttgcaaacaaaatgttgtcccctttctcttcaaatccctgtggttggagcatgtaaacatcctcctctaatgttccattcaagaaaacattattaatatttaattgtctaatttcccagccacgagtaacaacaacaattaaaataattttaatagttgaagcctttataacagggtcgaatgtctcaccaaaattgaaacctggtctttagtgaaagccttttgcaactaacctggctttgtatcttttatgtgatccatctgagttaagattgtgtctgtagacccacttgttgccaatcagattctgacctggctgcggtggaacaagaactcaggttttgctgtttttgagagcattgttctcttctttcatagccctattcaagccagggtgagcaagagcttcctcaacattgtagggcttagatgagagaggttgccatgtagcttgtcccataaagactctaagcttgaatatgcatgctttggctcgagtagtcataggatgaccagtagcagcaggatgttgaacagtttgtgaattggaacctgagtcaagtggaaacatagcttcactaatatcatgaagatcttgtgactggggtaatatgttgactaagccaggtgaatcatttcccctctcactacctgaagctaaattaccagatgaagcaataagggagtgatcaaaaagtactggattaggagattcttgtatctgagagtgtgttggtgtggaaggtgcttcttcaggcatgctaatgatgctgtgaatgaagtacatgtgagaaaattaaaagatggcaaaacagatcaagaggagctttgaataactactggtttatcctgttgataattattgagaaatcctaatttgaaaggaaactcaagctcattgaagacaatatttttggagatgtaaatttttccagtaggtgttaagcatttgtggcctttgtgagagtcactatatcctaggttaacacatttgagtgagtggaactgaaacatatgtaatttatatggtctgatgcaaggaaaacaagcaacactaaaagtttttaagaaagcatagtctggtttcttattatgcagaacctcaaatggtgatttatggtcaagaataggtgttggtagcctattaattaagtacacagatgtttggaaagcctcccaccagtatttgagtggcatgtgtgcttgtgctaaaagtgtgagtcccatttcaacaatgtgtatgtgtttcctctcagccctgccattttgagctaagaagtgaggatatgagtgatggaaattgattccattggctatgtatggctatatcttgtagggcctgatatttctctccccaatctgtccttaaggcctttgatttttctctcaaattgtgtttcaacaaacactttgaactacagaaaggcttcacttgcttcagcctttgttttcaaaggatagatctaagagaaccgagtgcaatcatcaacaaagtgtatgtaaaatttaaagccattgtttgacataattggtgagggtccccataggtcactatgaattagatcaagaatgtttttggctttgctatttgagtgtttaaaaggtagtgcatgtgattttctaaattgacaagcatcacaaaagtggttcatttccttgttggtaattttaacttgacaagaacttattaacctgactcaagactttgggagatggatgatttaatctcctatgccatacatctccttctgaaatagaaaattgatcagatttagactgatctacattgaacttgatagaaacaccagaaaaaacttgactcttgattttattggactcgattgaacttggaacatgaacaacagacttggttgatggtgtttggagctggtagagaccatccttaagcatcctttgaagaagaactttccttgttagcttgtccttcacaacacaacaatcagaatgaaattcaatgcgtacattattgtcatgggtgtgtttggatacattgagtaaatttttggctatttctagaactaacatcatttctttcaatagtaatggttttccagtgttagtgaataaaactccattacgaagatgagagatagtaagctgtgtaccattaccaactgttactttttccttaccaccatagtcttgtttttgagtcattgaggctgcatcagaggtgatatggttgctggctccactgtcaggaaaccaggcctaggtgtagcaacaaaagcagatgggttgttgttcttgccttgagtggtgttgtttggatctgaccccatatagtgttcatcaaagcgattataacacaatgcaattgagtgaccatattttccacaaacctggtaggtgggtttggaattatcaaatttgccactaaagattctcttacctcaagctcttcctcctctattagagtgtctaccaccatggttgtgagagtagtgatttgaacctctgccttggcttccaggttgaggtttatgagcaaagttggcttgaggctcggaaaaggtgtttggaagcttgttgtggttggttgagagagcctggagtctctctatcttgttgtcaaagctaagaagcatttcttgaagctcttgccaggtggtttttggtctagtttgatcaatctgtaacacaatagtgagataattaatatcaatatcagagaggacattagttaccagctgagattcagggtaaggttctccagctaaagccaacagagcccatcctttcttttgtttgagataatatgtcattatgaagtacatacatcacacatgtggtatcactcaactgttagtgtgtgactcgaggtacaacttttaagaggcatttaatgccccagacactgaagagactctcaatcaagccacgttagatcaaattcaacaactaggacacatgtcacacattcgaacaacttcctagccgaatgaagtgttgggttttatgccnnnnnnnnnnnnnnnnnnnnnnnnnnnnnnnnnnnnattaataaagatcagaaataacacctgtaatatctattcaattcaat

SEQ ID NO: 112965 - DNA, 7386 bp, Cannabis sativa
  modified_base (4092)..(4092): a, c, t, g, unknown or other
attttgtaaatatttttggtatcccaacttttgtaacttttaaattataaagtttaaactattacaagttattttcattccgtttattaataaattttaattttcgggctaattttgttagtaatcccatttaggggattatggtttcttaagtaaattgggtagcgtgcataattatttaaaggcgttacatgcacagtctctattcactcctcagattggtccacgtggctctattctcctattccctcatgtactttcttcaatttgtcacatcagctcaaagagtccctcagccctgactattatctctaccattatttttagttatttcagtatgagctactcactcaataatgattctttaagccgattcttggcgaaatacctaactgcatccttccagctcacttcactcacttgatacaatatgttgaagaacttttactagaatttttggggatgctctccctctttcgacttaatatgatagaggtctttatgttcttctctacttttacatttctctcatattgtgtggaaaagtattgtgcaagctcatttaatgagttaattgacccttccttcaactgcttgaataatagcaaagtcgatcctgctagggtagtggagaaggttttgtatctgatcgcagtgttatttgtctcaaataccatcctctgtccaaatttaagcacatgttctaatagattgccttctccatcgaacaatgtgaaggttagttttgtgaagtctttaagttttgactcttcaatgatctatttggcaaatggagatcttgctacatttctcacgaccactctgtttgaatcatctagctccatgactctttcttctccaatttttgccatgacttctctcataacatggtctcgcttctttttgtttgtcgttacatatttgtcgaacgtgcttctgaggtgcttgttttgttccatctgtgttttttagaaattgacaaggaagcaaaccctcctttctttacaatatttgatcttatctctttaagaaaatctttattaattgttatcacttctggttcattttttaattctttcactatgtttcgagaggttcttagttgttgcaattgctcctaaagtctctcatcattacttaatagatttccattgctcgtctatctagtgtcgtgcagtgcctatgttttgttcatttttgcacacatatctaccatttattgcttgaaaattttttaacactacataacgtcttgatgaatgttgttgagttttatcttgatcatgttgatgcctctcctcagtgatacgttgttcttacaagaatttctcttttgggagagacgtcgtagttccttattatacttatctagtgaaatcgttcttcggtttatttctcgcatctcttttgcttgcaacaaagtagtggttggatatatcaatgatccaatttgatgagtctctttcatttgtaaccacacttttctgcacattattcgacgcttttttggatcctatcctagactgtagccgactcttcaactttttgttcttctgattcccacagacgatgccagttgttcatgttgaaaatcagctcagcaataaatttttgattgcacttcaaattctttacaataggatcatctcaatcaaagattacagctttgctatattacacaatttcttctaaatcagtggtgactcttctcttaggtcagcgaactcagatttgagtgaagtcactacaagaaatgtcacttttgttagtacatttttgcgttggcaaaaatttagtattgtgctggcaaaattaaatctacttttgatgtattggcaaattaatgttggtagtagaattttttccggcacaaaataaaaagtgctcgcgaaaatgactttttccagcacgtaaatgccctagtaaaagttagaattttgccactataaatgtgcgctggtaaaacttttaccttttgttcagcgtagtttgtgaaatgtgttggtaaaagttacttttaccagtactgtagcgaactgcactggcaaaagtggcatttcttgtagtgagtgtattcttggagatgcaattcggcaatgtttcgactggaatagtgtcgttaaaaattcgtgctttgtttgaattttggggttggtgctgcctagtctttaatattctcttctcgaattactccacatggctctgttgtcctattctctcgtacactttcttctctgctttgcttattgagctcatttcctcaagctattacgaactcagcttcgctcttcagctttttctttctttttttagtgaaatggtacatttcttcttttgtgtgccacattattttatcagttctcatgcttttattaggataaaattattttaataccctttaattatttttatcctttaattatataatgcatcttataattctaacacaaatcattagaatcaactataaattactaaacatttttttgtgtgtcataaactcataattatacacactactcacactttggactttaaacatctttatattatctaatttattattagtgatacattcatttaaaataatactacaccaaatagtaatgtgtttagtgcttttgtaaaatgtggatcttattataattagatgtggctgaaaaattctaccatatcactatgtgtattgtattggtgcatattttatattacataccattactcataatataatttacgagcttcccaatttaatttttttttttctaattaattgattacttagtttagtggtgagtccaattcaccagtgaccagaaagtaatgaaaatgaagcaaaaacaagataatcgaggagaagttatgttgcacctaacttaactgggccaatttatcaaatttggtcacgttatattagcaaaacaaactgcctttcaaatagcctaataataaataataataaaaaatgggtagcaaaatattaattacgtacctagctctcttttctcacaccataaaattagatcttattctatttttgtggatatcaattagccaggcgaacaaatatatatagggactatattgttgtccatgttggtatatatacatattaataatatattttcctgtataaataattaaatattatgcatgcattttttattttcttggatctttgaggactttgttatgtacgtgattaactttgtggtctttaatcgtttggagatatatatcaacaaacaatgaaagcaagaagaaatctttgtgcccctcaaagttatcgccgttgagatcgtcaaattcacctctctctctccctttctacttatctgaattcatttgtatatataataagctgacaaagctaccaagcttcattatccaactactcaaattattaataactcttaattattatcttattatatctaattacaaatggatgttggacggtggagattccttgcagctcttcttcctccgataattattttgtttttttctgcattttgtagctctgaaagaggtactacacttattttattttgattgttaattagctatacatatatatatataaatatatatatttatctcctttttatataatacaaaaacaaaaacaaaaaagaatttcaaagaagttctgatctaattatactcataaatgttttcatctcatgcaactccacaaaattaattaagaatgagcagaaataataaattgatcaaaattgtttttttttttattcaggagtgactgtagaaattaagttctctatttggttaacttaattgatatgtgtggatttttcttaatattaatataattatataaataatacaagtcagacacggccaaggttttcaagagttgaatatgtagtagggcatatatatgcttatttatttattggagaattactttatatattatttttttaatatttttttcaaatttacgtgcagtttgagtgtctaaactagttaaagcgttagttgcaataagagtttttatacgattttttgttgcgatttaggttacagcgctagttgcaatgtgagtttctatgtagaattccgtanaaatgtaaaaaaaaaaaaaaactattttgaaatgtaaaaataaaaaaaccccttatttattttattaaacaatattagataaaataattactgatgaaatattgttatgtattatataaattaaggacccaactatagtttcatgcacaatgcaacggtagctccggcagtatcatattacgactacatcattgtgggaggtggcaccgccgggtgtcctttggcggcgactctgtcccagcattacaatgtgttgttgcttgaacgaggtggatccccttatggcaactccaacatcaccaacctatctgcgtttggcgccgccctatctgacctctctcccacctcccccgcccaacgcttcatctccgaggatggcgtcatcaactcacgcgcccgtgtcttgggtggcggcagctgtctcaatgccggcttctacacacgcgccgcccctgattatgttaggtacccctatataacatacaattgtgaattgtcatcattaattaataaactcaaatgcttgtctaattccttagctaattatctttcaaattaataagagtaaaatcccacgtataatttttgttaatttttttataaaaatacacttaaacaaatatatgtatatatatatttatattacctccactttatttttattttgaaaatatttttaatttattttaaatattataatataaaaataataacgtatcatttatattaaaaattaagaagacagttataaataaaaataattcctaaattataattaattatatacattttctaaattttgtattaaaaatttatatctttacatacaatatatataattattacttcttaatctttttttatttatatttttttatagctagtgtaattacttcttaatcaaatatatgtgtagaactaaaaaatttattccatatttaaacaacatgtaataatatatgtataatattatgtctataataacatattacttataacatgtaataacatatttaaaatataattaatttagttgagagagtatttttaaataaaagttttattgtaataataaagagtaaagttttttgaaaacaagataaagaatttttttttttttgaatatagataaagaaaattattaataaagagtaaagtttaaaaattaatataagttgatttttttattattttttttatgtaatgttgggatcatatattacttaatgtacctctagtgtaattagtggaatctaatttattttgggttcttagcaagttaagacttaattacttatagttatcttttttcttctcctcaattatcattatctgttcgtatacattacacgatagtgttagaaatgtataaaacaccataaaatatgatttagaaaaatacgagtaattaaataatataaaaggcatacttttttttgctgattttttttctaaaaatatattgaatatttatctactagaataatttagaaatgatgaagattggtactaacttaagaaaagtttttaaatctaaatatgagatcattaaattaacaatagtatataattgtgatgagagtacaatatatatatttatagagttaaatagatgacttaattagcaacaaaattttgtcttcttcaattaaactttatacaactatatcgacgatggaaaaacaactattcatcaccatatattttaataaaataattgaaatgttaatgtaaactcaaaataatagttgtacaaatacaaattagaaaatcattgtttccctttcaagaaaaaaaaattagaaaagtattattctaggtgctcataactatttcacatcaaatatatttttcaataaaaaaatgatccaacatcagagttaattatgttagctttatatattggtgtattatatttgaaaaatactataatggtactcgtggagttggacaccaaaataatatatatgtttgaaatctaattaaacaatgttacaacaatgtctaattgtacaatgagtccattataggttagatgaatttttatttttataaggagtttgtatgaaaataaatttgtatacgtacagtgatttgtatttattagtttatggaatcagaaaatagtaatctatagtaaaaacgtttaatgttgtaaaacttgaatattatataaaggaaatgaataagcacatgcatatgtgtggtttttgtgaaacatggtgagaatagggcagcaggatgggatgggcggctggtgaacgagtcgtaccggtgggtggagagggtggtggcgttcaagccgccaatgggacggtggcagagggcggtgaggaacggtctattggaggtaggggttgggccctacaatgggttcacttttgaccatataactgggactaaggttggaggcactatctttgacagggagggtcataggcacactgctgctaacttacttcaatatgccaaccccacaggcctcactgtcctcttgcatgctcctgttcataagatcctctttagaattagaggtattcatctcaatttacttattaagtttgtatataatttatgagtggacaacattactgtataataattgaatgagaacctgacacgaaaaaaggactgaatgagaatattcattatattttaacatcattaaggtggcatttggttgagatgaatgaaaatataaaaatagaaatgagaataggaataagaatggaatagaataaaatttaaaatgcacaaaaaaaaaattattaaattttttctcattatacattagaatagtctttcctttcgattttaaaatggattaatcattcaatcaaaatagtggaaagaccattcaattagaatgttatattccaatactttaatatacaactaaacaaatatattttcattccattctattttattatctctaagcatcgtatactaatataggaggatttggtatttaatctctagaagtgtcctttttgcaaaagaaattcttaaataaataagtctccactagtttttccgaaactaaaaataaatttaaaaaattttcaattcaacaaaattttaaagatcaaatttaatccattttttaaaaatatttttctcattttatttttgtgaaaaacttattattattcaaaattaaaacttatgccaaatttatgatatgtggtatgcataagaatttattaatcatatttaattggaattatttcacaaatacacaaaaacaacaaaaaattacaaaaataagattgtacgaaattttaaatattt

SEQ ID NO: 112966 - DNA, 1900 bp, Cannabis sativa
  modified_base (44)..(50): a, c, t, g, unknown or other
  modified_base (691)..(691): a, c, t, g, unknown or other
agttcatatttaaggtgttaaacaacatacttatgagtagatcnnnnnnnctggtaaaataaattccaatagtatgttggaatgggtcaaattcttatggggccagaagcacaaaggagtagaggtcaaagaggtttttttgtatgcttcaattataatggacaagatatggggaactcggaacgataaaattcatactactaattatacttgtaatattaagcactttattgactatatttctaattgttacgcagattttagccattgtttgtttcctacgccagtgatttgtacgcctcctgcttggtctcctccaccagacgattgggtcaaaatcaactgtgacgttagggttggtagtgactcaatgtgtgtggtagccttggcaagggatcataaggagtcaaatttgtgggtggctagcaatatcctcaacttctctgatactctcattgggaaagctacaacttgtctgttagacttggaatcaacgattagtgggaagcaggggtgtttgcggtgtgggtggtgcagtttttgactattttttcaaaccaacccgctcatgcggttttttcaatttcctaaaccgcacccgcatcgcgaaactaaaaaaccgcacaaaccgcaccgcaaaaaatagtgcggtgctgtgcggtttctgcggtttgaactatcaccaaataantaaactatcacaaatacaataaagtttgaccaacacttgtcaaataccataagacttgaaaataaatatgaaaaaaaagtttcaagtttcaacaatacaataattagtgggtttgggttgggtcttcacatattggacctaaataaatataaaaatgtatttttataatatgtggggtggtgcggtttgaaccgcatattaataattcaaaaccacaaaccgcattgcaccgcgcgatttagataaaattcaaactgcgattgcaccgcaaagaattataaatcgcatattttgcggtgtggtgcgatgcgggcggtttgagcagtttgatgaacacccctagtaggaagcattcttttgtgatcatagagaacgactctgagatggtgatcaatactctgaagggaacttcttctacttagggtattacaaattatctacttcaatgtaaaaagctctcaaaccttttgaattgctgtaattttcgtttgtttttagattatgtaactttactgctcataatgtggttaaatgggctttcaactataatgtaattggtatgatagattcgtccttcataccgcgtagtttaatttataatgaccgtaaaatctaacttatataattatttacttattaaaaaaaaagtagtgaaaaattttggaaataaaaatcataattagtattatttttaagaaagtggtggttatataaaaaatatatgtgaaggggagatcggagacgttaaaattgaaattgaatgacatcacaagaaataataataataataaaaattgtgggtttacgttgtgagttgtgattttaaataaacaatggaattcattatattgattattccaagattgaggtgaagtgaaagatgaaggctccttcacattgtgtcctagaggagcctgtgtttttttagtatttagcaaacctatgtagacaaaacccttctcttccggcaccttttcatcgtgcataaatattataaataaaatatttaattaactatctatttatcagaaaaaaaaaaccatgtattttcatctatatacaggagtagtatttatttaagtataaatatttaactttaactatcttaaattaataatatttaagttatattttttgaattaattataggctaattaggatttttgccccttgaactttaacatgtaccaaatcatacccctgaacttt

SEQ ID NO: 112967 - DNA, 2461 bp, Cannabis sativa
aaaaaaaaaaaaaataaaaagttgaaaatttcaatatgtggtgtaaaattcctaaaatagaatgatttatttttatttttgaaacagagaaaaataaaacgatttgaaaaatacaattatataattttttttaacatgtaaaaagattataattttttctttaaaatataataagtcagctgttagagaaagtagctcttcaatattctatgagttaaaatttgagaatttggcgtgtgcttgtatggtttggaaattagagagctagagatcaagagagattgtttttcctttgaaagagtacataatatgcggtgagtatgattttgtttctcgaaattggatgttggataacttctataatccgaatcagcagcatgttcatttttttttatgttctattatgtcaattgtttctgttatattgagatatacatataattcttttataatgttgtttgggtatatattaagacaatattatgcaacaaagtctattaataatcttaaaccaatgtatattatataccaataaaccaggacaagtagttgaagttcactatctccatatccctctgacactgtcacacatgcacactacgcacaaatatacatgtacattaataattatacagttctaattaatggctaattagttctaaattaaagaggttagatattcccaaactggcaaacataaagcctcaaatatgcacgaaaccatgctctggcatgcattaaccacgaggaaaaagataccatataatctgttatatatagtagtataaatcagctgtataatattcttacatatatatatgtataaattaagtaaataatgtcaatattcactccagaagagtttctggttggttcttgaaagcgcgtatctttattaacaactcaactaactataaccataactagtaaaacgagcatatataataatatgaagaaaaagaaattccagcagagactgatcagagagcactattgttctcatcaatatatatattttatatggttacaaaatatattttattaacacttcagagagatatattactatggatataagtaagagttcaatattatatatgacaagttgtaactcacgtatgatttatctatatatatatcactgaaaactagaaactgataataataattagaaaaagattgataaacattattttaagttgtgtaacaacaatatatatcagacttttgtgcttgtaagttgtaatagtcattaataataattaaggttaaaaaagatatagtagattatgttgtccttatcaatgatgtccaatcaggtgatatggtgcaataacttctgcaataataggtcaacataatttagttttttttttctttttctgaactaattataataataattcctgaaaaaataaatgctaataataataacagtgcatggcatgtgtttgaatttacgaggcagagcctagaatatctaaatagaatttgtatgtaaactattattagttagctataactattttcatgagtcccaatgcaacgttattacctatttatataaatatatgttatcactgatagataattgtgtaaattgggaatggtttgcttgtgtagctggccccggttggcaaagagctggaatttacttgtctacaattgcaaattgaagaaagaaaaataaattaaaatcaattatagtagaagatatttaaataaatatggattgctaataagaataaatttattagtacaataagttttttagattatcaattaaaaaaggaggcaccaaactatcaatataattatcctaaaggcctgtgtggaagtacttggatcacaatttaaacaataagtatgattgtatgaaccatgccatcaataatggaagacctcatatgtaaatatataaatacacacacaacattattatatatatgcactatatagtatattcatatatataaggtgcatgcctagccctgcatgcatgggaaggaaaaagcacatggtttgaggctatatatatagaaaattctgcataaataagaaggaaaaaaatgatcatgtatatatatttatatattgcactgattgacaaacaattcagtccacacaacacatttaaatatacataactaatatatatatatgattaagaaaacaaatgcaagtggagaactaaactattaaaacattcaaaattcgacaaacaaaaatgaaataaataaaaaattaaatggtaattaataacgggaatattgatttttgagttggtccttttggtgaattattgtgtgagggctcatcaaattgcctatgtggacaccaatggatcacacactgttgttcttcataatgcatattgataaccaataaacacacgtgttttgtaattggttaattagttagttatctgttttctgttacattcttgtaaccaattctgttt

SEQ ID NO: 112968 - DNA, 3417 bp, Cannabis sativa
  modified_base (606)..(608): a, c, t, g, unknown or other
aaaaaaaaaaaaaaaatttacttgggcaatttgataaatgttaccctatttaatatttattacaaagaaaacaaaaattggatacaaattaatcacattcgtttgttatgtaattgcagtagtagtcattaatcaatatgtgtagaaataaacatacctcacattgtactttaccaataagatttctcttcataatagaaattgagggctcaatgcaaaattatgaatcaccaaattaaaaaaaaaagaacaattttatgactctaaaattttgggagaattcgattaagagatcgaaatataagttagcttttagctgaaggaatgaggttaaatcacgaaccattatcgacgagtaaggttgtttaacacgacgggaataagaactcgatcctcgacctgtgtattttggtttgtgctaccattttcataaattgaacaactaacttttttttgatagcaaagcaacttcggtaaacaaaaaaaatcaaagcggggcaacctccccaacagaaagaaaacgcgccaaatttttaaaattggtgactttatccctatgttacactccattcagcatgaggagagatttttacaccacatactgannnttttaacttttttacttttttattgtggggcggaatttttttttcaaaaattctgtgtactgaattaagttttcacttttgttctataattattttttagttgtttcactgttgttttaattattctgttttgttattttataaaaatacaagatatttgtaaaaaaatttgtgtgactgtaaaattgtaaatttttaccgaaaatttaatatttgtgtaaaactttctttttagtcattaacaaatgaatgtaaaccttttatattctaagagagattcttatgagttgatatatttatcctgtcatgcctacataatcataatcttatatacaatgaaagatatatttaatttattaagtattttacaaaataaactcttatgttttttggtagtaattgacaaaaataaactctaaggacacataaattaatgatctcgtcttatgaaaaacttgtaagttgaaaatgagtataaccttttcaattaatcacacctaattaagatgagactttcataacttaaaaaaaaatataatttttgtgcctattttatatttacatgtcattacgttttgtgtaactattatttttctttttcttaactcttaaaacaacttgatgtgcaaaatactttttctatgaagaagtttgtgaatcctttaagtaagttctctatagtttaaaaatgattttctactattgaattagggatgccataactcaattgttgatagtttcatcaattatattaatgtttgattgattaaataaatggtaaatatgtttgttacaagagaatatttttatgtgataagtgataacatgaattggaagttacaaatttggttattgatttgtaacttttcaatgctcactcataaatggtaaaaacaattatcatgcaatttgcatttgattaaatgttttgcatatagctaaacttgattttgttagttatggattgataatatgtattacaaaatcatatggcaacaatttgcaacctttggagtgttaaaaactttgagggagaacataaattagacaagttcacatatttatataagtatatattatgatggaataaaatgagaggagggggttaccagtttggctcccgtctctggacgttatccaaagagttctgatcttgccctagagtattcgctaagacccaattcgtgtggtccctctcacctacaatggagtatgttaccaaaacttcaccgaacaactagtagtgaatgtctttcctgaagtagagagtttgagaaattgactcgcactgaaagttcacatttaaaacttcttaaatttattaaaatttcatcccagaaggatccacccatatttactgatacttgtttaagctttgggtaattcttatttcttctctttgtaagaatttgtgttgtattattttgcataaagtttgtatttttttctcctttatgtaacattttttttttaatgatttgattgtaatcgttctcttatcaagttgtaatattttcaacattatttttatcattcaatcagtgtaatttttcttgttattctaagtgaaaagttatgggttttatatcttaaacagtaaatattaatttagattttatgttttataaaaattatcgattagattttttgttttgttaataaataataatgtggactctgtattttttaaaaatagtacaaaataatacgttgtactcaatttttatcaaaacaaaacttaataatataacttgatccgaatatgttatgacaaaactagttacattttttacatcagttcatgctagaaattaactttagattgattatgttttaaaaaaaaaattgacgaaaattaagctcaaggtaccattttagaccatttcaaaaaatataaggttcgatttgccatttaataaaatagagggtccaattaataacttttacaaactacaagatctaaaataatatttaccttttttaaatcaaataactttattcctcacaaaatttctaccaaaacagaagaaaccacctcaataggtacaaagcttgccaccaaaataaaaccaacaaagtctcgtgaagctcgagttaataagtgagcaatacgattcgcggactgttttacaaaatgaaaagacacattagagaaataagaatcaatcaaagttttaaaagtttcaataagcattccaaacacaagttgcattttatttttgctatgcacaacttgaattaccacaaagttatgaaactcaaaaactacacgttgccatgaaagattcttaacatagctgagcatttccttgaatcccatttcttcagctacatccaacccaacaacaccatcacgacatgtcggcaccaacactgagcctccacaaacgcaccggaactaagttatttcttagaattaaggaaagaaaattgaagagaaagaaaatataagaagaaaaaaattatgtgtaggaaggaaagaaaatttgtagaatgtaaaattactatattattatttaattattaatataataatttttataaatataatttagtcatttttttgaaatacaattcttcatttaacagaaacaattacaaaggatcagacaagtcctgccaaagaacatgactcgcacaagggagactaatcccaatctacatagcattaactttattaatcaaaactgatggtttgataataaatttgtattggtttagatttggaataggtggatatgtggttaatggtttgttgtggtaatgtagtgaagtagtgatgttgataagtagttgttgatttagtata

SEQ ID NO: 112969 - DNA, 4681 bp, Cannabis sativa
  modified_base (1379)..(1380): a, c, t, g, unknown or other
cataataaccgactctatagggccttatggtgtctgttattacacaataactgacagcataagggccttatgacgtcggttattacacaataatcgacgtcatagggtctttatgtcgtcggttgtttttacccttacaacgtcgcttggaacagtatcagtaacaaatttcgtgaaaaccgatgttaaaagtctttaaaaatcacctctaaaattcaattttgtagtaataatttgactaataattgaaaatgatatttactaaaagtaataaaagaaaaaaaaaaatagtaatttcagaccacgattgataacctacacagctgttgatggtgtagtttattttctaataataaatagatattagcttattttctttgatgaataagaatatagagatattgacaggaggtggaggtagtaacatcaacccaaataatatctaaaagcctttaagctagctacataactttcaactttcaagtcgaaaatactaataacgtatatcctcccaagtcatctacatgctaaaatcacgtttagatataattaccaattaattattaatattattaatatagtaagcatactatattatatgaaatatatatatatataggggatacattgaaaacaaaaactacttaaacggataaagcagtggtcccatctaggatcgtacaccacaatctgatctctgtgttcttcgaaaaaagtctttgcgtgaaagcaaagaagtaaaagatataggattattttttcaccatataataaagaaagaaagaaaaaaataaatatataaatgtataaagaatgaaagaaaaagtgctatatattttcttggtacaaatgagtcaatgaatgtacgcccaatcacaaattgtaaacagttctccctattaagcccactttggttatcgttctattttgcttgtttttttatagtcaccaaattattcttgtttatacaacttggtttaattggtatcattatttcattctcgagtttttccacataattgtctgaagaaagagtattagagaaaagggtcagctcagcatatcccgacacgcaccaaataaaaaaagaaaaggaaaaagagagaaagttataaatcaatatacctactaataattaataatatagaagagagattgagatatgggatgggatgatgggtgatgagaatagagaataagtacaaaagactagaatccaggaaatatgtgagtgaatatgcattggacgtgtatggggaaacatgccctctcatgtgatatgatcccttctcttatcaaatcaacttcattaggccacaccacacaacttgtttttctctgttctcattatgtgaaccataataataataataataatnntaataataataataataacttaatatattaattttttaaattttttttaaaaaaaatttacagtttgggtttctaaaatagtttttctgtggtttttatatatgtgagttgacatacggattttagttgcgatttaggttgttccgtttaatgtaatatgattatctatgtaaaattctttaaaaatatatatataaaaaaaactgttttgaaatgtaaaaataaaaaaattcttaataataataataataataataataataagagacacttatggttcatgatcaacacttttgtatatgattattgtaatttagcatggcgttgtatatattttaaattaaaataaaatatattgaatttgatctttaattatactaaattgccaacatattcataataaggtgcaacctcaacataccgagctttttgaagaaactttcatctatgcacataatgatgctagtgctaaagagagactttttggtttaacttgtttgagattttgacctctcaacagaatccttggagcttgttgggagactttaaatgtgtttctttaccggaggagcacattcgtaatgggagaaatatcaaagatcataagagattgaagtcctttatggaagactattctcttggtgacattaaatatacaggttgctttttcacttggaataataagtaagatggagagtaaaagtgtttgcaaaactagatcggatttcaggaaatagtttgtgggctgaatcttttccaatgctaaagtgaatttccttcctaaaggggatttcgaccacagtctggctattcttactgctcatcccattcaaccaaatggtagaaaacatttagattatttgatatatgggggcacttatgctggttttatggagagaattaaaggggcctagcctattgaaatacagggaactcatatgttcaagttttgccaaaagttaaaagttattaaaaaagtcttaaaagagcttaatcaagatgttgttggtaatgtagcagcacgagttaaagaggctgaagctaagctttttgagtatcaactggctgcccaaaaagattcaattgataaggatcttattcagctgaaattaaggctaggaagacttataaaaaattaaatgattattgtacctcttttcttcagcaagaggaaaaaaactcatggattaaagatggagacagcattacaaagttgtttcatagcagcttaaagatgagaaaagtccaaaattcagtttatgcaataaataataatgatgaaaattgggttgacaatgtggaaggagttaaaaatacatttttagagttttacaggcaactcctgggtgctaaaatatctcaaaagaaacaagttttgactagcgtggtaagaaaagatctagtattgaatgagacccaaattcaagtgctatctcaatcgtactttaaggaggagatcaagactgccattttctcaattctgaatgaaaaggtgctaggacttgatggcttcataagtggtttcttaaaaaatgcttgggatgtagttggagaggatttcatcaagacaatcagctcatctttgatttctggtaagattctcaaagaaattaatacagataccttgactcttattcccaagatgaagtgtttgaatagtgttaaagtaacgccctgatactaaggtacgctacaatgattttccaattagcatgcatccttttctaatcaaaagatttttatttgaaaaacgtgtcaaattaaaaccttaattaaaattattaaactttataaacatatatatataattacataatcgggataccgtgtttaaacttttataaccattcacaaaatacgtttacaacttgttatataatgactacaaaacattgcaaaagatgtcttgagatcaaacactccaggtcgcgtcatttcgacatgtacaatcattacccgagctcgaaactcactcctatttagcttctacctttcctttacctatacatgaaaatagaatctgtgagccaatagacttagtaagaaaaacatacaataaatcatataatagcgacttgtgtctaagcgcccatacacctatccacaagccttaccaaatgattaagaacgttcttaacggttggtgctattgaccatgatatctcccactaccaatactatgatcgcattgccggactggcactatattcttaccgctatgatagcatcaatagcacccgacagtacatttagccatgatcactcttaacaagaaatatgcccatactattgaaccgacacaatggttgtgtagttatgatagcgctaattaatactttatggggtgaatatcactcttaatcagtacggtgcctgtaatgccaaattgacacaatagttgttctgccatgatatcacctaaaacatatataatcacaaacacaacatgcatatataattagttttatgctagttttacctcatttccaaattcaagtaagttggccaatctgaacggaatacctcgtgctggatggatgccctaagtcacatttacataaacgggtaaatattgcgccaaaaccctaattcgagaaacctaaactcatactaagggttctacttttgttattcgttataacgataccctaaattctacaaaaatgggaaaactagggttcccaaaattgccccaatcggtagataggttccccaacccgaaggctggttctgtggggtttcctagggaccaatcagaattccagtttctacaagtttcactgaaccggtcaactggtttagtgtaggaaacaccaaaaactccaccaacacttcaatttgatctcaaactacaaaaactttcagagcacctataccaacctcaaatagtattttccaagcaataagatccataaacacaaatagaaacaaaaagtttcattaattagtcaagtttgaattttcaaattcaaacttgcccaaacccttcacaaacctacatgactaacaacaaacaaccagaatcaacttaaaacgaatctcagaattcaacttaaaatcaaacctaagcctaacaacacctacaaccacatataacaaaccacaaccaactacaacttaaagaaatcaaagattaatggtttttagggcttacctttagcttgaactaccctaagccttgaagaattcacaaagaacaactgagagataccaagattcctcctagtttctactggaatcgagagagagagagagagagagaaatgagacaaaagtgattttaaaattttttttttttttt

SEQ ID NO: 112970 - DNA, 4319 bp, Cannabis sativa
  modified_base (1270)..(1278): a, c, t, g, unknown or other
gatttttcatttgattttcaagctgctagtcgaatgaaagatggggattttattatgtttctgtcaacaattcataccaaatctgatatggaaaagattctatgcatcatgtggtttatttggtttgatagaaacaatattttacatgataaaatgcctcaaaaaccacctgcaatttgtgcaaaagcactggtttatcttcgcaattttcagcaggttcagacttctctttcaacacctaacctaagaccatcagtagctcctcatcagccatggcaagctcctcctcagggtcagttgaaattaaatgttgatgctgctgttctttcaccaagtaatcgaatggggttgggagctattgtcagagattcaaatggtcatgttcaggctgcactttccaaaccaatggtaggaaatttcaaagctcatgaaatggaggccaaagctatttaccatagtcttatatgggcaaaaaaccagcgcctgcgtattgatattgtggaatcagattgtttgatggtggtctctgctctcaatggtttatcatctaaaacacttggttttaatgaccttattttagatgttaaaaatcaattatcctttttccctaatgtttgtgtttctcatgttcgtagagattctaaccaagctgctcatggcttggctaagcaagccttagtgatggataatgattgtatgtggtatgaggatattccccctgccattgtctctgttgttgtaaaaaactctttgcatttataataacagaccttttctaaaaaaaaaaaaaaaatctcgtgaaagttttttataaattaaaaataatttaggatactgaaattagagttcgcaaaacaatttgttatatccgtattaaaaataaaataaaaaataagaaaacacgcatgtttaaattcagtcttcgaaattataaattatcatgacaatgagtactgaaaaataaaattatttgaaattacaggaaaattgttatgcattgttgctgtaggctattgcgatgattgtcgctcttgtgcatttgtgctataacaaagatattctggaaaatttacattcaaatgtaagttatagtaattaattacaattttgtcaaacaaattttaatatatccaattattaatattattaatttaaataataaaattttacaatatattattatatttatatacctgtttcaaatgatgtggtagttgaatctaatagtttggttactgttcaagcatttgaaattctctctctctctctnnnnnnnnnttttttttttttactttttcttttgatttttgtattgttttggatttacatgatattttttttatactttattaagcggtctacaaatcgtgttgcttattatttcactagagcttcaagttctcaggctaattgtagctacatactttaattgatgtattttagaatgatatctaataatgttttgcatatttcattaataataataatagtctcaaaatttaaattttttcttatttaaactatcaagaagtttagattggcggtaatttcaaacagtcacttattgcctattttacgacagtcgaatatgcgacgtttattgaaatcgatggaaatactttacccgactgtttcaaactgtcagaaaaaaccaattttgtagtaatgtgtgtttcatgtagccctgtagacattctcccgagtgtgttgatcaaattagtatactcggtatactaggcttcatatttttttctccctttctctgaagcttcactccagctttgagtctgtccacttttcttattctgggactgactcaggcctaactctagaacttctaatttttggttcgtatatatcttctcgggagcgacactgtatttggtatgtgtagttccaaaactgaagaaacttgtttttggaggcgcataccctgaggtagagggtccatagacggttgtagttgtatactggtttcgagaggtagaatagatagaacagagaattgcagtgcagaactactcacattgattgaaggtaccgaagccactcgaaaagcacgagtgtaagcctcttcgagactgataaaactttgagccctcgtcaaaaatctgacaaagtatcagacctttgtctttgcatcttgttcgcaatcttgaatgtcataagtatcaaaatgagccccaggaagctccccaaggagtacccaacgcctaggttaacatatagcctaatgcgctaggttctactcattcgatcctggttccgtctcgagcacctaactattttcagtagtaaacaacagctacgacttgtgacaagtcaaattcatactttaatttttggcaaagtagactattggcagattggtcacaaattaggaagttttgagtctactcgattttgcggaaaagcgaggtctacgagaactggagaacgacttcaccaaaactaaaaaattgactaagtgatttcaacatataacttaggcattgaaaaatacaagttgagcacgtttctccactcatacaatgtccaagttgacgttagtacgtcaacttgggcgctaggtgctgaataacctttagtaaaataactataactccctcaatattaatccgactaatgcaattcaacttgcgttagttttaagctcttttcaagctctttcaagtcatgtctcacacctatattgcaattttgaagatttcaagtccaaaatttatcccccaagacaagtgcgatttattttcgcagattatatccgaaaataatctaatagatgatatttgagctctaaaaattggcaatcatcatccaaagtcattttcaccattcgatcatcgtcaatggccaagctcaacccaattttttttcttcatattttatggtcattttaatggacctcatttcctataaaaggagagctccactagctcatttttcacattctaaaagtgtccataaggtcagagaatctctctagtttctctctatagaaatatgagctcttgccttagttaattttcttgtattcttgcgagcaataaaaactcaaagtagacatagttttattatcatcgcgatacagagagtaaactagtataaatattttgtgtatctcttatttcctttacttaacttctatttcctctttttaatttagcgagcgagtgttggccagatttcttcgtcaacactgacttattttattcataatgtatgatcttaattctcttgtacttcattacaagatcatacctatatgaatatgaaattttaagatatttattaatatatttcttcaattataatctttttatttattttataattatatttcatatatttcctaatatattatctattaaatactttcttttagaacataaacgctaacaaaaggtctccataacttatgtcttcagttatttcgaaataaccaaagacataggtctgtaattttttttttgctctctttttctcacttttgtcttcgggttttattttttctcttgtaaaaatactaaagatatacaccatttttcaagcaatagtgaaatatgcatgcattatgataggatatatggttgaaaataatgttttacgatatgaagatgtaaaataatgtcttgggggatctttagagtaagcctaggtgttaaagaacatgtgagggacccaaaggtttaaattcatatgaagaaaacctataaccaaactcatgagtcatgttactttgttagagtgtatccgctcgcagtatcaaaacctagtaaaaaacttgttgaaatgaacctgctaagggctccttagagtaagatcaggtgtggaaagatgtgtgatggatatgagtataaccatgaacaaaatgcatgcacattaattcctaattaaaaactaaaaaattcaacttaaaatgtttttgcttagttttaaagaacaagttttgtaaagaagaggagcacctgaaaaaggcatctcccgcttagatactaaaaaaagaagatagggtaagaatctgaatggaataggaagctgagatcgttgaagatactcaccatcacagccacaggccatgagcgctatctgtgactcttgggtcttacaacatgacttaaattagagccttatacgtgaaagaaggattgttaagtggcattattgtttagggtaaatggcggaaaaacccccaaaacttttattttggtttcacttaacccccaaaacccaaatttggacgataaaacccccaatactcgtattctgttagcaatttaccctttccatccatattaggtgttaagtgccatgttgga

SEQ ID NO: 112971 - DNA, 1743 bp, Cannabis sativa
cataggatctggtctgttttatttgtatttttcttctcttctgtaaagctgtaataataagtgtgacaggggggatctaatttaacattcctcttactcaattctcttgaatttagagttccttgaacttctacaagggtcaaggaatcctccatactacaatgtctatttgaaatgattgtaagatcttggtaaagatcataataaaaacaaagtttgatcttcatcactaatagatacatctatattaattctccaaattaagacttagttagttaaagatatctaacttttttttagacgcctatcttcttgaatttaaatgaatataaggcttgctttagatagaggcgatttaccagagactttgtcatgtagaggctctcaagcttcgactaaattcgtgatattgcagatttctctttggaggctagtctgaacatttatctccaacactcaatataattgcactatgagccttatcaagaatcatcttcttgtccttatcttcaagcttcacgtcgagaccttcatctccttttagaacatcttccaggctctgctgacaagaagagccttcatctttaatcaccataatccaaagtcgacgttttgtccagtaaatttctccacttcataatttgtcgatcccattgttttgagtccatgctcaccgcaccaatttgttgtggaatcgatccaaaaatcactacaaatcacgaacaagatcacttaatcccagggtgatcttatactagtgatgagatcaaattacacacaaagaagacagatgaatctcatacacattcaaattgatctacaaacaccactttattttgtttcatgaaattcctcccaaagtgtcacaattctctcattcattccctctttactactacaaaaataggctttttatcccggtttttaggggcattttatctcaatttttgttataatgaaaaccggaatatatgctagtgggataaaaggtcttataaaaatcgagataaaaaaccacttttaatctcgattattataaaaaaactaggctaaaaaaccatttttaatcccgattttcctttaaaaactgggataaagagtgattttttatcccaattttcctataataaccaggattaaaggtaaaaaaaaataacaaaaaaaatttactaaaactaataagcaacaaaccacactacagagaaatttttttccttaacaatatttttcataaaatatacaatcaatacagatttaaacctcaaataatcaatacaacacacgaattggtcaaccaccaatagcgacgaactaccttcgacaaccgtgagtcattatcaatgatcacaaacaatgaccacaaagctttgtccaccatgaaaaaccatgaacccatcgaccacgaaccttcgcacctgaggaaagagagaaggagagagagttgatcagtgttttaaaaaaaataaaaaataagtagaaccaaattagaggacgtggagcacagatctcttcagaacaaaaaagaaaaagaagacaaatggtacctggaagttttagaggggatggagctcggatctgaactccgttgactcatcctttgccagaaaaaggtcgctgacctgagataatgcacaaaaatagaagaatagggaaggactgaagctgagagatacgccatggcagaacccatttgatcttcatgtgggcagccacttagagagagataggagagagagagagaga

SEQ ID NO: 112972 - DNA, 1971 bp, Cannabis sativa
aaattaatatcataaggcggttaatgagatggagaagagtacatgtgagtacatgtgtatgtgtgtgtatgtatatatatatttatttatatccaaggcaataacatgttttggttagggaaagcaaacaagaaatgcgttatatctcagacaatcaagattgaatcgaaagcagcttcgagtactacagaggatgcaaaactataggttgaggaacaaaattcaaacacaagaaactgttgaggagaactgaactagtgagaaggatagaaaataatggattgagaaaaaaaattcaaacacaagaaagtgtcgaggagaactgatcactagtgagaacgatagaaaataatggattgagaaacaaaattcaaacacaagaaagtgttgaagagaattgaatcagtacgaaggatcaagaattattgagaaaaaaaatcaaagacaagatcgatcagaaacaagaaaaaataaaatcagagaagaaagtaaggaagagaaatgaactgcgtacatttgtagttggaggaattctatgttgttgagattcaatctgcatgttgataatgtatgttagtaccagcgttaatcgtgtttgagtgttcttccgaactgatcagcatgcatacgaggattcattgtttggtttctccttggaaaatgtcgtaattttcttcaaacattctacttggcgcgtaaaaactttccaagaaagttgttagatgatatcgttttatactaaaatctcaaaacaacggttcatgaattatccctatgagcagtttggtttgttgtcggtgacgagtcgagtgaggctttggtcttcccttgtttaccctttctcatcacctttattttatttttcaaattattctgtgaaatgtgaaacaatataaagaaatgaacaaagtgaagagaccataattttgtgtagatgtatgtgtccttaatatattagtgtcattttgtgtatatttatatgtatatgtatatatatatatcctcatgctgagcgaccttgagctcgatatggcattattcctcttaaaccagctccacactctcaatttgaaacacaaatgtgatatcgccgccaatctaattttatatttcttattacttgggattgggacccgcttcgattgaggacgagtttttagaaaatgtaaatcgacttaggtaggttcaatcaaaagagattaaggtatctacttacacttatcaataacgacaagaatcaacttttttggttttttgcttactctgttttgaaaaaaataatatcagttaaattcccatcttttctggtttaacttttcttcaattattattgttcaatggctttttcgcattttagttcaatatgttaccttaattacagaatatagcaaacttacagaataaatatggcacttgtatttaagtacttatgcatcttttcacaatttaaagggacatgggttttcacctgtatttagtgtaggaattgattatgtgaactagtatatacagttaaacaattatatttagttagatgtattattggagatcataataggatataggatgattttttctaagtaaatagatctccttggacatgggactaggtattcggtcacgcacactcaatttgacctgaaatcaaggccacccatgtatacacaagaaatattaaggaaatttacaaactaatattttgtaaattttttatagggtaaattgcggcataaatatagacacgtggagggttcagatgcattacatttatttttattttattataaaacttaatattcttaatatcataaactaaatgcttcttgtttccaaaaaaaattagttctcataataattttcccatgatattggtatttcaattcgataatcatgttccatatattgcactagttcactcagctatagtaatttatctctctctctctctttttttttttaacaagtagtatt

SEQ ID NO: 112973 - DNA, 1780 bp, Cannabis sativa
acgaatatgtatcaaactagatattagggaaatgctgttgagctatgaatcgggtttcattcataatatcttattatacaatacagaaattaaccatagcaatcacaaccagaagaagaataaataagaatcaaaagctatttaaattgattagagagagagaagagaggtgaatccgtacaagtcctgtgtcactgtgagaagtaactgtaactttctgctccgtgctgtaatccttaactagtaaatctgtaaatcaagccaataaatcaaagacttggaaatgaagagacagaaagagaaagtacacaatagtacctttggctttcttgccaatgtcagagaataacccaggtccttttgccgccatcttcaggcccggggctgctccggtaaactcacagcaaaacaaatcttaagattctaatttccagaggcagcgaggaccgaggaggaagaagacgggggtttatacataaacccctcttccaattttcgcagttttaaatatctggaaaaaaaaaaaggccgtaaaggaaaactttacttgatttcggcataaacgtattaaatagttggaaagggtgctcgttacgagtcgaactcaagacctcccggttaataaacaaatactctggccaactgagctacgagagctggctgtcatgcactattttctttttccaaattagttcattactttttccgcaaagtgatcattaatagacatttaattgatttatcattgttttaacttatgattataatatgtgaccttatattatttgtcctatatatctaatacttaatataaatcacgttacattatttacttttcctatttatagatactcccctgtttatgatttcaaatttgaaaagttagttaggcaaagcaaagctacaatattattgaaacttcttgcattgcatgtgtaaataaatgccagcatgttcatataaaattgaattgattactatttgattttatggcaacgaaacgaagtagcataatttctaaaatacctaaatacacgtaccctggggcttgagatgataatcagtgctatgcctatacatcacaaaaataataccaaggaaaaaaccaatattattattcatttaaaaagaaaaataaacagacaaaagatgtagaccttgcatataaattataatgttggattgtttacatttgaagaatgagttattagatcttgaaatttgcaataattggatgaatatgtgttaatgttatgaacaaagaagaaaaaagtaacagctagctctctatgcgcgcgttgcgtggggtgacctgtagaaatgctcatgattgatcacacagtacagacaccacgtgcacaccccgtcggcaaaataaactaacaatttctccttagaacggagtacgtggcccaatagacacagcgttttcaataccataacacaatttgccatggtacgggggaaaagcctcggttaaaaccaaaccatggagaagagaagcattcacaaaaagaaaacagaccttcttccaagctttttctttttctttttccttttctttttcgaataacgaaccttctatgcacgcgtttaaagaggccttcgcacgtgctcactatgttatagtcagttatgtgcacgtgtcagcccagcccccaaggtttactccaggtgttatgttaatatctctagctactcatccccttccttgcctgggcctgtcctttctccattttttttatttattattattttctcacttttcattcacttcact

SEQ ID NO: 112974 - DNA, 6635 bp, Cannabis sativa
aaaatttgagtgctcaatctacgaagttgaatgaacctggtgcaaaatttctatattctattgtcgtaccttctgagcagtggataaaactgaatataaatatattgaaggttaaatgtgatgctataatctttttcttttgattttattatagttttttttgttaaatgattcgggaatctagcagccgatgaactgactcgtttttctaattttaattctgattatgtttccaacgtaagatatgttccgattatattgtatttattattttaacggattgttattaataaaattgcataattccttaaaagaaaaaagaaatgagatgagacgtatgtattaaattgaattaagtcatttacataccatgatttataagggtagcaataatatctattattaatttgtgtcatataattaaatatcaacttccacattttttttttcttttcttttataaaaactttcaagaaattttaatttaataaattttacaaaaaaaaatactaattatttgcaaagcgtgctaaaaatgttggatacatgcggatgaaagtcgaatcaacatgatcttgttatttaaaaaaagaaaaaaaaaatgtttatatttggagactaatatcttattatatagatatacaaaaaacaacaatgaagacttgattgatattgttcttaaaggactactcaattgtgttttacatctcatcaacatacaacaaagttttagttgacttcaaatatagatgaagaaataactcatttctcactttttaacccttctcaaaaataaattagtggccctttttcttccattttttctttctataacattgctcttctgcctgaaaattacaaggaattgaacaagagtaaaatgcccatgaagagattggccttggccccacatatgaaaagtataagaaagaatcaaccaatcattttagctgtaaaggttttagattcctacctaaaaaggtagtgaaacttgaatgagttcacacttgcaactttgattcatctaagatcaactcaatatgaaaatttcaatcaaacataagaaggcactcagctcaacccgaaatacagatcaagtacaatacatttactccgataagctagtacacccgaaagggcgaacaggggagaacaaatgtcatgggaccgacataacccgaaatactcaactctgcaacattcaccactcaataatttcattctttaaaccaacctatacatataagcaacaaatctctaaatttgtaagctgataatttcatttgtttataatgaagaaagaagagcaatgtaagtatatgtacaaggaaacaagcactaacaaaatgataacattgtaatctttgatttcagttacagttttctcatgcttttgtgaatctaatactaaaattaaagaactacagaaatataaaccaaactatttgaataaacaaattaaaaatgaaaaaaatgtatagagatctgattctcctacctatatcaacagaaaaacgaagtacagaaactgcaaaatttcgggtaagagaaagagataccagtctctctatcctttcgagatctctaaacatgtatcgatcctagttacttgttatgaattggattggattcactagaaggtgctgcttttaaacttgtctcaacagatctcagaggatcccccaatgtccttttattcaactctttcggatttgaagctgataaaacgagcagcaatcttctgtgttggtttctatctcttgtgtgaattcgtctctcttcgagaagtgacaatgaagaagaagaagtcactagagtttgcatgagaatcaagacaaagaacaaaacgagatgtatgtgaatcgttttcatggctgagatcgggcaataagaagaaaaagcagatagtaatgaagtgttctattatctaaaaaaagtgagagtatacattacatgttatgtgaaatttttaagctaaagggtaagcttaatatatagatattagctcaatatataactaatttttcttgctgacaagatttggaaccaacaactagtttagtcaaacagtttcttgctgaaaaagttacttagtgttttactatgacagatgaaaacttttctacaggctggtgacaaaatgacagaaaatcctatgtttctgactattcatagtagaagcataattattaagagttggaaatactatagtattcatgattagatattttacctgttccttgtttgttctgcttattctttagaacttagtagtagtagtagctgctgatcatgtgatgcaaaagttaagtataatattctctgacttgtctgaaaaataaaatgaaaatgattaatttataaaatgactcatgtgacaaatcacatgagaccaaatcagtgacctctcattttcttgtacttctttgttttaataagtaaaaatagtacccaaaagcataatgagtttgacaagtacagctaaagttggctgtggaaatgaaatccacatcatcatcttcataggaaacttccctgttttcctttggcaaatctttcttcttctgataatttccaaccaaagtcaaatttcttgactgttattttggaaacctgcacaattgaagaaactcaagaaaaatatttcattagaatttttatggaccaaatttaaccaagataaagttttaaggtgtttaaatatcgaaaatgaaaacagaacatggatttcggagagtagaaagtggtttcattcattagtgaaccaacccaaacctaatccatctacattctccaaaggatattagaataatcatttctaggatttgcttgaataaactaagtgatttgcatcaataatttagtcaaccaatctacttaaattaacaaggtatggagaaagcattttattgcttataataagttgatgagaattacattacaagatctgatgatgaaactcctatgctcaagctatcaagttgttattttacggctacaattcgaaatacatgtggataaaaagattctctaaagaaaaaacatgtggtccatgttagtagcactagtgtagatgaacagtgttgacttaactcaatcctttgagtttgaatgcatactcaaacactgtataacttaaattagaaaacaaagtaacatgattttcggtaccaaacgtgctagtaaacaagatggtattttattaaataaacaatttcatggaacttgagtcaataagatccattaggatggtctttggtcccaaggcttacctaattacaagtcgaaattctcaagctttgaaaacttggaaagatattaagatctaaccttatgtattaatcatataaagaataaatatctcattcaatttcgcaatcatcagacaataatacagacgcattctccttccacgaaacactgctatacccaaattgtcttgtgaaacaagaaatcaactgctcttgaattatttcttctgcgggaagcaccgaatttgtctcctttctcaatgatgtaactcctttatttgcaatcccacatggcacaatgtgcttaaaatagttcaaatctggatcaatattaaatgccaacccatgagaggtgactgcatacgaaattttaaccccaattgcaccaatttttctctcaccaacccaaacacccgtttcacctgcttctccaggtttagctttgacaccatacaaagatgccaattcaatcatagttgactcaagtttctccacataactcctagcaccaagtccaatatcccttaacgaaacaatgggatacaatatcgcttgatgtggaccgtgaaaagttatatcccctcccctcaatgtatagcataattcagctcctatactttttaaatcagactcgggaatcagtaaattgtgatcagtccttcgttttccaagggtatatgtaggtgggtgttgcaaagacaaaatagtatcgggaatcttattaactttcctagcacttaccagtttgtcctgcagtttatgagcttccaaatagttgacaatgcccatcttccatacctcgagatttcgaggacctctcattcccctgtatcacagtaaaacttcaatattacaactcggattaatgggcatgtgtttctttcaattaaattttcgttttttgatcacatgataaccactcatcactaccaaaaactaccaaaaacaatattaaaagactcaaattctattaatggaaaatttaatggggtccatgaggaacacaatttgtttatttatttggcacattagcatcacatgcctttacacctatttaaaatataagggagtttcactactaattaccttatattttaaataggtgtaaagcatactcatatatgacttgtgattcaactatatgaacatagccaaaattgaaagttcatgagctaaaaattgagccaaaaacatagctgggaatagtaaagtaacacatttcaaaacaaagtgtgaaatcaataatgatgcataagaacataaagtagttagaaagcaatagtattaagattatgattcaagtccatcaacacacaagaaaactttagttggtttcaaaatatggggattgagcaaggttgaacatctacttcaatttcaaatcattaacaacatgaataacaatcttaatattttcttgttatatacataatcaaagaaagaaaaaaaaaatatcccttttggcatagagttcttactcaatcacagagaggctctttaaccataagattcatcttttgctgaagaaatttgagaacatcatctcttccttccttaatcaacaactgtctcaacctccctaaagtcacaccagaaggtctaattcccttctctatcatctcctccattaaaacacaagcttgagtagcatcacccttctcacacaacccatttatcaaaaccgaaaaagtatgcatactcggaacaaacctcttcaacttcatatatttccacactttcaaagccatctcaatctcatccttctcacaaaacatcttaatcatcatcgtatacgtgtctgaatccgcctcacacaccttaatcatcctcctaaacaccttaaacgcctcttcagtcttccctctaccgattaaaccatttaacatcacattacaagtcctcgaattaggcataacccctttcgaatccatatcattcaacaccctataagcattcttaaaccgatcaaccttaataaaagcaccaatcaaagcattataaacaacaacatcagcttcaacacccttactttccatctccataaaagcatcaacagcatcttcaatcctattctcaaccccataagtatgaaccaaaacactataaataaaagaagttggtttacaaccattacaatccattgtcctaacaatcccaatagcttcatcaactctcccagctttacaaagaacatcaaccataataccataagtaacaatatcaacactaataccaaattcaatcatatctctaaaaatttctctagctttaggcaaattaggttctttcccccacccatcaatcaaaatactataacttttagaatctggctcaaacctacccttcatagaatcaaaaacctcttgagctttcctaacattcttagatttacacaaagcactaagaagcccattaaaagcaatcaaatttggttcaacaccatacttttccataacattaaaagtataaagagcttcatcaattttctgagctcttgtatattttctcataataatacaaaaagtttcaacatttatcaattcctttgatctcatactactcaccaattcccacattaactgatactggcgtattttagcaagtgacccaatcattgaatggtaagctctgacactgtgggaggcatagcttctctgcttggcagcccactcaaagaatctgtaggtgagcatcccagcattctggaatctgacaaggacttgttctaccatctctgttgaaaccttaactccagtttggtctagtgctgtttggattgatgcaactgggtttgacatcatggctttgcagattctttcagttgggtctgggatttccctcttgggttttgtggaaaaattgaaacttttccataagtttggcttggtgcagagtttttcaactttgttaaagatcatttctttttgatgaaattttaagaattgaggctttttttttctaggatcagtggagcttggtgaattcttcaatggtagagagagaaagagagcgttgcgttaggcaaatattacacagaacgagtcgactgagtcggttgggagggcggcgacggcgagtcaagttcacaactatttttatcacctattttgagttaatagttagttaatttctttcataaaaaaaaatagttagttaatttctataattattattaaattaaaatatatttgatttgatattaaattgcatgatactatttctaatgtcctttcatattaatctttttttatataaaaaactagaaaataaagttaaaaaagttaatgttaatttttaagaagtgtagaatttatttctttttattatcaaatcgtttactagggtttttcgttcttaaatttttagccatcagagattgtcttt

SEQ ID NO: 112975 - DNA, 4089 bp, Cannabis sativa
aatttaatattaaaaaataaaaattaaacattttaaaaaaattattaaaaattgaaaatcaattcatgattaagaaaattacgtaaaactaaattaaaaaaaaaataaattatctttttcaaattaattatacatggcgttgatatggtactgatgtgacaattagctaagcagttatgtcatcattttatttgccaaatgtaataaaatttcacacagagaatgagatctttacacaatacactgtgaatagttcaaaaactattttgaacgggcagaaaaattcaaaggcacaataatgtatatatcataattcgagagtaaaaatctaaaatagcaaataaaaaaaaattaaaagtttattaaaatgtcaaaatccataaatcaaaacaaattaataattattatgagaagtttattgttttgtgtagactatgtcccattgtttaacaaactactccctagattgtggagtaaatgtcttttggaatatgaattttttttgtttgttgctagtttttctcttgtggatatttcttcttttacaaggaatttaaaaatgagtttttttttttttctctataataagtaattaatgacaccaatttacatttttactctaaaaaaagaaaaataaataacaatagaaaagaaaactttttattttcaaaaatatggtttcaacaaaaaacacagaggcatgcagttcctccttctttgtgacccatctgaaccacactcatctcaaatctccaccatttttattcaaaaataaaaaatttaagctgcaacaaaatgtagatctcaaccaaaaaaataatcaaatctcgaaaaattcaaatacaaaaggaaaaatgaaaggaaaaagaaaaaagaacacaaagatttggacctccatcgataagaaaaaaatgcagaaacaacctaaaatcgaaaattcaaatcgaattggccagagaatttgaataaaaggagatcgtataaacttcgaagcttactcggaaacgaatcagagaacaaattcaagttacataaatttcaaatgattttcttcttaattaagttatttaaaaagttttcttcatggttataattataaatattttttagattgtggaaatcagataaagaattaatgatatagaaaattagttgatgttaataaacaaatgagattagattataactgaaaaaatattaatgcatacaaatataatcaactgtttttcatgaggaaatagttgtaaatatgttgtttttgaggattataatgtttgtttgtttacaaatgaacaactattgttgaattaaatctcatttacggttgatttgtcagaaagcaattattttgatagataaaattagttgtttagaactatgaacaaaatttgaaaaaatatataagttagttttttttaaaaaaaaaaaaataaatacaaatatagttgaattagatgttatctaatgtttattgaaaaaaatagttgtttataagttttttttattagattaaaatatttatttacaactattagtactaaataatataacgaatacacaaatttcaagacatggaacctctgtaaattttagtacagagcaatggtcattgggatgacaataaaaactatgttgattacgaatcaagtggagaattactatcaagagatttcacttttgatcaataactagtgaaaataatgatggacaaactacaatgcaatcctgaaacaacacaaatacaactgaaatatcatctgaaagaagaatgccaaccactacaaatcaaggatgacaaaagtctgttgttctacataaatctattacgcaaaaaacttgatttcacacggtaccccattgtgtgtgaacataatcagcaacactatgataatgacaacatatcacaatcactaagcataaacagatgtgtgattcttttttgctcactatccccagatcataagtgactcttttcactttggctctacttttttaatcagttttttagatttttggtggctcttttttttgttgtacttttgtttcgatcgatttctttttatttttggatcggatactcgttagagttgtttggctctgataacatgttagaatttagaactgtggtggacaaaggtagaatagagtgagtgtttgggaagatggatggagtttcatctaaaaattaattggtcatgagaggagtaactcatgaatcttatatattctattatctttctacacattatcaatgtgggactctctaacataaacccccttacatcttcgcctcaattgtctacggtagtgataattttaaaattgaagataaataggcttaacaactgaaattaaaatttatttttgtagtagtggtgcctaatagcaatgctaatgagaaatagtaaggtgcgtcttaaggtgtcaagtaccacaagatgtgacataccattattgatgcaatttaatgtcaggtcgcatacgttttgatttaataaatagcataggaaactgataatcactcacaactcgccacatcagtatagtggtataatgttgggcaacaagagctattttatttttataccaataagacttgtaattattaccttaatcattaaagttaatatttttattgttactttaaactttttaaaatatcattaaaatataaaatataaatttgtattaatttttaatatgttgtatcatttagaaaacaaagtacgcgactttcttaaaaaagtacaccctttgatttaaatattgagttgagaaatgttaaagggcactcatggtgcttaacatctttataaggtgtaatattattattaatgtaatttaatatcgagtctcatttattttactttaatacaaattataaatggacagttcatcgtggtgctagtagggctaccaaaatgggtcagatacgataacacaactcaaaatctgcacgagagttagcggatttgggtttgccttatacggtttcaagtcgttttcgggttgactcgtctaacctgtttaataaacgggccgtgttcgggttgacacgactaacacgaaactgactcattaatgacctatttaaagttattttagtactttaacaggtcataaatgagccataaacatgttgaatacttcaaaaatttgttattggttgacatgtttaaataaaatacgtttataaacgagttatacgggtcgtattgtgtcaacccatttataaatgggtcatgttagggttttattttctgacacaattattaaatgggtcgtgttcatatcgagcatatacttattataataagtatcgatacaacacgaatacgacctgtgaatacaaattgccaccgttaaatgctaagcactatgagtgtctcatagcaatattttattgggtttgctactagtgggaataatatcctacctcatttttttttctttaaataaaaattacctcttaaaatttatttttgtcactctcaaaaaaaaaaaaacaaataataaaattgtcataatttacatcaatatccaccttaaatttatttttcatgattaacatggaatttggaaatatggggaggcaggccaacaaacaaggttttagactttgaataattagtaattaattaattaattaataataattttgaaagttgaattaatttcccattatttttggtgaggtgagcatggaggtagcaatatctcatggttgatttccttttccaccatccgtgaaacaccaattaaagaagccacgtgagtagtcctctaataattaatctcatttaattatttaacatcaaaatatataacatttttatttaataataataaacccaaaaaatactttgtcacactcactcgtcatctttggtttattggatggctttatttacttggtaattagtaactttgaagtatacatagtgagagtggaatggaattattttatggtctaattagtttaatatatatttatagggataagattttgtcccgttctgtggtacattagataggtatcagggtacattaaatgagtgtcaatgtacgtttctactttttaaccctaat

SEQ ID NO: 112976 - DNA, 1503 bp, Cannabis sativa
gattggatgatggtaaataaaatttaacatctaatatataattggatattggatgtgatccaatgaacacccctactaaagggtgtcatgagaccctcaaataggatgtcttaacttatttgacatttataaatcttaatcaaagtcccaaaggttgacttaggtgttctaaatgtacttttggcatgtgggtccttgtgtaggaataatcatttttttttttttcgaaaattaagtacaacaaatatatatcatcaaagcaatttttttttaaaaaaaaaaatcatcaaaagcaaacttaactcatcgttttttgaaaataaatattaggaaatgaaaaatctataatgataaaacattatacaggtaaaaaaatactaaataaataatgagaataatttacccttgtatcacttaaaaaataataacggggtttatttttttaaaggtggacaaaaataaacttaaaaggaaaaaaaatttcttagtagaatttgaacaatgccctatattctatatataatcttgcttaatcattataccaaaattattattatatctataattattattttttattacaaatatatgtcgtaactaactaaaatatatattttctttagagacgactgccgtcttgcactcgcttttatatgggtctgcttatgactacaattcataactatctttaaagttatgtgcactcaaaatgacaatctaacaaacttaaattcaatctcaaccgttcaatctcaatgtgttattgatctgcaactacaaatttaacatctcaagtttctcaataatttactaaggtctcgttaagtataaaataagtataagttttgatttatttttatcgtttagataaatattatatgaagttattttttaaatgaaaaataattttaaatattattaaaaaaaaagatattttgagagtaaattagaaatgatgtaaattgttttaattttaaaaataatatttgtagtttattacttaaattttttattttttatccaaaaaataatttttttaactctaaaaatgctaacaaaaaatatctcaagtatgtttggtaggaggtgttcgaggatggagggattgaatatgatgtatttggcttatccagctaaattttaaaaatttagctcaaaagtagtaaaaataggtctccatcacatgctttactctatatatattttagctcaaataatataatatatttattaatgtatttaaaatatattagtttaataatatagattaaatataaagaaacacatgtataacgtaagtataaggtaaaataattataaaaaattagaaatatattttgaagaacagagtatggtgatgagagtgctcttcatcaaactcatcctctatttttgttaggggtgtttactgtatgggtggtgtgagttgcaatttttttttctttcaaaccaaatcagatatatagtttttgtaatttctcaaactgcaaccgcaccgcaaga

SEQ ID NO: 112977 - DNA, 2048 bp, Cannabis sativa
tttttttttttttttttacttcagattagcaaatcaaatgcgagatagagattttcttattcatctttcttcactctattccactgctgatatggagaagattctatgtattatgtggcatatgtggtcagatagaaataattttgtccatggtaagctgctacagagtccatttcaggtttattcaaaagttgtggtctatattcaaaacttctagcaatatactagtgttgaaatgcctgatgcaataaaccagaatgtaccagctgcacataagccttggttacctcctccagagaacaaattaaaattaaatgtcgatgcgacggttgattctttgaggagcaaaacgggattgggtgctattattagggattcccatggacaggtgcgggctgctcttgccaaaccagttattggaaattttaaatctcaagaaagggaagcaaaggccatgttttatggtctttcttgggctagacatcttggcttgccaattgactttgtagaaactgattcgttgactctcgctaattctctaaatggctcttcttcaaagctctcttgttttcaagatttggtgttggatgttgcacatcaattatcctatctctcttcaatttgtgtatctcatgttagatgagatgctaaccaagccgcgcatggctttgctaaacaagctttagtgttggataatgattgtatatggttagaggaaactccttctgctattttctttgttgttgtaaatgattctttttaatttataataacagaccttttcttaataaaaatatatatatattttatttccctttcttttattatttcttccttccatgttcttcataactagccatcagcataactactaccacaacttcaccattatcaccttcacattacaaccaacaacctttattagatccgaataaaagaaaaggacaaacacccatttttgtgccccaaaatagggcaaacacactccaaaccaaaatatctattcatatacattcaaactcaacaaaaaaatttaaaacaaaagaaaatgcccagatctaaaaattacgaggcttggaacctcgacaatgacctctgaaaatcatgcaatcaacgattacctctgaaaaccaccgacccaaatccccatcaaactcaccatgatccaaatcccctaatccaaatcaccatcaaacccacccaatttttagcattatgttcaatcctggtacatcaaaccatctcatctctaattcgtccttagcgtagcgaagaattactcccactctcaatacattcaatgaatatactcccacaagtgatcatcaacctaatatcatctccattgctaagaaccatatatgacacaaaacaaaacatttaaaaaaaataaatgacataaaagcaagcactctaaagataagttttaagaatcgtgattgtttagggtttatgtttattatggcaataaaagacctgcgttttaaagaaagatttgaataacgggcttttgaatgggttttggtcaccgggaacagagaacaccatgttccttcacatcgatgaatccgaaactgaccagagaaatttcaaaggcatgacgaagattctcggaacataatttttgatcaatatcgagcttcctcttaccccataggagtccaacaccaccacaaaaaacatcattataatttgtacactattcacgacagaactaatttctggtgctttgttcttttacgctttttcaaggttgccccatcaagaccttcgtcgtcgcctaagcaatgaggcaaagggagaagggagagagaaacataagagagaaggggaggagggtaatgccatcgccagagcaggcaggtcgagagagagggagaagagaagtcacttttaataattttttaaacagttttttttcttaatcaatattttggactctgatcatacctgaactcaaattccccccgccccccacggccttggtgatgaacccggcctctgacccgaacccgaatccgaccccagacctagaccagacttaaata

SEQ ID NO: 112978 - DNA, 5106 bp, Cannabis sativa
attcatgcaaggctttgcataacagatttaagaacttatatccaattttgttcaagtttactaacgcaacgattgtccatgtattaaatcttgcctctcgaatttttatatctatcaaattaaaccctctgaactttgacatgtaccaaatcgtgtcctccaaactttgatacgtatcaaaatgtgtcctctaaacttttatctatgttagactttcttcgttagtaaaattagacaaaaatccttaaatacaataatcttcatgtgtgtcgtaagccacaacaaatttactaattatttttatttttatattaccaattacttcagtataacggtaaatacatgtcgatcacacgagaactattatcaatttattattcaaaaatcaataacaggaataagaaaagggagttttaattatgggaataaaataactttttttaaaaagcaaattaaatgttatactacgatatgagataaatagttaaatattattcttcaccctcaacaatcattcttaacttttattaatgaatgtaattttaattttctaatcagactattaatctcacagataaaattgaaacagttaaattatctcaatctatctattacatgtaatcaaggtgaagcactcaataattaacttttttacctaagtagtaaatccacaaactatgtaatttatttaacttatataaagcttttagatttatggagatagactaatctatgcaataaattaattaagcatataatttatttaacctaagttctattcttcgtcataattaaaatatacctttgacaatattagaaattgtaatttatcacaaacacttagaattttaaactattaggtgaatagtaatcctaagatgacaataaattaaaataaaacctaatttagcgatcatttaaacaagattaaaacaataataaagatattgaacatagaagatcaatagaaataatttgatataatggaaattaaaaattaacattcatcaatgaaattaaaaaatcatgcatgtcttggtttttgaaataacccttaactaagaaaaactactctaaactagacattataataaaaattaagactttagggagaaaaaaaagaacaatgatatgcagaacaattgattttgcaatctctttcttcttctatctctctctctctctgagtttctctctcaaaaaagtagttcaaaagttgctaaaaacgaaccctaaaagtcctataaatatccctaaaactctcagttaaaaaaaaaagataaaaatttaaaatttggcagaaatcgcatccccgccgtggccaagagaggtccctcaccgcggcgatagcttgctaccaaaaaaatcctatctcgtgtttagattagtattttggccataacttcttcaatacaacttagaatttgacgattcaatgtgttctggaaagctgagaacgagatctacaactttcatgttaaactccaagtccatttctacctttaaagtcatctaaatttgcaaataaattctatcttctcaaaccgagcttgccggtttccactatttttaaccaaaatgtgctaacatccctttaaatgactctaaatgcatgattagtctttaaaatagcctaacaaattataatcacactaatcaataatttaaagaatcaatgtaagaatattaatacataaattagctatacttataagacaaaatatcgacttatcagaaacttttaataaggtataatttagtacacatcaaaattcaaatactaaaatcctataataagctaaaggtgtacattcgagccagacttttatattataataaattattaatagtattgatatgcttaagaaaatactacattttttatggcacaatccatattttgaaaattacggacaaaacaaaccaaaaattaactgactagaatggtagatgatgcagtcaatagtaacaagatatctaactagaagcgaaccaaaaaggaaggtgcgaccacatgagcattgtcacggctacaggaggaagttggtattggaggaaacttgttgccattaaagataaaatgaaaaacttggttgatagaaatgccattacaaacagcaggtaccaagtctcccaaggatatcaactacttactcatgttgttactaaagttcattggagttctattgtttggagccgtttcaatactcctaagcatagtttcatttttttggctaaccatgcttaagaggatcaaaaccaaagataggctccaaaagtttaacatagccatggattcttgctatattctatgcagcaaatggtgaagaatcattttttttttaaagaacctcagttcgaaattgattaacgctaaaagaaatcgggatgggaaatccctcccctttgaaattctgcctgccaccattacaaattcgagtggacttggctaaactatccacgtaagtaaggcaatctcttttagcaaaaacaacatgacagcaagaaaaagttgataacaactgtaagataaaagaaaaggttgcagtcagcttccaatcaggagatcttttcacacgaatggctccaccaaggctctagaatctgaaataatcgacaaattatcccactgattctcagatgcccaatttaaacaccaagcaataccgcctgcatttgaatcagttgaacatctttattttgatcgctctttcttaaagaattgtctaaacctagtaaaaagttggttgaaatggaacgtgagttcaacctcattgtcccgaatagtcaagtggataggtaagggaaaggtaagcaaattcaagaagaaggttttagctgctgcaattgccgccctggtgtacttcatttggcgaactagaaacatcaagttttgggagagcaaaatggagaatagcaatacagttgtttctcaagttaaaaatgtaactaaaagtagaattacttgtatatggccaaaaaaagtctctagctagtagtaataaaaattagtttgatacattataaattgtataaatatttatgtcctctttattattagaagatgctagtagatggtacaaataaatagtgatgagaataataatgatatatactatccgaatgattaaaaaaaccacatgagcatttaatctatatatatacgcttaagaaaatttacatcaattaaaaaaaaaaagatggtttagtgtcccatataaggcatctgcagtgtatatataatatctttttttgttgaaaggaataatacacatgattagaagaatgtacacaaaaattatatgtacatgcatgtgtgtttcctttttgatttatattattattatttttggatggtgggtgcaaataattattagataaaacattcacgcacaaaatgcttgtggaacaatctagggatgattgtgctagctgcagtagcagtgtagcacaacctgttcagacacaaaatcatcatacaatctctagctacttcttttctcggatttaattatgttcaaatatttcaaagatttacttcttccaagatttgaatcattgtttgcgtttatcccaatttgaataaaagtatattcatatgtatccaaatatatatggaataaatatgctactaattatctctaacttgtagactattaatctatagaaattagaagatatattttcatttttaccttaaaattacaccgttgtaatgtaattacgtctaattacctttaactacacccaattccaattttttttggcttttcaaatgcgacctataaataagtaagtatatttagagtttcaaaattttgtattttatgaaaccatagaagaaataagaattgactgaagaatacagcttgttcataaagaattaatttagatttatgaatcgaatggtaatgaaaacatatgggacaactggacaagcaagatgtataagatgtagagttgttggtggctttcaggcgaaggcaaaatgaattgagttatataccacttgatatatataatatgtgtagtgtgtgtaacccatattacatgtgggtttggtacgtacaggtaaggtgtgaagattacgaaaatagtttagaatataaaaagcttatttaaatccatatgctaattaaacatttgtaatgatatataatatggcataataagtaataaactagttactttggtttggtgacgaggatattgaaagttgggtgaaatcattaacgtttctcaccattattcatgataccttcaaattaatgaaaaattataaggaaagaagtttagtagagagcacacactttgttcgaaccggatcatcaaaatagaaaataaaaatagcttcccgctggctccatcaatcgatcatataaatagtaaaataattttaaaatatatatatatatatatatgtacgcgagaattttaataatttaataaatgctatatttagtgtgattttattaaaaaaataaataaataatcaatttaactgtcattgtaagagatactttaatttgtttttggattgtaacttttataagactcctaagtttaattctgctgcccacaatattattaaataggcatgtagtgaacattattaagtttattgaggttttcacaatttcaagtgagaatatttgtatatctaactattgtgttctttatatgttggcagccttatatatttattagacgtttttttaaaaaaataaaaataaaaaatcagttaggatttaacttaggtgacgtttggtaacatttttttaattagttttttgttttaaaaattgaaaaagtaaaaatgttttttaaaaacatattctataaaattatttttactttttaatttttttaattgagatcaaaattttaaaaacaaagaaagtcacttttaatatttttttaaacagtttttttccttaatcaatattttagactctgaccagactcagacccaaaattccccccatagccctggggctgaacccggcctctgacacgaactcgaatccgaccctagacctagacccgactataataaaataaaaaaataaaaataaactttacagaacatacttttgttttctgttt

SEQ ID NO: 112979 - DNA, 4992 bp, Cannabis sativa
  modified_base (4928)..(4945): a, c, t, g, unknown or other
gcatgtacttaatcactaatggctgaatttgttttgtgaaaaatggctttggtatttcgaaaattcaagaagaagaagaagaaggaggaataggtctcatccgaaagctagcactactacaaaaaggactttttgcgtcagccaacgtgtctaacaaaaatgattcactgatgcaataaataagcagtgattttatgcttcaaatggtaactgaatcaaaaagaatgcaattagcgtcggttgtatttccaacgctaaaagaggaaccgaggaaaaaaagcaagaagttttaaacaagtctttacattttgcttcagtgaaaaattgacgcaaatttctttttcttcagttgaaaatagaggctaaaagattggtgactgttatcaactgaagcaaaaagagttaattttttctaacacctctttgacaaatgaatctcatcatttcgtcttcttcattttgaaccctagcacaaccgctattttcgctgtctccttgttcgacgaacaattatcaatcccttcaccctgtcctacgacccaatctcaatcccaaaggccagtgatgcacaaaaccaccaccaatagcagcccgacgacctaatctcgctcccctttgtcctctctctctctctctttctccacttaatcttgctcgcctttgcccgacgaccaccacaactagcccaacgacgacaatgcctcctcgtgaccaaccgctcctcctccagcaaagctatatataaaaagattatataattaattaatatttaacctattttgttctatgtatctttatctttaaaaaaaaagttttctttatccttcttattttggattttgcgttgtcctaataaaatctaagagtattttgtttccttaatctcgaaaatttttttccttgaagtatgtatatcttcttgtagacatttgtttgtatagctaagctttaaaaattagaaggaagataagactatgtgattcaagatacagtgagtggggaagaactaaatcctgttacttttggaattcattaatggtaaattaaaagttaacttctggcatcaaattgttgagctaatcttgtggttgtgttacttgtttgtgtataaatttatgtggaagtgcttcaatattagttaatgtcatattatatatgatagcttttcatcattttgcttaacatacaaaatacatctttatcacattttgaatgggtggtcaaaattagtagtaccgtgaagtgcttctctccattggtaactggatatgttttgccaaatataaattatatgaatgctattggtagaaatctatcatttagattatgaaaatttaatgcgtttgaaagatttaatgttgtgatgaatctaaaaggaaaaggggaaagcttcctttcttctccctgttttgagttttgctttgttctaattaaatctaatatttgtttactcattttagaagatgttttgcttttccatgtgctactgtaatttagactatagaagtgtccattaagaaaattaaagtgatagtcaattttctgcaggtgtatattaatatcccaatcatccagtatgttggctaacttaaattcattaagttgctagtctttttggccagattcagggccgtctcaagcttttgagaggcctatggcgaaattaaaataataggcctttttttatatgaattatttcattaattaaaaatgacaaaatgtttatattatttcggattaacatttttttttatgtttgtacgaattttaattttttttacaaaaatataaaatgttaatttttcgttgtttctaaaacaacattgcttttatgttgttgatacacaaaaacaaaatttttttacccaaaaaaaaaataaataagtgaaaaatctataaaaaaaaaatgtatgtttttaagtgtattgttaaatgttttttttttttatattctaaaactaaatattagataaaatttaggtagtttttattcttatgattattttttttttttggcgaagtactataaaaaaatatatattctttttttaaaaaaaaaataatctgatggcataaattgaaaaaatatatatttataagaaaaaaaaatttagaataacatgggataagtaattatcttatactctttttttaaaataaaataaaataaaaaaggcatataatttgtaaaaattatataaaaacctatcaaatgtgtaattttaaataaaaatttgacactaataatttaaatttctaagtcgtttacacaaataaatatttcttcaccgtctgtgtttttttttataaattgttactgctatttaaataattcgtttacaatagaactagttgaaaattataataatatctatgtacatattatctcaatatatatgctatgaattaaataaataaaataaaattaactatcaatttaaatttataagataactttataaatgtttaataaatttacaatggaagattttatgctatcttcaatattatattgatagatatatatataaataaatataagtttacactttacgttaacaaataatttagcatatacattcttctttgtctttatattttaaattaaaaaaaaaaaattctatttgaaaaatgcacagcaagtgtcgaacacgagatctcttacttgtataaaagtagtctaaccatttgtgctacctttaatatgctaacaagataatactttgtaaaactaatgtgttttcttattatatgtataacatgtaattttttttaattttgggcctccaaaattacgaggcctagggccgaggccccggttgccccacccttgggccggccctggccagattatgggacatttttcttatttgttctgaaatttataattttatattgtatttgttatattactgttgaacttactagctaatttgtatgaatttttaaggtattgctcaaaaaatgttgttattttttaattttttacattatagaagtttaaccatgatgtttcgagttttagaattgatttagtaaagatatcaagatatcattcacattgtctctcatatataataacactatctttttctcaaataacaaaaaatgtatatataaatgagtttaaattcttagtaactaactttttgcaagcacatttattaaattattgtatatggcttagttttgaagtaattttttttcactgatttaattataattagtaattgtagaaaatggaaactagtcatatctaaagttggataggaatactcattcttttagcttcttgtatgtaactcatctcttatttatctcgtagtgctatgcatgccttacaagtcaaaaaaagaaaactagattgtgtccaaaaatgtgtttcattatgttccaacagtgttaactatcaattattttagtactatttttagacatattagatagtgttatttgttttttttttttttttttctttgaaggatgtggctccatctttaatctttaagtgtttttcaaattgttcatataatataatataatatatatatatacatatataataaaaaaaattcctacggaaaagagaaacataggttgctggtattttttactggttttactactgtttcttggagttttagacaggtacttatcacatttactttcctatgaagcagtagatctagttaaaataattgaggaaatagctgagggcacttgtgacatcctgcttcctttcccaattcgttggaatgatgatgtaatagaatctttcttatttttgtgcctttaccgttagcattgggatatgcaatatttcctttttctgctttaacaaactctatacgtgtatgccttctattggctcttgtaatatcttcttctcttcctttaagctatataatatgcagcagcctcactcaatattttgagctgagtttttcattttgcttccctgctattttcttcacttggtaccagagcaaaccctaggcgtcagccatggcagatccagcttcagctccagaacaacagcagcaacaggtcaaaggttcaagaactgctacctcagaaacttcacaccagcaccaaccaaggccatcagcacaagctatgagtccctcactagtgactactcctttcagtagcactctaagccaacaattcacaatgaggctcggcagaaacaattttcctctgtggaaaacgatggttttcaccatcattcgaggtcacagactcgaaggcttcctcaacagcaaaagagcatgtccggaggagttcattactccaagtatccctgattctcccgactatattgtctccattaatcctgactatgagaactaacttgttcatgaccagttgttaatgggttggctttacggttcgatgtcggaaagcatcgcgtccgaagttatgggctgtcaattggcctttgccctctggacaacacttgagaacatctttggagcctattcttgtggtcatactgatgatcttcgcaccagactacaaatgacaagaaagggctcgactaccatgaccgagtacctcaaacaaaaacgtatgtgggttgattcactcgcacttgctagtgaaccatatccagaaaggcaccttgtgtctaatgttctctctggcttggagattgaatatctctcaatcgtctctcttattgagtccagatctgaaacaacatggcaagagctacaaagtatcattctcagctttgaccacaagctagaacgactatctaccatacctccaagccacaagaacttgagttctccctctgctaacctggctcacagacccactggtcagtatggatcgagaaacacaaaccagcaacatcaaggagggcgtggttcgtcgactaagtcaggtttttaacgtccacgcttcaagcctccattgggccnnnnnnnnnnnnnnnnnnatggctcttatacacgagtaagtcactctggctgcttcatggacgga

SEQ ID NO: 112980 - DNA, 2514 bp, Cannabis sativa
  modified_base (2452)..(2474): a, c, t, g, unknown or other
tttggaatgttaacttttaaaagtttgaaaacgggatcccgatatttgtaaacattttattataatataaagtttaatatttaatataaaagttttaaattagcatgtttttcaagaaaattatttgattagcaaagattgcactataattgaaaaagcactgtagcgtgccttatcattagggcgttacaataagcccatggtcctttgtaatatgggggactgacctcattaggtccctccacaccaaaagaggttagaaatataaagtagcaagtaaacagtaacaaggggagcaaggactcactgaggttaaagccacactaatatcctgatttggtaaattgggttggaggaggcataaataacaaatctctttgtagggagctggactaagttagaagcaaaatggctaatcatttcagatgcaaaggaagccaagcaagatcccaagaagttaaagaacttgtttgtcatggggtccagattcaggtcccagacctagccagcatattgcccccagagaggtctgtcttggttctccatcagccatttccttaaggcttctgcttcagtgttccccttagtctgctcatcaacagtgaagttgtgcttggctattcgaagctacaagtgagcttcattagggtggacaggagtcagagggatagatgggacacaaggataaatatatgctttagagggaacccctgagtcgttagtactctatgagggcatcctggacggcttatgtttcttagaggactcttagttgacaaccacgttcttctgcttgcattctaacgggaccacttcctctttctcatctatacagaccaccttcggactagaagtagtgttttaatgggggcctttgagggtcactatgactttcgagaagtctgctggtggaagggtatggccatctccgggactatccaaagcatctaacatggtaaaggtttcatccattggttcagctgcaaataaaagaaacatgaggaatgcttacatgaaaaaagcataaggataaaacatacgagaagagctaattctacctagatggtctaattctgccctagaaaattcataaattatattgctagtgtcgccatcttctaagaaactatctgaagggaggaaccagcttgaagtaatgaagcaagaatggtccaggaaaataccagagggtctgacctcatctaagacctacccaaaaaatctccaatgtttaaaaaatataacttttttccctatagccccactaggagtgaggcattcgtaatctatacaacctcctatcaaagctaatcgaccttcaacgagtgtagctctgaacaaaagggatataatgaaaagttaaaggagacttacaggcatccaatgtactccctctagaagtgccagagtttgggagtggggaaggaaaagacaatcttggagccaccatcttcttatcagtcttcttccttatctttcgctctgcctcactccaggcacggacataaagatcctcctgctcctttctcctcctttatgcttggtactttgtctctacctcccgaatatactcaagctagagcttctttttagcctctttattctgaggattcagataagtcactgtggaaaaattagtatccttgaccgactgatggccttgtaggagcatagacttttgacaatttatggtagtcaccaagtctcccatgttaagctcttctttagaaaggattgcaaaaacaacaacatggttaaggaacaatagtgggggccttccaaagcattggaggaatttgggtccactcgttcaataggtccggatgctcaaaagtcctaaagctggaggagaagaaaaaccaatggtggcagtccttaacgttcatttggaaattaaatggtactagagtctcattggccgagtgagattacaaagaataaaaaccatacttacgcatgtcccccttttttggagtagaaacaaattcataaaagtacaagatttgagcggggctgggagcaggccagccccaaaaagcataaaaatgaaaaggcatggcaataggaggtatccttgagggatgagttggtatggagcgagtcatataaagactaaaaaaccaatgaagtaattttggggtggtagcattgcgtcggacatgagatgcatctggctctatgccccgaatcctccgtagttgtgattaggggtctcgatttctcgagccagacggtgataaaccctaggttctcgaggcatgatcctgttctcatcaacaatctttcccaagtgttggacacatcccatagacgagtgcatatcatcagcctcccaaccgatggcccagtggacatagttggggaccacaactggaccttgtatcaccatcgacaaaggtactatgggatacttgttggaaattattttagcaggatctagatttactaacannnnnnnnnnnnnnnnnnnnnnntatgaattctaaaacaatgaaaaataaacacatataaagt

SEQ ID NO: 112981 - DNA, 2247 bp, Cannabis sativa
ataattaatacaatacattacttaatccaaacatagtgttatttattatttaatataatacgacccttatacggcgtatcaaacgagcccttcatttccataatttcccacgtgtaattacatcgattgttaagactatctctaatgcgatgtaaaatttatgttacatttggcttaatttttgttatatttagtctcattatttataattctctaatataaagatataaaaaaaaaactataattaatattaatcatcatttaatatttattctcagacgaatttagacaacacaaaagagtgtgcatattcgaggaaataaaaaacactcaccaacaattatgctagtactcacttaaaattataaataatcaaaatttgggctacaaaatagacaaagcaagaataaaaatataaaaaagacaagcaaattatagtgattcagtcagatctcaatctgcttagtctatgtttagtaattttttttgtcttaattaatttattaaatttggatcacccctttatatagaaagtaggtgtccgttaggattacataaccggtcaaacagtaacgttattacaataattacacaatatatattaatataaacgttcaaagaattaatgcaagaatagtttcgcccgttcttgtcttaattgcaacaacgtgtgcgacttaataaatcactatttatccatttatattccaaacacacgagctttcagggtatagatgtaatgccctaatctagaaggacgtcatgtgtgtgattttataaactagtttagtgttgacagattattttattattaatctctgtggtaatattaaaaatttattaaaataaaactctagtaacagacaatataataacactaaaactttgttttggggatccctgttataaaagtttttacaaaaggacaatgtataataacaaatcaaaatacttagtggatacagctcaaaacaactcttggcaacttgtcacacacgtcagtagggttaatatgtacattccttggagaagaccgtcgcctcatggctgctctaacttttttttgtcctcacctgcaccacagagcacccgtgagtcagaaggattaaacaagaaaagtaacaaaggaaatacatataataattgattattcattttattatcataaaataatcaaaaacataacatttcaaagattatataatataattacgcatagcatagaaaaaaagaagaaaccatatattgcactgtctaatcatgcaagctcgtgctatagcctaacaccaacatcacatcaccacatcacttaatcaggtgagcccatgccataacatggcaccatacatcgtatcaccgcatcacctaatcaggtgagcccatgccataatctagcagaatacatcatatcaccgcatcacctaatcaagtgagcctgtgccataacctaaaaataatatatcgcatggcctaatcaggcgagtctgtaccctaacttggcactaatatatcgcatcacctaatcaggttagcccatttaagaacctggcactaatgcatcgcatcgtcttattaggcgagcccatgccctaacctggcactaacatatcgcattacctaatcaagtgagcatgtgccataatctggcaccaatgtatcacattgcttaatcaaacgagcctgtgaatcacatttacattgcataattagacaatcaacaattaagagatatatatcatgccatgtggtacattatacttttcttaccttaaattttagttcaggtatgttagccgacttgcttggagaacaattgacgatcttaggccctatctcataacatcaaaataacaactaaccaagcaagctaaccttatttaggtctaaaaatcattcccaagaatctctataggtcactagggtatctgtaacgccctaatctataaggacgccaagtgtgtgattttataaactagtttaatactaatagaataattaagtattaaaaactgtgataatattaaaaaacttgactaaaataaaacactaaaaacagacattacaacggcataaaaagcgtgttccagggatccctattataaaaaattttgctaaagaaatatatacgacaaccatttaaacacacaatcagaatagacaatagatacagccagcccaaaacaactcctggcaactcggcacgcaggccagtgaggtcaatatgtacattgctggagaagactgcca

SEQ ID NO: 112982 - DNA, 1445 bp, Cannabis sativa
gattcatgacctgaatgcgcctaatcaattcatacctcgcacgtgtccctctttaaaggggttgttggatcaaagtcaattgggccaaagctttgggttgggccgtaaattgaaggggctgggttgtgaagagagttttcaattgaaagctgcggactgggctaatttagaattaggccaaggaatttataacaattttgaggcagcctgcatattgtcggcccataatagatttgttttgtttccaaaagtaaataaattgatgtgtctacaccaactctctattagtcaagtcaggcaaggatcagaagagatgggactaatcaacaagaaaaatcaaattcaggtcatcaaggatttttttgaaggtgtaatcaagggtgtgagaccaaaacaaagagttaattttagagctgcaataatttgtttttggaaaaattttgaggaaataaaagaggaaaggggcctctgttttcaatgtagacgatgaagatgatttaaaggatgaactagtaagcaaaaagcagttaataatgtactccaaaaaatggaaatccattaccacaagcttctctagagatctttgcaaccccacaaggggttaaacattgagtatattggaagaggataaggatcccaaagagggtaagattggtgattttagctcaaaaagagatttatcaaaagaggaagatgataattttgttgaagaagatactactgagtcggaagagattctagatgatattaaaagcctgtgggaagttgaagatttattgctaaaatttattgaatcattgagtaaggttactagaatctctagtaatgtagaggttgctgagattgggcctctaactaaggccgaaccgactatggtggagacgcttgcaaaattgggtatggaactactctttaatgaagaggaagatactcagaagaaagtataagttaaaggggtcggaataataacagagaatttaaaaatttgactttcaacatcaattatgatagtagaaagacaaaataattgtgtggtatgatatccaatgaagatcctaacttggaatataagtggcagtggggataaagagaaaagaagagccataaaagcgacaatttgcaaggcaaatccagatatgggttattttacaagtaaagaaggagctgactgataggcaattcattggaagcatttggaaatcttgttttaaaggatggattttgatcccttccatagggaaaacaatgggtactgtaacgacctaacaattaggcacgctacccaagatgattaagaaaccctaatcccctaaacgggattactaattaaattagcgcaagaaattaaactttaaacaaaacagaatgaaaatgaacttgtaacaattttaactttacaaccaaaatttacatgcttcggaatcccaaaaataattcacaaaata

SEQ ID NO: 112983 - DNA, 3303 bp, Cannabis sativa
  modified_base (1488)..(1502): a, c, t, g, unknown or other
tttaattttgttttaaattgtatgtagaaaaaaaaattatacataagaatggaatatacattttatttattaagttttgaaatataattgtattatatgtggtagacttttaactactattttccttacattaaaatgttaattgtacatataatttttaaatttttttttatatataaatatgtgtggattggatttgatcggttacttttacatgtaaatcaatatctaatctgtacaaatgtgaattttaaaattttcaatctaatccaatccgcaaaatgcgtatatccgcactttgcggattggattagatcgaatcgtgcaaattaaattaaatcacctgttttatgaataagctatgtgcaatatttaatttatataatatcaaaatattttaatcggtgagttcgtattttgaattcattaataaaataataacaaataattcttaggacttaatcaagaaaaataacaaagagaatattctatcttctaaaagaacatattctttaaagagttggagagtagaaaaataaggttaaaagaaggtagggaaagtctacatataataccattataaaaaaaaaaatcaaaactggtaggggtataccgaaactcggtgggctaaaaaaaaacttgtgaatactaaattttattggaattatttcacaaatacatatttaccaaaaaaaaaaaaaaatataattgtatagaattttaaatatttttataattttatttacagaaaaatatagtcttttaatgtatttttatattctacattttttattttgttattgattttttattatttgtatgctatttttttattattattttaatgttgtttaaatgttatttttctgttatttttatataattttattgttattttcgtgttatttttataaaatgctgtaaaaatataaaaaaaaatataataattgcattcatctaaatgatcgtgtaatatatataagggataattacataagtattatatttttttgtaataaaattatatttttacgtttatttatttatttatttttttgcatttttacagttttccatagaaacaacactaaaataacaaaaaaactacataaaagtaacatctaaataacatcaaaacaataacatttaaataacaaaaaatgaacaaaaaattagcaagagtacaatataaaaagaccgtagtttctgtaaataaaatcaaaaaaattgtaaaaatgtttaaaattctttttgtaatttttttttattgtttttgtgtatttgtatatttgtaatataattcttatttttgtaatacttttagtcatagaatttttataactttaaatataataggataaatattattttagaccgttgttttgcaaaagttactaattagaccttatgttttgttaaatgacaaaattgaccatatattttccaaaataataaaaataggacatgaactcaattttcaacaatttnnnnnnnnnnnnnnnccaactttaagacaatttctaataggaacaaatacaactagttttgtcataacatctttagattagattattatcaagctttgttttgacaaaaaaatcagtttaacgtcttatttgtacaattttgaaaaatataaaatctattttatcatttaacaaaatagaagataaagataagatcgagttggtaacttttgttaaatacacaatttaaccaatataatattttgtacaaactagtccaagctttgaccaagtttgaaacttacaaactcacaagataaacaagttcagaattgctgcattttgcatgtgaaccaatctaaaaaaacaaaaccccatcatcaaaatttgcttctccttctattcattcatttaatctttaaaccattgaaaagaatattctaaaaactaataatttacatctatgaacaaaaaaaaaaaattgtacacatatcaatttacataaaccaaaataacaatctaattaagttataaaaacaaaaaaaatgaattatttggctttttttttttctttcttctttttggaatctctaaggtgaagaaccccataagacctctgcaacaatggtggcagcttcagcatcagaagcagaggcttctctcactctaaccaaaatcaattgcttcagagctctcttctctctctgtctcagaccttctcctacctctagctgaacccaaaacctagctacacagctcgcaaatggatgactcgccataaacctcttctctctgctattctctcttatcctactctgaattctgccaacgctcacttctctcttttcattctcattttcactttcattatcttcttcgtccatttcgaaccgacccaaatcgattaaatccccacccagctccgatctctgcaactccaccagttttcttatcaggtcttgctcgagcatggcgtcaatggcttccttgcgtccaaagtaaccgatttcgaggacgcagtcgaaggccaggactcgaatttgcaggtctgggctgctcaggaagctaatgattttggggatttggccgttggattcgatctcatcgaccaaaggggacttgattgaacgaatcagagaacagagtactccgatcgagttagcggacgccattgttgtgatcagagctttgatcgtctgacccatcaacacttgcccaacaaacacgtctttgttgaatcgaatcagagccgagatggccatggcggagtgttcccgaatcgtcatggatacggaaatgttaggattacagagaaccgattcaagagaagagaacagtttcgatttcagtatcaaatcctgtaactcgcgattgaacccttgagagactcggtcctcgaactgagtcaagagcttcactaactcgtcctcgttgtgctgagacggttctcgtagacatcggcttagacactcaacgctctctctgtcaatccaggactggatttccgactcgattgcggcggcgactcgggacagggagtgagtcgtgagtcggcgagttacgaacgaggcaagtccgtggcgagcacgggagctttggagggactggaccagagctttgaggtgagagaggtgttttgatagagtagagagatttgggtccttggaaaggatgttgtcggattcggtctcgagctcaagcagaggtttaatggaggacgagttggaatcgtccgagtcaagactcggattgttttgtaagtcgtgggaagcttgttttagagcttcgaggactttcaagactgatgggggctcttgtttttgcgagtcctccatgg

SEQ ID NO: 112984 - DNA, 1966 bp, Cannabis sativa
  modified_base (26)..(27): a, c, t, g, unknown or other
  modified_base (1617)..(1619): a, c, t, g, unknown or other
acaatacttgttgtgactaaaactannttagtgacaacttgtaactaaatgttatgttttagttacaagtaatattttgttgtgactaaaagtcacaattagtcataaaaaaatttatgttttgcgatgaaaaagttgtcactaaaagtagctattttttgtagtgttaacttaagggatataatagacacatcatctataaaaataggtatatcttaaagaatatggaaataatagtaaaaattaaaataaataaagtaaaatgggtatatagtgtaattttctaaaaaaaaattataaaaatataaaacaaaatgttaaaaaataatatatgagggatttctctatatttaattacactaaactaatatttatctagttatgaaaaatattttggtttagtgttagtgtatatgtataatgtattggtgcaacagtgttgaaagatttggtattttttcaccactaaaattgaaaagaaattaggtttttgtggatccttaaatagaaccaccagttctccttaaaaaaacaactaaaaaaaaatcttctaattaaaatataaaataaaatacgtactgcttctttttcggctgcccaaactggaatgtttgttcttcttctttttctttttcttttttttttttttttctgatgggatgtctaatcttggtaggtactacaaatataactcactaacatgcatgtaacatgcttttgttattataactagaaccgcaataaaattaaataaaaaagaaatgtattttcgttacactgtaccattccttcattgtacgtctagatatctattaattgtcattgaacgtaagtgtcggcatgtataaaaaatatagtattgctgttggataaaatgatattcagtatctctagacgtgtcgtcctacgtttagctaacaatatttttttaaaagttattatataaaattatatatgagacctaaaacttaaattaatagcgatattaacatataaaatgataataagtattactgatgctttttaatatttttcatcaatatatcaataattttttttattgaactatatcaatatgtttttttttcttaatagaaactttatgaaaaaggaaaaaaaaaaaaaaaaagccaaaggaaaaggcccaaagttagtttatagaaacaaaaggttccatctccacaaaagacaaaaagcaaaaatagttcaacttagcagtcgttgctgcaagattgtgagagtctgggagagttaaaatatctcctaatccatttcagatcgatgtaaactgcaattcaaaacttagcaataataacataagttgagaaatgatctcttattagaaaaaccatcaaccaatgtggataacagcattgtgccacttccgatactgcatgagcaacagccatggtctcgatcggtttctggacgaagccatcaataaatattactcccatattgtttgttgggatacattaaaagaatagttataaaaagtattattttttacaaaatttttacattaataattttttttatatatttttacggtgttatataaaaataacaaaaaaacgacataaaaataatagaaaaataataacaaaaaataacatnnnaataacaaaaaattaataaaaaaatacatgaaaataccgtattttttgtaaataaaattataaaatcataaaaataattaaaatttcatacaaccgtattttttaattttttttttctatttttgtgtatatgtaaaataatccatttatgaaactcacagattaatctgtcaaagtttatagttccatcttatcacgcattagatgaatttaaagaaagtagttgtaagttatagcagttggctttatcaccaacttaaagggagtcccaacaatagaagtgcccctactctctctaggtatctccaatgttgatactttagattcagagtcaagtttagagagag

SEQ ID NO: 112985 - DNA, 3002 bp, Cannabis sativa
cttgctcctgttcatcacctcgaaaatgtaatcaatgtgttctccgaggaatatatcatccgaaggatacattcaagtattggtgaatctcccatggactatacttcaaacaatcaagcatctcaataaacgcatgttacaaaatacaaagaccaagtcaaaaatggcagctatcttatttaaaataaaagtggttgcatgctatttcctgcctattagctagatatatgaaacgtgtgaaatgtttattattcataatccttgtaaagattggataaaaaataattgctatcttatccctataaatagcagtaagaataatgtagcagggacgacaaatattctaacttagaaaaattctaccaaattgtattctcattcataaaaattcgagaaataagatggactcgtggagtatgtagattaatttacacaaaatcatgtaaaaaaatctttatatcttattattatttatatacatacacacatatatatatattatatatacacatatcatgattaattcacaatattaattatccaaccttagttaatgttaacgaatttctgagttcacactcttttttttttctcttctttatttttaccaaacataataaaaattctcataattaacaaagtcaataatgtgagtcctaattgattaaactaaattaattattgagacttgctatttggtatttatctcagatactgcggggactatgggccaataaaatctaggctcccgacaagttaatctaaaatttaacaaataaattttataacttattaatttctcatgactcaattatagactcggtattccactcttgattaaatgaaacattgtatatacataatatagatacgctatgaattattcattatttctatcaaaataatcagtgatcctctatagatggtttataatgagtagggactaaaattaatattttacccatcaatgcattttatctttgaacacttagttcattgtaaatggtattttagtaaactaatacaattatcgaaatgagatgtcaatcatttaacacctttaaccaagctcaaagaaaaatatcgtttcaacttctaacaaatagaagctatagatgtccatatccatgactaacacttccactcaagtatactatcaagttcccaaaaagcaagtattggctacactgtagggtaagcttgtaacaaacaaatcaaagaactcaaaatagtagaattagcttaaagcttaatcattttaggattcaaatataactaatctatgataaactaattgatattgccttagaatagttataatggtaagattatgataactgttctatttatcaacatcggtcttgtcttgatgtaaatcctatacatctaatttcaagtttattttgcttaatgccttggaaaagatatatcacttataataagggtaaataaaccttattgttgatcatcacaccaatgtaaattcaatgtactgataaatcatgagactaaagatgtttgaaacatataattttatttatttgcgactctgatgttatcaccataattatgaataactatatgttctagatttaatagaatttatgtattaaacatataatcaattgataaagtaaaaatatgatttctgaactttattaattaaaaataatattaaattaaatttaagttttatttatagcataaaaccctacatcaacaaatactggttcatcattgacgttccaagctggatcgttgttgtcatgacccttgtcccttgcgggtttatgctcttggtatcctccaagactttgattttcttcagacattgtggaacctaagaataagaagaccaagtagttagtgctcggatcaaacaaaaatgataagggaacgggagaattctccttgacctctgcttggagaagttccctcctaaccctttatctaggaacattaagctctcgggtaagcagattaggaacttaaagggaaaaaggaaacaaaagtctaagctgaatcctaaattcgagaactgtatttgtttcagatattagatcatgaattttggcaagaattctagagaaccacaccaaaatttgcaaaattaacagtccctcaagcgagaaattcctagttttctacgcatgaaattgcttcaaaatacataaaatctctatggtctctacattatcattcaaacaaatacaataactgccttacacggtggagcatgatattccagtcggtacaaacccaaaaattccataacttatggcattcaactataacccactaccccaagtaaaactacaatgcaaaagcatacaaaggcatacaaaactgtctgataagaagcacactgacttgtatatgcaaagactagaggtggagttttaaaacattgaatgatcgacaaagttttagtttggaagttgcgaagtctattggttagttcctcgttatcctcatagaaattcgacgatgaagttgttgaaatgatggttaaaggaccgaaatctaagaataattatgacctgaggaagaataatttctcagatatttctgaagctagatcagacattcatctgtgatgattctacttggaaattttaaaggaacattttctctctcccaaagcttctctcgcacaaaatggtaaaaagtgtgacattaattttcttagaggtatttataagcccaaagagcgatctgcatgcctccaatctaatgatccagatcaaccctcagaaatcacaattcccaatgatccaacggtatagaaataccaatagttacatttaatacacatcaaaatcaaagaattttccataatgatgatattcgcctcgataaaagtgatggcatgtgccagccattatcacgataacccacgcgccacacgtccctgttatctccatgccttaattgcaagtctgttgggttttatgtcctaaataaaacaataattcaatgtaatccattttattcaacatcaa

SEQ ID NO: 112986 - DNA, 4096 bp, Cannabis sativa
  modified_base (2265)..(2266): a, c, t, g, unknown or other
aaaaaattcctttaaatgtaaaaatatatattttttttaagaaaaaaataatatcttatataattatctctataaataattcaaaattcagaaataaggaccaggaagagaatggggctagatctatattgcgggcatggttcttttggtctgtatagtatatacttttattcatctaaatcattttttaaagataaaacttgttgaacaataaagggagatgcccaaacctagacacaataactaatagagtttgtccgacgttattaatgtgtggaaataaattaagatatataagataaatgagctactcctcccattggcaattggttttgagatagaacctcattcatcttatttgcacattctagcaataaccaaatttacgttccctatagttaattaaattttaaaaaaaaaaaaaataattaagatgattaacataaatttactggtttatcctttactctacaacgaaggaaaggataaagaagaaagaagcaaaaattaaagttaaggaagaaacaatacactttaacacttaactgagacaaaaagaaaagaaaaagaaaaagaagaaaatagaataatgttaattttaccttattatttattatttttattatttaaaatgtgtatatattttcggcatgcagttcagtcttcttttattttaaacttcacaaatacatatatagatatatcacatttcacttcaacttaattttttcccttgaaacagtactactgcatctcaatctctcccatagctaaattgttataggtgtttgcttcagcatatataactttggtaagtcatgatttgatttacctgtgaaatatgaagtctctaataagtttatatttaatatttcatattctttcccatattagtagttcgttagttcatgaatttagtgaatattttcttatgtaattaaacatgttttgattaaattacacaggaaaatggtagcttgcccaaactaaagaaagacaactataattatggggaactcccacacccataatctcatcctacaagaagagtcaaatgatcatatcaaatgttgtatatgcagtgatgaaatttcccaacctcctttcatcgaatgcgaatcatgtgatgattattactcccacataacatgtgaagagttcatatcatcatgtgatgaccaaataaatcaccccttccatccttctcacctacttaaattaagtacggatgaattttactttatttgcagctcttgtcaccaaatccacttcttcaatccatgtttcacttgtgatcaatgtaacttctacatggacatcaaatgttttaggatgcctcctataacatgtgatgatgatcgagagcatatacaacatgtcacacaccaacatcccatgccacttctatggccagatgagactgaagacatcgaatgcttcgcatgtcgcgtgacatgttcgggtgaaggtgaagcttgttatggctgcaaaccttgtaaatatttcttgcataaatcatgtgcacaattgccactacaaatccaacctcattcttgtcatgatcaagatcaccctttatccctttttgttgctagtaaattattcattacttgcaaaatttgctacaaggacaacctcttattcacatatggatgtggtgagtgtgattttcacctatgcataaattgtgccactacagtgttcctacccatattcaagtacaaatatcatcaccatcctctttattttgtggagaaaatacacactaaaatcgacaagtgtcatagctacgattcatattgtcaaaacccaatgcttcaagattctgtggaatttaaatataccacttcatccatatttttttgtatgaaatgtgattttaaacttcatttcctgtgtggaatgttaccaaggagtatcaaatatgagtatcacagacatcctctcactcttacagacttagttatggaaaatgagaatggagaatactgttgtgatatatgtgaaagtgaaagagaaccacgagtttgtgtgtattactgtgaagattgtgtgtacattgctcatgtacattgtctggctcctcaggtataatgcttaatcactttagttattataagtaataagttaccttaattgttgcatatctctacatcaaaatgtcttctatttgaaattttgatataattaattaagtacctacaaaaaaatcttacttttagtcacaataatacttgtggctaaaagtaaaaatattgtgactanntataaattatcattcttatattgtaactaaaaggtccgtaactaaatgtattagtcacaaaaattacaatttgttgtgactaaatttatttttagtcacaatatgtgttgtgactaaaactaaattagtgataatttgtatctaaatgctatattttagtcacaagtaattttttgttgtgactaaaaagtcacataaaaatttatgttatgattaaaaaattgtaattaaaggtggctattttttgtagtttaggtatatttgtaatcataccttaaattatataatttctaaatttaagatatatatctatttaatatattataatttaatcacttcatgatagttgtgctatcataataaacatattaaatttataaatttaaataataattgaataaattatcaagaacattcatgttatcttgttagatatttaatattttgaatataaattgtgaacagaaatccatatttattatttacttatttgagaatattattgggttaaatgtcattgtagattatcaatatattcaagggagatgtcaaagatgtgaatttgaagatggttggtgaagatatgtcgaaattcattcctatagatcaatgtgataatgctgagcttgaagagaaaaagaatggcatgccacaattgaacttagaggatttaatatttaagttagatacaactgaattaatgccacaactcaagcatcatcgttacaaggaaagtattttacatatgctaacatattcacactccaatgaaactaaagatgaaaatattgatgatattctacgattttctagcttcacagaaagaaaattcatgtcagttatttacaacgagttccacaaaaattatttggaaaacaagattgacattgcatctagtgatttagagttgaaattggtagatgttgaaggttatttgatacctttaaattatgtctttgttatgaaatatttacttcacaaatatggggatattagtcagattaattcaacttcttcacccacattaaagagcatatgttttttcttcatttgtaaagtcatgaagaagatgcattctactttgctcatagatatcactaaagatcttcttcaacaatggtatcgacatatattattttcgaaagactgtgctcactttgaagtggattttttgaatgtagttttgaggaagatcacaagatatttcttctatctccaagtaagtaagctacttggctctgaaatcccaacaataataaatgaaaagaaagcaaagttacaagaagagatgaatgaaaagatagaaaagatacagaagaagatttcaatgaacaaagcaaggcttgagaagtgcaaaacattttgtgaatataattcgaaaaaggagttcatgaagaagggcttgaatagagtgatgacatcgaagtggaagactgctggccatgtagggttttgatgggattatatttttttgatttgatagatgtcatagaaacatatgattggatttgtttgtttggtttgaatttataagagagcttttaatgtgtggatatttttgttctgaaaaaaaaaatgtgtgatatatctacgaatgataatattattagcattttaaagtgcacaatgtacaatatcataatatatgaggtggcacctacaaagtggagcgattttcaaatattacatattaagttatcattttttatagtgattgtttggtttgatgtaatgatggtaatggtaatagtaatagtaatgtaatggaataagaatggtaataggaattgattacaatgtttggtttgtagttggaatgaacattgtaat

SEQ ID NO: 112987 - DNA, 3758 bp, Cannabis sativa
agagagagagagagagatggaatagagaaaagagtgagattggagattacttgtgtaacaccctattagattagacacattattgtgattttaaactattgtgtgctccttttaattaaagggtttattgaaaaacataaataaataaaattttcttatttagatttgatcttaaatagataagtataaaacataatcggggatcccatttacaaagctacctcacttttcaaaatacaataattacaaaaattgtcacctaccgactaataaaatgaagtctgttgtcccgaagatatgaacactctaggtctaaccgcccatatatgtacaatcttcattagctcgagctcactattgtccagcctttgctttgcttttacttacacatataaataataactgtgagttgatagactcagtaagataaatataaacataacataaatataaataagattataactaggcgcccatacacccaattacaatcctatctaatgtcccacatgtactgagtctagaacgttcgtacgataaatcctagcttatatatgttgatatctcagtgcatctctatgtacaatttactaatatcctgatatgcaactctaatggctactaatatgcctaacatatatttgttggtatctcggtgcaactctatgtacacctctttgataccctgatatgttattgtaatggcaactgacatgcacgctaaaaatgtattcataaatacaattattatactaatcttaccttaattctaaattcatgtgtgtcggtcaacctgagtggaaactgctgctaaaaaatttacaggcccttaagtcacaacatatgtaaaactgataagtgatatgctaaatcacttttcggtgacttaaactcaaaactaaaagtttttctgtcaataaatagagtggaaatacccaaaatatcgagaaaatactgaaaaataagatttcaagaaaaatactctaaaaaatggaaggtcgtttttcctagtcctgcttgctaaaaacggtagaatgtttttggaaaaatggtctcccgtttttaacttcagaatctcataaagtctcatttctcaagaaattcaatcccaaatcaccaacaactgtctagaatacctatttaggccataataaacataatccaactaaaaattccatcatcaactaacaaaataaaaaaccaccattaaaagttcaagcttgatcttaaaaactcaactcaagtttaaacacaaccaaagccaacataacatgcttaaagaaactcaattaactttacaatatccccagaaaataaacccagtcatacagaacctagctccaagaattgtatgaaaaactaattttaccttagaaaattcaaagaaaactaagagaagaagcttaccttgacttcccttcactaactactgagattaggtactggagtaagcttggtttttaatctgaaaaagttgagaaaccacttggctctccttggtagttttggccgaataagaaagtaagaaagagagcttttgcatgctatctaataaacaaatgcccttctgtgccaaacaattttaagacacctcaagaggaatggacatgaaagccaccgaggtttgaacatttaagagtgtttggttgcacaacctatttgcatatcaaacaagacaaattgaagccaagggctctaaggtgtttgtttttgggatatccatagggattcaagggctacaaactgttgtgccttaaaccaggtgacaagatatgcttgacaagaagagatgttgtgtttaaggaagaggaaatgacaatgaagaccaaggttagtcctgaaattgttcaaacaacattgctggaaggaaggcagattgaggtggaccaatcacatgacaactcttcacagttagaagacacagctaagaataagagtggttaaggtgatctaagcagctaccaactagcaggaaatagagaaagaagataaagcaggccaccaaacatgtttggttatgctgattttattgcttatgcattgactatggtagaggaaatggatagctctaaaccaactagctatcaagaagtagttaatgggaaagatggaacaacctggttacaagctatagttgaggaaaaggtctctctaatgaggaataagacctggataatggtcaaaaaataagaggggtgcaaattggtaggctgcaagtggattttcaagcacaaaaaaggaattcttagtgttgaacccactagattcaaagcgaggttggttgcaaatggttttacacaaaaagaaagtgtagattttaatgagatattctcacctgtggtcaaacaagtctcgattagggccatgatgtccaaagctaataattcagcctagaagttgaccaaatggatgtaagaactactttcttacatagagaacttgaggataaagtctacatggaggtttcagaagggtttgacaaagaatattcagaccaagtttgcttacttaagaaattactctatgggctcaagcaagctcaaggcaatggaatctcaaatttaactccaacatgatcaagataggattcatcaagagtgagtatgatccttgagtctattatagtgatcacatttacttattattatatgttgatgatatcctaataattggaaaggaaagatcaaagttaaatgatctcaagatgaaactcaatgaagagtttgaaatgaaagaccttggaaaggccaaaataattttgggaatagacatacatagacctactcagacttgtattactctatcacaaagcagctacctgcaaatagttctagacaagttcggtatgaacaaatgatagccagttgctactcctattgctcaacatttcaaactatcaacatctcagtctccaaataatgaaactgagagaatcaagatgaccatatatattcccatatgccaactgtgttgggagtcttatgtactccatggtgtgcaccatacctgatcaggcacatgccatgagtgttattagcagatacatctcagatcctggcacaaaacactgagaagcattaaaatggattatgagatatgtaaaaggtatattaaacacatgcattatgtataacagtgaataccaacacaaagaaaaagttattagctatgttgacttagactttgctgtaagtatagagactagaaggagcattataagctatgtgttcactgtgttaggaggttgtgtaagctggaagtctaacctacaaaggttattgcattgtcatccacaaaattaaggaggatatatggcaacaattgaggctatcaaggaggctatctagttaaagggattgacaaataaattgggattcaactcagaggacattactttccattgtgagaaccaaaatactttacatctcatgaaaaatccaaagtttcatgagaggtgaaaacacacattgacatcaagctacatttcattagagatgtagtgatggcaaaacaggttcaggtaaagaaaatttctactcgtgataatcctgctgatattttcacaaaaagtataactatagacaaatttatccattgtttgaggttttaccatattccgagtctgggtttgggtttgggtttgaggtaggatgggttcatgtcatggtatggtgtagaatattgattttttttttttgtaaaaaaaatatataaatagttttaaaaaacctaagacaaacactattaaatttttaaaa

SEQ ID NO: 112988 - DNA, 4476 bp, Cannabis sativa
acgtgtactgctgcatggagtgtgtgtgtgtgcaagtggtaaaagtgtaataaaataaaattgatgaatataaatattggtttaaccgtgtgaaaatatatatgtaataaaatgtgttttgtatttttggtgtaaaaatttcattattttataagaatttcactggaaatatccttagaatttatgaccgatagtcatattataatataataaatacaatgaccataattaaaattatttttaatattaataatgagaagagaataactgaaaaacaaaaagttttgaaaacaattttggtccaaattcaaaaaatcgtctcagaaaaaggattgagataagtaaatggtagctatcatggttttaaatttcttctgcttgacaattatatgattgtgacattagatgtatcaaaaaagtgcataaaacaaaattgggaatatatggaattccactgtcaaattcctatttgttggttaagaaagaatatagccaaattaaaatcttaaaaactgagttgaggagaaagtgtgataaattatttgtagattatttttgtaccctttttcctttttctttttttcttttgtttttagcctattagtaattattatatttgtcattatcattaaagtgggtgtgttccttgttcaaagtgggctagcctagcccagcctctgaacttattttgatgttattccaatttggttatgactataaatatggaaccgttagtgaaggtctaatgagtcgagcttatattaaatattttattgaaaaaagatgaaacgaaaacaacttgtccttttcagccccttttgacctgtgattacaaattagatttcaccatactctccttctactttgcttctgaaaatattgagaaggttgtatgatattccaccagagtagaatagtgtatgtataccaacaatattttcatcaaaaagaaccaacagcttttattaaacaaaattaaaagtggcttcgaacaatccaaaaaccacgaccatatcttgtcaagtcctgcatttaaaaacatgttgcaacagcggttgtcgcacaagatgcacaatgaaactgcagtaggagcattgctactcgggattgaaactcaaagtttcccatgtcaaagcatcaggctccaactagcatgataagcttagacatggatatggtccaatggtaaaccatgcaaatatcagttgatattccccatgcatatgtattttatctgtgtaagcaaacaaaaccaatttttcagacaagaacataaaatcatttgttgaaccaatttatacaagtcattcgctgtaaagataaatttagatagtcacatttgcataatgatgccgcggaagtgagtgataaaatttcagaacagaatttgtccaagaaattttgtaaatggagaaatttatattataactttttgagactatactatatatgactatacttgagaaggataaatgaaacatctaaggcagtttatacttgcctccaaatattcgtcaaatccatatttagaaccttctcgtccgagacctgattgtttgacacctccaaatggagccacctgcacagcaattgataagacaacatacatgaaaaagaatatattaactctgtcagggacctacctctgttgaaatgatgccctcattgacaccaacaagtccgtattccagggcttcagcaacacgccatgaacgtggaatgctgcttgtaaacatgtaagcagctaaccctgcattagcagattagatgttagtggctattgtagaatgaaactgattttccaaatgcaagaagcataattttctgtatggtttttgttgagactaaatttttgagtgactgctaagaaataaatgaaataaacctgagttagtgtcattagcaacgtggattgcctcctcctcagttttgaatcgcaacagggatgccacaggtccaaatatttcctctctaaaccaagggaaaacatcaaatggggaaatgcttaatgttagcataaattatatagttgtcaattatcattactctagcttcgtttcctaagatagatgtatataaatatataccattttttctaaagtatatgagaaagaattctcttttcatctcaatgaacacttgacataaataacttgataaacaattcaaagaggaaatgaagtgtcaataaataaaattctgaatttaacattgcatcccataattatacacgcaagcaatataatatacatttggaaacaatgaaaagaaagaaaaagtctatgaatctaaagaatatgttcaatttaatacactcaagcattgtaagaactactagataccttctaaagttcctaaatttggtattctaggcacttatcattaacaacaataattctctacaaaatattacagcaatatgcacaagaatagctacaataagatatgatgatgtaaaagtcgccaattataaacttgcatttactgattaccttgatatgcgcatctcattattggtgtcaccaattatagttggctcataaaaggtcatgcctagattatgccttttccctcccagtattacttttgctcccttcaaataacaaaaaataatccatttcaaaaataaaagaataacaaaaaataataatgaggaacgagtaaaattacttgttaaatattaatactatctcttcactaaattgaggattctgagacatatagaacgaagtggtaactcaccaagttggccacaattagacacaataaagcaaagaaaaagtttgcatgaaagcaaatgaaagaaatcccaaaaggctaaccttcgatacggcatcttgtacaagagattctacctaaatgcaaaatcccaaagtagccatcaatatatatacatatatataaaataggttgctatactttgatcaaggaaataacagaatccggaaagtaagagaaaccttagttactgcagcttcatttatgagaggaccctgaaaggacaaaaagaattaggtaagaagtgatgtcgttgatgttatgcagctttctctgatgggattaaaagttatcaatgactaataaccaactacacaatcaatacaatgtgtgcaaaatctttcaaagatacatgataaaaatggtgttggacaattgatatgcataaacagcctagttaagattggttagacatgaaagaaaactggtttaatatgatttgagaattgtggatttcacatcaactctatggttggttggtgtatcagagccaaaaacctcaagtgggaccaataacgtggaagagacgactaatggataagcccatggacatcaatctaatgggaggtgtattgttaggatcccacattaactatgggaatggttggtggtttataactacttggcacccgcctatcatagactagtgtttagggagtaagttctacctaagtgataataacatcctctcagttaattaagctattgagaaggaacccatgtcctaacaagttgggctacttctcaaaagtagtaccatttcttcaaaatgtggatgcataagatgacaccatcgtgcagcaaataaaatgaagtgtgcacaaaataaaattacagcagtgatccttgtctccatagtaatgccataaaggaaaaaataagcattgaatccttcgagactaaaaaaatcaatgcagcaattatcatgacaaggcctagcctatgactaatagttgccagcatttgaacccgagctgtcttactttaatatttaataagaacattagagtatcaatatcacccatccaaaagaatacgtgtagatcaacattgaatttgacacctaggaacaatttacacaatctggataacaaaaggataaccaaaaaatttaaacatgttaatcacctacctggaccacatcatcactaaaaccatcaccaactttcatattttggacagcttttgaaaacgcatttgcaaatttctcatagatacctacacataaagtgaagttagtggaatgcatagaaagactaccttttgaaaacatgtatatcaattaatcctacaaagaatcaagtcaaggactcaataacgaataaaccttgcaattttaaatctattagacataaggaatgaagacttctattagtataaagagaaaagtaacagaaattataagcacaatctccatttcacagaataacaataaatcagcagagtcacacaaaaacaaaacaaatgaaactccataaactgacctgcaactatgacatgtgcttatatttttcatgggagttgagcaaggggtttgataaagagaaagaggtggcattgtttcctatattattttataaacaaaaatgaagacaaaataactagtatgtttagttggaatgaatgaaaacataggaataagaataagaatgagaataagaatatgaatagaatggaattaaggaggcgtttggttgg

SEQ ID NO: 112989 - DNA, 3506 bp, Cannabis sativa
atatcttgtttggcaaaataattaataattatataagaaaataataattttaaatacttaatatttgaaataaaaagctttgagtaattacacctaattctcatgggggaaatgtaatggagacctctcaattatctgtaattacgcagttacaacgtaattatatggtcagacaaatacggaaaactgtgtatctgattgggtttttataccctaaataaaagtcaatttcaatgcgattatcaataaagttttgaaattatattttgacatagtctatgctttgttcacatgtttatttcatgattatatgtctaatatataaaatctattaaatcccaaacatatagttatttacgattatagtgttgtcactacaatggaaaataatcgtaattatatgcttcaaactatttagtctcatgatttatcaatgcactggatttacattgacgtgataatttgcgatatggtttacttacacttggctaagtggaatgtctttttcaagatattagtaaagtaaactttttttagatgtatatggttacatcggattggattaatattgatagtggaaaagatatcataaacttaccattatatcttttctaagtcaatatcacttagttgatcatagatcaattgatcttattcctgagatgactaagcttttgtcagttgtagtagtggagttccttgacttgttcgttaccggcttaactgttagactaacccatacttacatattgggaactcgatagtgcagttaagtgagagtattaatcatagataagaatatctataacttttatgtttgcttagaagtgaaacgattgtttcctttgagcttggctaacgacaataaatagtaggcgctcattttggtaattatattagtttactaaaatatcatatacaaagagctacatattttaaggataaaatacattgaagggtaaaacgataattttattcttattcaatgtagactatctatagaagatcatttatttatttgattgaaacaatggataatttatagtgtatttataatgtatatataaagcaatgtaatcaagagtacaattctgagtctatagtggagttctgaggaattaataagttaaaagtttactcgccaatttcagatcaatttattgggagcttgattgtataggcccatagggtcctcaaattacctgggaaatttgagaatttttcactaaattaggctaaattgagaagataagagagatatagatttatttattaattatgacaaattggtgtcaaattaataaattattatatttaaaatttcaatttataattattaagaattgaataaggatttaaatataatatataaaaggtttaattattaattaattaagattatagataattatttacctaaattttgactagagttatgtggcaagtatgatgacatgtggcacgagattcttgagactaaattaatgaaaaatatgaaaagtcactggatacaaggacataattctaaagggaagaagtatggggatgagattgagtaactaccccatgggtattttctatgtatggggatgaagttgagtaactaccctaggggtatattttatttatggggatgagatagagtgactacccctcgagagtgagataagtaactacccccctaggtgggttagacaatcacccccagaggtaagttatccacccgagagtgataacttagtcaggggattaagctactcaccctctacactcttatggtcggtcgctcaggttgcaccctagggaataccctcacagtaattaccttcaattacacccaaatctaattctttattggttttcaaacttgcccttagtgaattttaactataatttttgagtgtattaagtaaataatgtaagaagttattttaattcaaatatcttaaatgtcatattatttattttgattcaatgatttaatatgaaaaagtaaggattttgtcaaattgtaacctgtgatatgaaattacaaaatataacctataggctgagacttaatcttgtagaaatacaagatctctctcgtgttggtgctgctttcttgtgttgagcttaaaggatataccacccagataaaaggcaatacacctgagggatgaactggaaactccagctactacgtagaaattagcaaaataacaccttagcggaaggtgtgcacctatctccacatgggcccaactctagatgccaaacccttcgtctgcacacttgcatggattctctctgcgacaggagagcctattccagtacagtcttggaacacactcaagccctcataaggtttcatatttcctaagattgttataaatcctaaatttattcacatattggctcatctcccatggactatcattcagcatcaatcttgaagcattctcatgctctagaactcttccaattcaatctcttcttgttgaatcttcgtagacatagtttttgtaaaaagaaagaaaactaagcagttagctacccaaactacctaatgtagagagggagcagggaagtccccctcccccataaacagcttggacaggtccgtattagacttactatctagaaacaaaaaccttcaggagtcattcgttctatatggaaagccagaaacattgagagggagaatgaaaaataaatcaagaaggtaccatgaacttcaaggcatctggacacgaaaaaaaatttccagcacttctgcagtaaaacagtcattcccataaatttctaatactaaaacctaaaggcaatatagtccactatgcctaatactaccaacagtatcaataacaagcccaagaaactccaatttcatttagaaaattacatgaaaatcctacatgcagcaatatatccaaagaatacagttaaaaggcaaaaaggtaaacaaatgcatacctgataatagaaacaaaggcaccaaactgattgtcattgtgtctagttcaggtagttgacaacacctttcaaaaagatgaatggcgaaggtgatcaacgaatcaatttttgtgttgaaatccaaagtcttaattcttcaagcgtagaactcatgatcactagggtggaaagtttgaaaattctcgagccctaatccttaaaagaagatggatgcaaagctcaatgtcacgctccaaatcggtttgggttatttcagttctaggtttggttttaacttttgaagttgtagagaaattcaaattttaaatcaaaaattgggggaaaattggtaaatagagttttctaatggtatttatacctgagatggctatccgcgtgaaaaggaatggacgatctacgattgtatctccaaaagcacaaatgcatctgatggatggagagtccagcagtcaagcatgtcaagctattactgtaacacactaactagcataggcgtattacgtgatttttaaacacactgtgcatctcgttgctaatcaatgaggtttatg

SEQ ID NO: 112990 - DNA, 6645 bp, Cannabis sativa
ccgctattaccctttagcggccacaattgagactaatagcggcggagaggtccgccgctattagtgttaaatgttgtagtgttaattaccaatggtggtatgataccaatgagagttaccttttagcatttcttataactaaaatatcatattttttatatatttttttaatgaagatatttaaaaaataattatcacttttcttaaaatttattaattaataataatagaacaaactaatgaattttctccaatgtcttaaaaatatttaataaaatatttaaaattcgagatgaaatttaagattaagatatacatttgggaaatacaatagtgacgactgcaagtgaactacggtaatgacaaggaatgagatacagtgatgacaacaagtgagatacgatgataaaaataagtgagatacaataagacaacaagtgagatacaataataacaatagttttgaatgaatgagataaaataatgcattatgggaacaccgtaatttttttctacaccaccctatttatttatttttataaaaataatttttttaacaaaacaatttaaaatacgacatataataaattttaaacttcttaataaataattccaaataatattaataaaattgtggatttagtttttaataattaaaattattattaataatatgaaataagataatatatttatagttttactatatattagaactatatttttaagtaactatttattataatattaaaaaaaaaattaaattagttgcgtgaagaacgattatattgcctaatttactaaaaatagtggtttatgtaaaaacaaaaaaattctctgtattttcacgtttgtataagagacttttatttaaggaaaataagggactttttacatttacaataaaatgaatttttggttggaaaaaataaaactaaaaaagaagaaaagaaagaaaaatggagaaaactaggaaagtgaataaagaataaagtaattgatcgatgaatttgtagataaaaatggagaatagcaaagggaaaggaagaatgaccgaatgagacggtttagggccttacatacatatataatatgcattctctatatttttttatttctaagagcttcatggatcataatggcatattagagggggttttaggctttatacccatgagattaaaataattgtttgatcacaataatagctaatcaagcggatggaaactattgaaaaaagaaaagtcatagtaataaatgctaaaatgatatacgttaccgccaaaataaagcatgttgttttcaaataagaaaatacaaccgtaccctcaagcaattaaaaagtctttgttattttgaaaagtacttttaggggcaattgtaatacccatatttcgagcagcaatatggtgctgacacgtgtaatgtaactggaatatgaacaagcttgaattatgcaataataaatacattcagacaactcacctcgagaaatacagttggtagaagtatttgaactcaccctcttaaagacaatggcaaggcgtgaataataactactagttgaggagactagtgagatgaacagagaaagtccatctcgtgatacacagaatacacaacaaaattgtttataaagggtagaaaatgaattatctaaagagcttgcagctcattgatccatatacacgtgagtatgttgaaagactaaatgcaacacatttagcatgattcaacttgcaattgtcatgttgcgacaaacgtttcgcgtatggctaactaaacactaatagaagaacgcgatgaatattacagcacatacttagacactgatttaatataaagcatcaaatagaattattacatcgcgaggagaatgaaacatagtcagcataattgcctattaataaaattaaaagtgcaattatgagaagttatttttaattatctcatgtgcatatatatgaaacgtggagattatttatgtttcatgaacggttacaagtgataagatcccaagggaataactatcatcctagactcatataaatagggacaaaacttagggaacaagggacgaccggttgaaaaaagaaataaaattatacttaccatacattctgtaaataattaattgtattttgtatataattcattaatctccgaataagatagacttgtggactatgaagaattaatttcaaaactacataaaaattctcttgtcatttattataatattattattatcaattattgctggagttcatttattattagctaataaaaaatttcattaatagttgggaagccaagttttgggatttgtttgggttgacgatggccagaggggtggttgtgcgaaaaaatgagaagggaaagtgagtgtcggagctgagggagaaagaagaatcaaagaagaagaagaaaaagaaaaaaaaaataaagaaaaaaataagagagaaaaaaataaattgtctatttttaatttttattcatgcttttatttttacatgttttttttatatattttttgaaataattttataatatttaaataattaatattatgtggaccattagaattctgtcacgtgtacactgtgatacttgtaaagtccaccttggcacttaacataattttttagatgaaaaagtaaatagcaaaacagaattaaggttcagaagattttactaccaaaaattgggtccgtgggctaagtgtaactaaatgtgtagtttaggtagtattcccgctaatatccctttttgtttttcaaaaataaaatattttaaaaagaaaaaatttattttgttttttgattaaaaaatttaaaactaaaagtgttaccaaacgccacctaattttttttattatttgcaaacagatgatattttcttttcatcaaactccgtcgcatattgataggcttcaggtagtctcaactctcaactaaattaaaagttttggtaaaaaatttaattatagatctattaaattaataaaggattattttaaaaaatatgggaaaattttttttgatatatatgacatgcaaacttaatagtgctaaatatgacatatttttttttttagaaaaaaaaataaacttaaaaatataggataaatcaatatacataagaatgaatgtcataaaaaaaaacttaaaaactcgtatataaattttacttctatataatcaaaactagtttcctaataaaaaaattaatttcctgctgaagaaactagtttcttgataaaaaattcaatttcttgatgaaggatctttgatgagtttcgttcctatcgatcgtggccatatgggtaaaaaactttaaaagtcatatataaattttacttctatgtaatcaaaactaatattttattgaaaaaactagtttcttaattaaaaaaccagtttattgatgaaaaatacagcttcttgataaggatcattggtggacaatttatctaaagattaaatatggattttgaaaaataaatttttatatacatggcatagtaataccataaaatagttatataaaaaaataaaaaaaaaatgccataaaaaattgccaaacttaaagctgccaatgccatatttaagtaaaacaaagttaaaatccatattgtgtaaagtcttcattaatattaatagaagagtacaataatttaacatttttataaaaaaaaatactaaagtttatattagactaaaatttctatctcacaaatgaaagaaaaataaataaataaattataaattaacataatagcacaatgaaataacatatcaaaaagaaaaaaaaaaaactttcgagacatgaactaaactctattaatactcttcaataagaaaaattaaattttaaatttatttacatgaaattatttgtataggtatcaatactttattacctactatatatataattatgatgtttacatttatttttagccctttataaattattattgaatggttgtaacctaatagtaacttcacactttatttccttattaaactttaacaattatattttaaaattagattaattataattattaattaattttttgtaatttatttctaaataatgatcatttagcaattactttttttgcacttaaattattaaaatatctatagcaaaatatcttataattttaaattataatatgacctcatgatttaaaattttattacacatataaccttaattaaaaattattacacttatttatttatttattttatttaaaaaatttaaaaataaaaattcatttggaatcatgtgatgaaatgtgaaatggattgaatgtattttctaaaaaaatgtgttgaatgagaaatgagtggacttgtatataaaaataaaattatttataaatattagttgctaaaatggaacttgttaaatattgaaattaaaaattatgtattttaagaaaataattaatttaattttaaaaaaggaatctttacctattggtaacttgctattataagttaaaaaaaatgtaatcgtcgtggttataataaaatgtaaccattgaatagtcacatatatatatatatatatttaaaatatagataagaatatcaaaaaatatataacttaataataataagagtaatttgcggcgtaaatacctaagtttaattctcgattacagataaatatttaagtttaacgataataatatctaagttatatttttataacttttaggcaggtacttaactgttaagtgtcaagtcattatccacgtgttattttcttattgatatatttaaattaattttgaataaaaaataaacattttaatgacgtggaccaatcagagacagctacgtgacaatttacttgactcttaatgactagttacctacaaaagtttcagaattataacttaaatattattatcgttaaaaattaaacataagtatttatttacagttagaagttaaacttaagtatttatatcgcaaattactctattaataataataataatagaatttatatatttatattctttttttatatatataaattatactaaatataatatttattcaattacaaaaattctaccattaaaatttgatttgtgagatttatattatatgttattagttaacaagtgaatttttctaattaaaacaatttcacaaaaaattgctaaaagaaatatttttcacaaaaaattatattagttagataaatagataagtattcattgctttcagaaaaaaaaaaaatagataagtattcattaaaatgacaagataaatagacaagtacggttttgctgaatagataagtacgattttaggatactttttcaatgcaaggaatgacttgcaccacaatttcttgcaagtccttttctttcttattgattaaaggggtgattcaccaaaaggcaacaacatctatcttgatttttgaatattcttcaacactaaaattcaaaattttatttacatcatacaaaatgataaatgcactttaatatttaaaaaaattacttaaattttttaaaattattttaaatttttcttaaaaaattctcatattattttgtgttaattttaatacttattttaattttattttaataattttttaaattatgtgtaacttttatttcatttttttagtaaaattacacataaaaataaaaaaatataagaatgtatttataagtttttggggcacaaataaagcccccttttaattatactacaatagaaatttacaattatataaaattaaaagaaaataagaataaataaataggatttttgctaaatttggacactaatatgatttttccttcttaattattttgtttttgtaaaactaaaatattcctcaattggaaacaattgtaaatttgctcattcggttgcatttcactcacttttactatgcatttcactcacttttacaaatagttttctgatataatactgatccacgattactttactgtaatttgagagtacatgcaaaaaaatatataattgtataaatagtactctaacgataaaatttgggactgaatgattgtaattttagtttaaagtttgaatgaggtcattatacttggttttagctagaggaatttagacaataccaaaatttcatgaatattcaagccaacaaaaatacacacatgcataaatgggagtattcacctagatcgatgagtactgaaaataattacaagattacgcaaatagaacaacaaacaaacagatgaacacgaaggaattataatggctaagccatagctcgatctacttagtactctactttagaaaaagatttgtgattagatttattccaaattgaatcactaatttatatagacagtaagtgatccttcatataacataactggtcagacaaaccgttgcaacattaattacatttaattaggatagaaaacatttaaagaatttattcttaattgatattcgaacgtatacgactttgtaagtcacacgctggtcgttcatcttcttgagtaacacatgaacttgcgggctctttggtgttactcgcatataaggtttttggattacctatgaaattccgtattttaatattcccagtttgattatttaa

SEQ ID NO: 112991 - DNA, 1724 bp, Cannabis sativa
ttttgattttgattttgaagtacgtgttattgacattagtaaaaaatgttaaatgatggaagtctattgaaaattgatttgtggatatagttagtttgagttgattatatggagtccaattattgtagttatatacgaattatattgttaatttttttaattgagcattaaggttaaatattttaaagcagttagactgaaattctacctaatgttgcaatttaaatgttaagagtaatgacaaaacagtcagattttaatagtggcttattaacttaaagtcttccactaattccatcatgattggtaagtaattctaatcattagtttttttttgttttaaaaaattggtgtagaagtatagtcatagtatatttatattttggttattatctatatatcaaacatttttattgtaataatgttgtgcatgtggcgttgtggtttagggaagtcaaaggtgaaagagtaaaaaaaaggttggtcaacgtagtttagaaaaatcggcgagtagtgagagatattagcgccatatttgtgggaccaaccaactgtcggtctcattgccagctctttgcaacttattacttatgccttacttttccccaaaaccacaccaaaaataaaccttctttttcctactcatttccacttttacccttccctattttcagaatcatatcaccaagaaaatcaaaatttgttttttatttatttacaagccaaaatttgtgtattttggtctaattaattttttaaggcaaagtacttgttaggctaaaaattattgtccacgcactgacacagaccagaatgataatcttaggtttaattttcatcttaataaatattcacaactaaattccaaaaatattttatcaaaaaaaagttccaaaaatacaatatatataattttaatagcaaataaaaaagtgtgtatccttttaaaagaaattttagtatataagagataaatatgtattttgtttcctcttttgagtgaaagttaaaaaaaaaattaataattcaaccgaaaaaaaattaaaaacagaattaaagttcacaaatctcacattggagatgataattaaacataacatgaacaaagccaataatacaggacatgatttttctttatcaaatgtttgtagatatatagatattctataataaatttgtgaatagataaaataaaatgtttttgttaaaaaagaaaaaagcaaaaagatctattttagatcaagtagaggctaatctatgataaatttaatgagatgtagattttttttttttgtaaggttaattaatgagatgttgtagattattatcaaatttattgacttaattattttgtaaaaaacctaatcattactgatctctcttccacaataagaaatgactttatatgcctaaaatttacaaaatgaatcacaacaaaatttgtgaagtatcttaaaccagttaattatatatcatcaaatcttatataaatataatacgagaaatgttttgaaaggatataatggtagccaaaattatcttcaagtgtgaattattattagtatataagtttttggatggtgatatttattggatgttagaaatcttacatattttttctgttgccggaaatgatttctaatgtataataataataataattttttttataaataagataaatgctaattaggattttttttttccccaaattttgacatgta

SEQ ID NO: 112992 - DNA, 1006 bp, Cannabis sativa
  modified_base (852)..(864): a, c, t, g, unknown or other
  modified_base (942)..(949): a, c, t, g, unknown or other
cataaaacttttacgtttgtcatcatggggccaacttttagcttcgtcgtcatttctgctagggtgtgacttatcccttccttcccttcgagatcttacttgaccttatcagggttattagttatgattcatgtttcgctcatatacttggaatcttccatcctggtggtattgggtgacatacccttacgaccttcctgcatgtcgaggaagttcatcttcacttcttcctttcgacctaagttgaaaattgtttttgtcgtcccatccaaggttgtaacttgacaagacttgttcatcaacatgttggtaagggttgacctctcggggccctaaactggtgggtgtacttctcttgggttgttgaacgtcgttggttagacgctcttttcgtccgtgtataagcccatcacttgagatatatagcccctttcccctattgtcatcatgcatgtttgggcagttgggcctcaatcattttccttccagtctgttgggaaaatttttgaattagatcagcaaattcctttgccctacgatggatttcttcctactggtgtcacattgcccgggcaatgcgatttatccattcctggaactcttaccgctactggtcgaacgcctggttcaccattgtggggggtttcctcatggttttggtggagggtgtttgtgtgcatctggacttgccgcaatactactttgaggttctccaattcagagttatctaggtccacttgaggttctcctttggatggttggcctgtcccgactgcggtctctccaaccaactaccgactggtggtccctagtcatgtgcaccacaaaaaattttacttttagtcataacannnnnnnnnnnnnaaagtaaaaaagttgtgactaatcttaaattatcatccctacgttgtgactacaaagtccgtggctaaaagtattagnnnnnnnnatcacaatttgttgtgactaaatgtgtttttattcacaatacttgttgtgactaaaa

SEQ ID NO: 112993 - DNA, 7483 bp, Cannabis sativa
  modified_base (30)..(33): a, c, t, g, unknown or other
gtttacttgcatttggagaaattctatgtnnnntccagagcattggttaaagtaacgaggctacgggcattgttacccagactcatcgccccaaaccaagctgcgtttgtaaagggaaggaacatcgcagaaaacacaatgattgccagagaaatagttcactctatgaaaaagagaagaggaagtagaggttacatgatgattaaaattgatcttgagaaagcctatgacaaagtagattggggttttatcatcgttgtcctaactcaatttggcttctcctatccgttcattgaatggattcaagcttgcatcatggtgaaggaaataaaacttcttctcaatggagccatagtcggaagggtcaagccggaacaaggtctgaggcagggagaccctctgtcaccatcactctttatcctagcagctgagacgctttcccgcctgctctacgacaaagaaaaaagaggtttaatgaaaggtttcaaactgggaagacgaggagcaacggttaaccacctctgtttgccgacgatattgtattattcggccaagcttccttaaaggaggccaaagcatttaaagattgccttcacaagtatggccaatggtctggacaagcaatcaacttccagaaatcatccatccatttttctaaaggagtgccccgagggagaataaaaaccattactcagtacctgggtatgaagaaaatgatgcccactgcgaagtacctcggcctccctctgttcagagcttcaaagaggactgaggactataaccatcttgtggatcgtatcttgtgtcgcatccagggttggaaggccaagcttttgtccaacgtaggcaaggcatgtttaataaaatcagtgggatccacgcttgcaaattatattgatgcctccgatgtaatccccatatctacatccttaaaaattgataaagctttcagagattttttggtggggcgattcggacactaagagagtgtttcatccgattgcttgggagacactttgtagaccaaagactcacggagggctaggattcagaacaacggaagcaacaaacaaagctttcttaatgaaatgggcgtggaaaatgttatcggaggacaatagtctatgtcgacaactcagggatgcaaaatacatcaagaaccagagttccatggatatggaaagttcaccatctgattcaagactttggaaggccattctcaattctagaacgctcctacagaaaggtttgtgtcgtaagattggcgatggcagagccacatcaatatggttccatccttgggttccaggggacaacccccaaccgaagcccaggctcgacgcttcaaaaggtatcagcttggttaacagtttcatccaaaataatcaatggaatgtgagccttgtaaaacaatggttccaccacaaggacgcgagacaaattctgaatatcacactgcctgatcgttccgttgaagactcttggttatggctcccagaaccgaacggacaattcaccatcaaatcagcgtagaaaaccataaaaaatctgcacccaaatgcagaggctaatgggaaatggagaagcatttggggagcaagaattcacaataggttaaaaatgttgtggtgaaaaatcctatcaaatagcctactcactaaggggtaaacttctaaccttttttgatattcgtgacccgggatgtcctttctgctctatgactatcgaaaattcctttcacctattatgggaatgtcactttgctagagctgtgtggtttggctgtttgtggcaaatccgaaccagcgaaacaaatatcggggactgcgacaattggttgaactggttcaaaatggataatagaagaccaaaagatctcagcttccatgagttcttaggcggtgcggccattatattttaaaaggtttggaaggaaagaaactccattatacaccaagggaaacacactccaatcaaggtgattatatctcaagtcaatattcggctgcttaaaaactcgtaggatcacacccaccctgccgctaccatgctcaagtggctcccccttgccggttggagtctatgcaacactgatgttgccattgggaaaaaccgagggggtggtgcagccattttcaaaaatgagaatggggtgatcacgagcatgcacaccactgaacaccaatacatagaccctctggctggagaaatggccattctttgttggagtgcacaaaccgcaatcgatatgggcctgaaaaatgtcatcttccaaagcgactctgtgggttcaattaacgcaattggctgtcaaaagatggtatctcagcctttaatcacaacattcaggagctcataacaagatttcatatgctcatgaggaaattcgatctctgggtgatcatttggatcccaagaatccacaacggtgtggcccatgatgtggctcaatgggcttgtcgagcggagcaatttggaagaatcgacttgtccaattttgagagattcccacttcaattggatgtggatgactgagttgaatcggtttattactatgtttttcttttttttagtctagcttgctgtttctttgtgttggtttaaaaaaaaaaaaaatacacaatccttccatggttgttaggattttccatttggatggatatctccttaaatttagagtaagtaaattgatcaatgcctctctctcttctctcgtctgtgtttttctgtctctcatattattatattgtattatatactgattaatctcttcttcttgatgtttttgtgtttatacatatttatccctctcattacttagggattgaatataatgaaatataaaaatgggtttgttctattcttcgttagattctttttgctagctggtaaatggggctcttttgtttttatttcattaacaaaattacttaggattttttcatatttgtgtgtgtgtctgttcgaatcttctttaccttttgatttatcagaatgatttggttcctttaagttaacactaattgttaaaagatacatttttgatctattgtgtatagtgattgaactattttatcagagattataaagccacttccacggagaacatatagtcaagttatgacattattttttaggtaaatatgatcatttttataaaattggaattactataatgactaacttttctagttttgttaatttttagaatgaaaattttatcatcttttggatattatttctttcaatttatttgctaattaactaaagatttcgtgcttctctcatgtatggataaaaagtatagtgttttattcttcttatgaagctttaggacttgttttatttctagattttgcacccttttattggtgtggagacaatagactttgataattagccagtgcgcgcatggtattgcattttatttttccctcaaacatgagaagtgtgttggtgcttgttcaacataataattcatttaattagaaaactcagttctactattactatattataatactagaactctgttggagagtcagaatattatgttgatatattagtaacaagtactgaatacaaaagaatttgtatcatataaattctcctattaagcatcctagtgccaagagtataatgatcacattttaatgaatttaaattcatatatagttaatcaatagcaaatatatgatcattatgtgcaatacgagtattaatgattggtgagcctataatatagttgctcgatgattgtaaacctataactgagctctttttggactttttttttcttattgtcattaagctgtctttagctttattattacttgatattttcgaatataatctgttattatgttaattattgtgtgtagcctttcaatttatgcagcttcatagatattgttagaaacatatagactacttcatttggtttgaagaaaacgttgaaatagcacaaacatgtatagagatcatattcattttcaagaaaactctgtagtccatccctctgaaattagcagtgttacatcatgtttacccaataggtagtcatatatgtaaggtgaaaatgcaatatgaacatcatttttatcgtatattattttaatgcaataaacttatttagataagtttttctctctttctctctttttcctttcttcgacagaatcaaaataaaaatattgatcgttacatattgcattctcatgtagagacactcccggaaaattttatttatattactttagtcttagcaagatattggtacaatgcatgaaaatgcccaatgtgtcaacttttttattggttcatttttgatgtagaagaaagtgtaaatgagggaaaaatttcttctaacttattattttttaaaaggggaacgtattctacttattatctggaagatgcatgaaaggtcttgagtctatgtttttctatttgtaattttcatttgcaaaagcttttcttgttatcttcatcttggttttagaggtactatcttaatcctcaaagctgttttttgtttttactttcctgtaagtttcaaatagtgtttgaaccattttggttgttttgttttcttgtttgcacatttgtaattatgctagctaattgaggtttgcgcaagttcttttgggaattagtttatggggttaagttttccttgtttataatttgtttgtaagttaccttccattagttgtcatttactttggatgcaaatgctctgctagatttaatctctttaattataacctttatattgctaactgttaattaccatttccccctattaggtgaggatatatagaggtatgttgggaagctaacaggtgcgctgcaaacaaggtaactacacttttatcataacgtccataacagatgccttaggttcattttttccctttcgtatgtgttctcaacacaacaccctcaggtatgttttggtttatgttgttgaatgtcttaatacaaacctaacaagttgtgaaattgtaattacatagaatggagtagttgtttttgaagtaattgtgttgccttaacatgtggaaacaattttcattggtatttagtattttggttttacgtatttatcatattatacatatatgttggaagtactggtagagttaacaatgaggctgcaagcactatgatgcagaagttttgggatgcagaagttcgatccatgtttggagactttatatggcaaggtcacaaggatgcttcaagagcaaactttgatcaagctgttaaagcctccccagatgattggtaagacttaatttcacgctcaattcaaaattttataactttgttcatagactcgtatatacttgttagtaattgttaatttgtatactttttcaatgttattttgattgaactaaatttggtagactcgtatatacttgttagtaattgttaatttgtatactttttctatgttattttgattgaacttaatttagggtttgcgtaattaatttgatttttttgtatggaatgtgcagttttgttttggcatcatatgctcggtttctttgggactatgaagaagatgatgatgaggaagagacaaatacagaatcattaacacccaatttctttcggggaacaactctgttacttcttaagctctctactttagttcgtgatctgttgtataatagtctatgtacaacttcccaagccttttgtttatatacttcttttaaccctttttgtcaaagttttgggtgcgtagactatattaaccgatagctatatatatatatattttttttgtaaaataatgcatagatgaataaaagatgtagaatctatttgttgctatctttctctcagttttgctttatgatttatttttatcggccaaatgaattttctttcttggctataacttatggttgaacttactttaactcaaattaaaaaaaaaaaaaaatcataaaaatacctttggtgtcgttttataaccgatactaaaaaacctttaagtgtcagttataaaacaacatcaaaacttaaaaccgacaataaaagaaaaaccatatgtgtatactttaagtgttggttataaaacgttaaaagtgtcggttctaaaagtataagtgtcagtttaaactgacactaaaagtgcaatttgtagtagtgagataatatgagacgagggtggctccactaggaaaatcaagagagacagagagaaagagagctcaagcaagagatatccactacaagaaaaaaaaagcctattggcatgacaaaaattgtgcctagaagctcaatttttcgtgccaatataccttcaggcacgtcatgtcgtgccttttttgtcgtgtctaaaacactacaagcatataggcacgcctaagtggggcacgacctaaagtggtgccaatcacagagtatttttgggcccgacactcttactatcgtgccattattattattatttttttttttctagtttttataaattttggtggcagctgggcacaacactatgatcagtaggcacgaaaatgtcgtgctccaaaagttttgaaaagtggatgctaatgcagcgggaattttcctccattgtaggtgggcacgatcacgtcggccctacaactcttacctgacgtgccaagttaagattctaggcactattttgcaattcaagaggcacgaaaatgtagtgccaatgttccccttttaaaaaccctaaattgtttttcatcttcccatttcttcttcttcttatttctcctaccctctccgcctccatcagaccaaaacaacctcctgccttctgaaacccacccataatctgaaaaataaccgcatcccaactccaaaataaaccccccgtccttaaaatcggtaccccgaattttaaaaagattatatttgttccgtaaattcaaaacccatccaaataccataacaaaaatttgtttggtgggtggtatatatctccattccaggttttcggacatttaaagctacgttctcctccatcagcgtcgatctcaggatgaaactttctctaatttgttgtacttcatcattttacggtaagagcagatcttggttaagccatctccttgtatttacactctttttcttttcgatttaagtattgtatattacatgtcatactccttttcttttatttgatttaaatatctcttactgcccttatggaaataagtatatataatgattaattttatttttttgttttggatttataggtttgatcatattggtacacagtataaaaacagggtttggattgaaaagtggctgaaaatggagttgggggttcactattcacaaaggtaaatctttatgatgggtatatgatttttttaaaactttattttggtattttcggtttcaaatttgtgtgcaataatgagtacttaatgtaacgccccagtattttgccttattttacaaaaatactattttcatg

SEQ ID NO: 112994 - DNA, 2854 bp, Cannabis sativa
taggggtaaaatggtccaattcaattatttcattaaatcctggtattctaagatatccaataatatggccctataaaatatacaaatttgtatccatgtgactaaaatttccatccgagctatttccactgtttttgggcataaaaatgtgaaaatatgaaaatttacatagatgcatatcacacctatgatttaataaaatctctagtattgagaaataataatcttaacacatattttcatgaaaatagggtctataaagcataaaatgcataaataatcacatagttagattaattagtgctaagtatcctattaatcccatgtctaagtataacggtcattacatatttaatattaccgtcaggctcctgtattcccaacaactctttaatacctcttttcatcccaatgggagtatttttgctaaagaaaatggaggttttgagcttgttgacttgttgacctgaccaggaatagaaactttctatgcacttccaaaattttttagcttccaccaagttggctcttccaacaaggataaggtcatccgtgaaaaggatatgagagagaatgggcccttgaatgagtctaatgactttaatgtccccctgtccaagagaacttcccaaaagtttagaaagaattttatcggcccaaatgcagagatagagagaaaggggatcaccttgtcagatgctgcaagaaggaacaattctcccaacctagccacactgaggcaaacattaagagcagttgtcgaatactttgattgatctagtttctaaacatcctaggagccccaaacttatccagaaccgtatcaatacacttctaactaagtttatcataagccttgactagatcaatcttaatggcaaagaagccttctcgacctttttttctcttgaacgaatggatgacttgttggacaatcacattgttttcttgaatgtttattattggaacaaaagttacttacatcgggcaaatcagtcttagaaggataagcttgatcctatttacattgattttagatatgaccttgtacgtaacattgcaaagagagatcagtctaaaataactcaccctcttgggattttggactttagggatgagaaccaagttagtggaattgacactttaatgcatagtcccagacttgaaaaaatcagaaacaacgtcacataagtcaccacccaccgaatcccagtagtgtttaaaaaagagaactgacattccattcggaatcgaggatttattgctacccatggtaaagagggtctttctaattttgtcaactgaagaaatcttgatgagctcttcctgctcatctaaagacaggctatcttggatgaggtcatccaacgcgggctcctgggttgggtggggacccaaaaaaattctgctccagtaatccaaaaactctttcctaattaagtcacatctagtaatccacacatcatttctatccagaatacattcaataacattacgtcttcctctaatggtagaggtcaaaaagaaaaatttagaatagtgatccccatatttaagccaagagatcttggctctttgtttccaataaagagctttcctttccaaagctttattcagggtgttctgaatctcacactcctctaacaaatctctggtacccaccgacaaagcttgtaaaagattaagcttattttccaaagttctaatagtattatcaatgttcccaaacagaagtctattctagtgtagcagggtgaccctagtagccccaatttcttgaaaattttggtcgaagcccaagggtgagtggtagtctaccaagcatgagctacaacaagtttactatgatcatcttgggtccacccttcctcaaatttgaagcaccatttaaaattcacatctaaaccattaaaaaaagagcacaacagtctataatcctaattacaagcctagtacgagcacagagtagccttcgacaaccgattcaaccaccactcattgaccaaacctttgtgaagaactgatttactatgagccccaccctctcggtgattattctattcaagctttttgccttggataggcaaattaataagaccgcgagagaaaacaagctcttaaataaagggagcaaattgatctttgcccttagaccttactctttcagaatcattgagcacaaaattaacatcaccaaggatcaaccaaggacctccaaatctatcacccaacttcattaactctatccaattttttttttacatggaagtatgggggcccataaatacaagaaagaaaccacggattggtcagagggtctgaaaagacaaggcctaggcctagtcgtcttgcacaaaacaacataggtggggattgttatgccttatcatgtactcaatctccctcttctaaatttgacactcattagtgtcatggccaaagtcgttgtgatatctacagaagttcaacatgtccctcttacccatctcccttcgatagcaaagggctttcattatgggaccgttccctgagtatccatgaagatggcctcaagcttttctattaggagggtgaagcaagtacacttctcctccttgttcttctatggcgtggggggaacgttaaacttccccttttttccattgttcctcctagagttgttggtaatgcacttatttttagtgttattaccactagaggtctgggcagcattgttgttgtctgcctgtgagcctagtgggtcatgaggctaatgggtgcctcgtgactgcctactattgacatgccccgcttggggctgtcgtatggcttcttcaagtttgataaaatcatctactctatcgaggaactcctt

SEQ ID NO: 112995 - DNA, 2387 bp, Cannabis sativa
  modified_base (69)..(84): a, c, t, g, unknown or other
  modified_base (2316)..(2359): a, c, t, g, unknown or other
ggttattcttatttataactggcccaaatcgggacttgattttcttataacaaattagaggttattctnnnnnnnnnnnnnnnnaaatagaggttctactgtagtaactaatgccacatactaaattattagcaataatttttgttttctaaaaataaaaataaaaaagagaatgagataaaaagataagtttttaagggtttttttttacatatagctaggtcatttttaaaagtgtttttttaacctcgcatttaaaaattaaaacgcatatttttatacgtgtacaataatattattttcaaattaaagttaaacagataaatcatatttacttagaccatctttaaatagttatattaccaaagaatattattagattaataaaaactaatgttaattttctcttttgaataaaattaataaaataaggtaaatgtaaaaaatttgaatttatcacctttatcttgtagaactaactttatcttactttctgcttagcaaaaagactttattttactttctctatataaatattatagttcacattttaattcaattcgtttgttgcctaactcattatattggggctttggttatgtgttgaaataaaatcattcttacttactataagaaaaaagctaataaatttgaaactttgagaaaagcaagaaaactgccacataacatctcatagattctgctatataaagagagaattacaatattccctttaaaataaaattaaaaaaaaaaaaattgaaacaataatacaataaaatccacagctctcttcaacaatgagcatatatacaaattaacatgaaagagagaaagtgaaaatatttatttgaatgtaatcaagtttatctgaatgaatacaagagtatatgaagagaacctatatatacaaagaccaaaaggccataaaccgacatttaactaacccaactaacaagaggaataaatggaaaataacactaaacaaaataacaaattctaaatgtattaactaatgcttaaaaatcttaatattcccccctcaagatgtaatgtatatgtcatatacaaacatcttgcgaatatgtgaagaaaggatagtagatggtaatggtttagtgaaagtgtttgcaagttgaagagttgtgttaacaggaatgagtcggattgcagaagctttaatcttttctctgatgaaatggcagtccaatttaatgtgttttgttcgttcgtagaaagttgggttgttggcgatgtgtatggcggattgattatcgcaatatatgaatgcaggaacagtttgtggaataagtaggtcgttgagaaggtactgaatacatgttatttcgctgctggcagcagcaagagctctatattctgcttcggctgagctgcgagagatggttgtttgcttctttgttttccatgaaatcaagtaatcaccaatgaatatgcagaagccggaggtggatcgtcttgtggtggggcatgaagcccagtccgagtctgaaaatcttctaagacacaatggagatgtagaactgtatagtaacccctgtccagaacaacctttgaggtatcgaagaagatggtgtatggcttgcatatgaggagtgcgaggtgatgaaatgaattgactcaaaatgttgacagcaaaggtgatatcaggtctggttaaagtgagatatagtagacgtccaacaagttggcggtaggcgaaaggatcgtcaagtggggtaccttgagtatcatcaagtttagttcttgggtccatgggggttttggctggtttactaccagtaaaagtcgtgtccgttagaagttgtatattttcgttgggaaagaaatatcccttttgaggatcgagcaatttcaaacccaagaaaatatttgattggtcctaatgcctttaatttgaattgattgtgcagagatgcttgtagttgatgcagtagttgattatttggaccggctatgatgatatcatcaacataaactaacagggccatgaagttattgcatgtacctttggtgaataaagtattgtcggcttaagattgtttgaagccttccatgatgagggcatctgagagcttcttgtaccattgtcgtgatgattgttttaagccatagatggatttctggagtttgcaaaccatagtagtgtcattggtgtcaatgtttgagggaaatagaccaggaggaatgaccatatagacttcttcgttaaggtctccattaaggaaaacgttgttgatgtcaatctggagtgtgtgccaattttggatggcagcaactgttggaattattttaccnnnnnnnnnnnnnnnnnnnnnnnnnnnnnnnnnnnnnnnnnnnnatgaatttctaaaacaataaaataaaca

SEQ ID NO: 112996 - DNA, 2476 bp, Cannabis sativa
  modified_base (43)..(48): a, c, t, g, unknown or other
gaattccataaataacagaaataaattatttaaatagctatannnnnnttcataattaatcataattaaccgataatttccaaattagctaagcgggctttacagtaatttcctctaaggaagtatgtgtattttttttggggaacttattttttgtgcatgtaccattactcttaaaaaaaagtaaacagtgcactataaaagtgactatatctctcttatattaaatgtagctatttaacggaaattgttggtttaataattttatttcgttaaaattagatgttaaaactaacaatgttaaatcaatcaattaatcattttttttaaaaaaaaatatttgaaatatctaaatttaatttaaatataaacaaaattatattattattttttatgtaaatctgaatttaaatttgaattagatgtaattcaattaaataatcatactttataataaatttattaattatattgttcataaatttatcacttattttatcgtttataaaattaattagatatatttttttataaataaatttaaatttaattaaattttatacatataaaaatataattaaattttatttgatttaatccatttattattattattatgtaaaataataattaagaatatctactctaatataacttatatatataaaaacaaatcagtacatgtgtcatcaatatatatgggactgtcttcagtatgcattgatgtgcaaacctaccctttctcctacttactatgctgtgtttttactagtttactagtggtagttgttgatggttatggtgatagttggtttacatttatatcacaattcaggtcgtgttggcaataccaataaattagaatgatgttcatcaattaatatcaattacacgctttctcagctatgtatgtctataaaaacaacccacaccattctcatattatcacacgatcatcattctattcatggcttaacattttctttctatttagcacgtaccactttataaatatataatttttttaatataaacatcttctttaggctacactaagtagcttagttttcaaccattattcttaaaaacccacagatataattcaacccggccatataatccttttattttaacttttctttgatattttttttttggtcgattgaagaaaaatggggaccgagaaagatcaagcacgtaacctagggccaaaaacacattcagtgaaactcaagtacgtcaagcttggttaccactacttaatctcaaatgccatgtatcttttcctccttcccattatcatagccctaggccacctttccgtggaagatattgctcaactcttccaacaattcgatcttggcctagtctcgggtacactcgtctgcacggcccttacggtgtgcctcgtcacgctgtacttctcatggcgacctcgtgatgtttatcttctcgacttctcttgcttcaagccggatccctccctaatgtgcaatcgtgagacattcatgcggcagcttgcgaaagccgcaaatttcagtgatgagctcctaaaatttaacaagaagatcattgagagatcagggtacggacagaagacatatgcgcccaaagccgcgctggaggacccgccagtagcaacgatgtggaagtgcagagaagaggtggagatggtggtgtttggggctgtagacgagctattggccaagaccagagtgaatgtcaaggatattgggattttggtggtcaactgtagcttgttcaatcctacaccatctctttcagccatggttgttaaccgctacaagcttagagggaacattttgagctatagtcttggtgggatgggttgtagtgctggaattattgctgttgaccttgccaaacgtttgttacaggtttgtcatttatactcatcttttatatattattagactatgtatattaaaacccttataatgtagccatgtatatctacgaataaatttaagcatctttcctagtcgtgtttatacatttgttcggcttaaatacagtttcaattactatcagagctgtgtcatagatcgttattagtgtagtttaatacccggtttcatatattttagtttaattattattacgggaaaccctatttatgaaattaatagtaatgatcataaatatagaaagcaattactgtgcatgtgtactagcgttaatttgtcgtgttttgtttttcttaaaataagacattacattaataaataaataacaggtttaggttcaatttatattatgggtcagatgtgatagatgcatgcacagtgggccataaatctcgatttaaaaatttaatggtggaaaacaaatttaccgacagtacatgtttcccttaagaaaaaaaaaaccctgcttaggcctttgaaggttcattatgagttatatatatatatatatatcacaaatgttaaagggcaccagtggtacttagcac

SEQ ID NO: 112997 - DNA, 1657 bp, Cannabis sativa
cctggtaaaataagttccaacacacatgtggcgtccctacgggtaagggcattacatagtatccttgacaggcccttcaaattgagtgtggcttttgaaactacacacagtttgtctcaaacatcagtaaattaagagctagaaagttttttggtgaggcactcagcaagttgtaacaccttgtctcgaacaaaatacaaatcaatttcaatgtgctttgtgcgagcatgtagcattggattggcagcaagaagaacagagctttggttgtcacacctaatggaaggagtaactggttggggaatttgaatttatgctagtagagaatgaagccatgatattttagacacaacattagctagacttctaaattccgcttcagtagaagacctgctgatagttacctatttttgagacttccaggccacaagattgcctccaaaataaatgcagtgctctgaggtggatctcctgtgatctggatttgaagcccaattagcatcacaaaaggcttctaaggagtaatcaggtgctagttttaagtgtagaccatagtccaaagtaccagtactatacatgagtattctttttattgccgtccagtatgcttgcagtggagtttgcatatatcgacaaaccttgttaacagagaaagagagttcaagcctggttattgtagcatgttgaagagcacctactatggatctgtacaaggttgcatccttgactggttcactaccatagtttgatagtttgagaccactattcattggtgtgttctgagtgttaacattctgcatttctacttttgttacaagatcttataaatactttgtttgggacaacataattccatctaaacttctatttcaagaaaataatcaactaaaccaaggtctttaaatgcaaaagtgctgcttatttcttggattagttgatccaccaaatcattattctgcccataactaggatatcatctacataaactaaaatatagatgcaactagtggatgtaactctaataaaaaaagattgatttgctttggaaaagtgaaaaccatggtgtagtagtacagaagatagcttgtcaaaccaagctcgagaagcttgcttaagaccatatatggccttagtaagctcgcagacataagtgggatagttggaatcaataaaaccttgtggttggtgcatgtatatgtcttcttgaagctcccaatttaagaatgcattgttaatatcaagttgtctaattaactaattctttgtgacatcaactgttagtacaacctctgatagcgataggtttaacaacaggaccaaaagtttctgaataatcaaacctttcttgttgatggaatcatttttgctactaacttagatttgtagcatttttgactgccatctacattaaacttttccctgaacacccacttacatcctataggtgttctgtctggtggaggcttgactagaacccaggttttgtttcttttgagagctttaacttctgtgtccattgcagtgaaccaatgtggctcttgatgagttgttttgacaaactttgtgtaacgtccctgcttcaagcctccattaggcccttacacccacagaataatgtctcttatacacgagtacgccactctggctacttcatgga

SEQ ID NO: 112998 - DNA, 4101 bp, Cannabis sativa
tcttaaataaaggttctactgcatttgtaataactttactaatgaatgttatttatgtgtgtgatcccagtagattaatagtaatctacaaaaattgttaataacatgtatacaaatcaaaatcttgtgtattttttacttttatgcacttttgtttttcattggtttgtatttctgtagttacaaattcttggtctgtaactacataatacttatttcagtactatctatattattctgaatttaattaactgattagttaaataaaaaattagtaattatagaagattttataaaatacaacagtaataaagttacaatacgattacgaactcgtaaagttttctacatgacattacgatattagctacattaaacaacataacaatggaaaatacatccagatcgtggtaaacgaacccccgccgaaacaaagaccatcatcattagtgtctgataaaatgtaaaaattacatactaaaactcccttgtataaataagcaaaaagaaaaaaccactaaattagtatcattgatttacaacgaaatctttgcaccagtacaggaaagtgaaattataaaccatttccaaaagctgtaccatgatgagcctcctactgcttggttttctttgtgctgcaatatgggcatttgtactccttaatactttctgccttagctggggtgatcttcacgcattttccatggaaccacctttcgcagatgtcgcagccaatccaaaactcatcaccattgtaatttgaaccacagcttccacatagggtgtcaccatgctcatcctcttcctcatcaagcaacttagaattgctcttgatttgtctgtcgtttgatctctgcaaagcacacgtaggctatgagactacttttaagaaaacactaatcagtggaacaacaacatcaacaagcccaacaccaaggattgttttgcaatgattttagcataaacagttttaccacactttgtttttgacaaaagttttacgacacatttaaaaatagttgatattgaaatgcatattagtactttatgttttcaataatactcatttggtactctatactttcaattctactcatttggttttagtagcatggaatcaaatgtaattaataaactttaccaatataactaaactgttcccagctatatgtaatcaagtaattaaatttcagtttaaaatttgatcattttgatatattttagtccaaatgtaaattgcaggatagcagaaattattaaaaacatactgtactaagcctgtgtattttatcaaatgagtaattagcctttaatataaataatgaaaattggactaattcgcgaaacatcccaaaatgaaaaatcacagcctgcaaagacaataaccacgaaacgcaaaaataacaccacttatccattatcattcacaaaagaagtgtgaaagagaaaatagtttcaccttcgtactgtttctggacttgcttctactatctaaactaggcttatccttggacgcctttcttcctgttacgacttcaaatagtgtgggcagatcatttattaagctgaataggcgcttcctgttaagagaaaaaccaaagagcccttctatatgatcctttaaagtctaaacattacatgagaacatgatcaacaagaaaagtgtggcaaaaaaaaagaccaaagtggtcttctggcaaaatatagatataaattgcaaaaagaaacaaatgaacaatcaaaagttccttaaagtaagataagaaaatattaattaacctgaagtaattcaataaacataagggagtcgatttcaccttcctaaacccaaaacaaaaatggagaagtgaaagaaagaaaccaaaacaacaaaacaaacgaggtggtcctttgttaactttttaagagctaaactgtacggacatatgaactttccttgccagagtacttggtaaggggaaagataagcagacagtcaagtgttcacatcaccacacaggtgggacatggggcgtaaaaaggtgatccaataaacttgtatagtaaattattttcactgtaatgataaaatataacagtgaggctcgcagaaatctggattaataaaacaaaaaacctcagcagactaacaagctaagcacgagaatgaagaagcaaaagaaccttggcagaaaaaaatgaatgaagaaacaaaagagtggcctaataaaaccaaacataaaaaaatgtaacttctaggtaagtgcaaactacaaaacacagaaaaaagacactgttgatgtccacagtgacatggttattagtttaaagcatatatagatctaacccaaatttcaaaaccagaaaaaccatctgccaatatgaaggggccacaaacctttcattgcgattaaggcgagcaccgaaatagaaagccaccgagagcaaccaagaatcagtatgaactgcaaccaaggagagccaatctttacgtttcatcccatctctggcaaaatttatgcccaatgccggctcaggaagctcaggaggaacctcctcagctggaagaccaacttcccacgtctcatttgggtgtccataaaagcacagattatctttctctgaaaatagagatagagacaaacacaatctcttaatgaaagttgaaccaaaaatgttctaactaacataattcaaaaacccattagaaaattcagccaaaaataaataactaaccctaaacttagacatcaaagagagagctctttcggtttctgagaaaatgcgggataaaaaagggaatttttcaaatctgaacgcaaatccatgtattctcaaacgacccacattttgtataaattcaaaagtcaaaagctaaaaaatttcatggattcaatacaagaaagaaattaacacatttcattagaaagagaataacagcaaacctggatcacagagggcatagaatgcatccacatctgaaaccacaacaaaaacaaaaatgccatcattcatgtgtgcgtgtatatataacaaatatacatataaagggagagagaacgagagagacggagacagcgacagagacagagaagcagggaaggtatgggtaccagaagtgagagcgcgaataagagcggaacgacgagccgtgtagtctttgaagatgtcttcaacagtgcgaggtctggaagaaatggcggaagccattatggaaataaaaaaggaatagtatttgtagagtggtgtgatgatgaaaatggaagaagcagatcgggcagtagtagcaatgagatgaaacaccgtgaattgaatatgatgatgatgttgatgaggtagctggagaagggaccaaccgaaccactttgtactggttcttcagtcagagagcagagccttatattctgataccatacatactatactactacaacattcaacaacaactgctattttactctttcttcttcttcttcttcttctgtttcaaattcacaatcaggattttgactccgtctgttgtcttttgggccccaagcttaggtttcttctcgaatctcatgcaacaacatttgggctgggccctaaaatttattgagataattacatttaataccaatttttgtaaaatatttatatatttaccgtctaaatttttttgacataatccattaatcaaaaatacccttatattatatattttttaagggggcttatgtagctcctcacttgtatttgaggtgtggcacacctcacataagacaaagaatattttactgtagcaaacagtaaattttgttgctttaacttagaaataccggttttgtgaccggatatgtacactttataaagtgtatgctttttatatttaatattttgtatttaatttatttgtttagtggggtaaaattgtaaaagcacatatttattggatgtatctatgtgtaacaaaaatgtattttatttgaagcatgttgttttttttaatgaaaatgttctactttgaaacctttatgagttaaatcatattacctattatcccattttaaatattttgtgagattatcaacactcattatatataattatttttagtagaaatattaatttttttcaaatata

SEQ ID NO: 112999 - DNA, 1214 bp, Cannabis sativa
  modified_base (1046)..(1056): a, c, t, g, unknown or other
acaacaagtattgtgactaaaaatacatttagtcacagcaaattgtaatttttctgatttaatacttttatccacagactttttagtcacaacataggaatcataatttataattagtcacaatttttttaaatttagccacaaatttagttgtgactaaaagtaaaattttttgtagtatatatatacagatatgaactactaaagataaaaacatacattaatgatcttatttttcagattatataatacattattacctttaagaattgtctaataaaatatatttatttaaatatcaaatataaaaatgaaaaaagtattaatatacaattacataaaaaaaatcaaatatataaaatttcttccaaaagataagtcatcattattaaaatttattttgtctaataatatatatatttacactatgcatatgaattcatttgttttcatttaaaagaaaaataaattataaaaaaaatgaagcttacaatgttcaaaagctagatgagatgggaagagatatcaacaaattgattataaaagacttagatctccttctttgatagtaccatatatattataagcatgagattaattatgtaataattaaaagctatcaataatatttgtggaatactaagaaattgctataataataatggtgggagatattagagaccattaataatgaatgatttgatgatgataatttattttacatggtttacactacatatatccattttcataataataataataataatataattaataatggtggtaagatttataaaaaaaaataaaaagataacatatatctattaaaaataaattgatgataactttctttttttcatttcaactgttttatttgaaaaaatgtaaaactgtcacaaaaagtaattcttttttatattatatctattctgcataaaatgtggctatgtaacagaattattggttcaacgataatttttagatttctacgttaattttaatagaatatcaattacttaacagaatattctttattaattttnnnnnnnnnnnatatatatttaaaaataaaaaataatatagatattttatataaaatacttaaatattatcaatatttttaattatatttttaaatttattagtttaactttaaattaaaataaaatgaaaaattatatgtagatattttatttaaagaaatttaaatt

SEQ ID NO: 113000 - DNA, 3599 bp, Cannabis sativa
gggacttaagggggttttcccaccaaaaataaagaaaagggggttaagtgttaaacaaatgaaacataaggaggtttggccgcaaatttctctaaatataataatacaaatagtatcgtgtaattaaatttttatttttacttataattaaaagtataagataagtataaattttaatttatttttaccttttaaataactattatatgacaacttttttataataaaaaatacttttaaaaatatttggatatattttttgtgagtaaattaggaataaattattttaattttaaaaaacttctaaattaaaaaatatcttttcattttttatctaaacagttaataaagaatttttaattttaaaagctaaaaaaaataaaaattaagataagctaaaatgatacgaggatacaagttacacataaaacatgacacacatctaaatttcccttatttacacattaaaaaacaaaaaaaaaaaaaacaaaaacaaaattcctttattttcgatacggaaatctcaaataccttcctctttgttcttcccctatttcgagtgttttgtagttcatcttctatttcccagtcttaactgaaaacactttcattgccattgctacagaacatagcaaaagggttctctgctctctaccaggtacagacttatttctctgtgtattttctgttatttctctccacaatttcaatatgcaatttgtttttcagttcaacaaatcacaaaacttcccgttctccatcgaacctccccttttttttttacactattgttttctgctcaatatattatttggagtgtgtgcattcaacgtgctcgccaggtatttgtagtaattcgtaggaaaattgatcacaaataaacaatttttcccaaattgatctgagcgtcaagcccctaaacgtttttgttaacgagtggaggctcaattggtggcccgtaacttgaactctagtacaagaggtataatcctaaaccataacatgaaaatgaaccttgagagattcagtttaagtgttgtgtgtgcttaaggtgtttgataaaattcttgaatgttatttgtttaaataataataatgacctataaaggtgaagtgatcttcggctttgggcaaagttgttatattttaatcacttcttttgttctaagtgctgtgtgtgcttaaagtggtgatcttagttatgtttattgtaatgcagtttaaatggttatttgatgggaaaatgttgtgtgcagggtaattgttgttcttctagatataaatctggttctgcattcctatattattggtaaaggcaccgagttctctgctcttcattctgttggtcaaccatggatgactccaaggaagatactcctgttttcctcgaccgtacatctcggcctaccagggggaagaggtagcaaacagattttcttttaacttcctattcaagtaaaacttcgattagctctgaagttttttttttctttttaccaggatgaccaaattgttagatgatgaagttgaagttgacgagttgttttggaaccaggaggctcttaaagatgtttgtagctcttaaaacatttattattgtattagttttataaattaaagtaacaagtgaaagtttgtgcgtttggtaggaagaggatgatgttaactatgaggaagagggagaagttgctgatgaattcgatagtgacttcgatgaagatgtgagttactttgcatttcttttgtatgattcgcatttaattattttcttcctttaatttgcttcaattgttggtaggagccggagccagaagaagcggacaacaatgaagtagatgaaaggttaagctttgaaacctgtaggaagtttgagatttttatcttagggttttttattattattctaaaggttgaatatcctttattagggtgcgacaaaagaagcggctgatatatccagggaagactttggtgaagagaaagcaaaagaagaagaaagtgctctccgatttggaagatcatcataaggatgatgaggaggaagagactgataaaaaaaatgaacagcccactgaacaacctcaggatgcccctgaggatgttgaaggagaaagaattgtgaggaagtctacgagaacagcagttatcaatagacaagcggagagagatgccatacgtgcagccttgcaagctaccatgagggtcagcaaattttacaagcttattgcgataactgttgcttattgtctgaatctggaaaattgtgtattggataccgagtttagtaataaggatttttcattgttttgatatttaagtgattatgtttctatttgtataatatgcttgtaaacattttaactttggaggtgtgaagtgatacagctctattcaaataatattctcctttgaacacagccaataaagaggaaaaaggaaggtgaagagaagaggatgacccaagaagaaatgctcttggaggctgcccaaacaggtttgttattaatttaattattaaagtctgaaagtgatatgtggtttttctacctcaacctttaagactgagtttaagactttctattctgaactctgtgtgcaactcctgcaaatttgtagaaatcatgaacttgaggaatttggagaaagttttagcaagggaggaagaagttaagaaaagagcaattatacataaagctgtctacagtggtccacaaataagatactattcaaaagatggtagtttttttttgttttggttattgtgttttgttttcatgatgttgcctacactgaagttctaattttcgtggaatgggaaatggccttaagttgttttctttctctacctttgcatttactgtaggttgttcttatctggaatttagtaaagggttgtcatttcagtcgcagatatcaacaacacctgttccatgtaagtacatacaacaatccttaagcatcttagtcaagcatttggttctgattttacttttgtccaatttctttgcagatcctgagaaagttgtctgtgcagttactgggttacctgctaagtaagtgctcatgtgtttcaacattggtatatcaccctctatcactctgcaacttaaaatatttcgttgatcttgtagatatcgtgatccaaagacagggttgccttatgccacaaaagaagcatttaaaattttacgcgagcggtatgttttccttagtttcttcaaatttccacagcttttattgatttattttttgtagttgttattattatttttttaatttccaatgtcataaaaaactgtggtgcatagattttccttcattagtaagcatatatggtgtttattgatgttgttgctcccaattatcttattgagaattgctaattggtactatggccaacaccacctgatgctgagatacaacgattggtgcaattttgtatcggaccacacatttttatttaaaatgaaatatgtgagagtggatatttaattctaccaaaacacatcaagtggtgttggccaccatggtccctcatagcaatgctctattttatttatcaaacacctggagttgttattcagcaaaaaaaaaaaaaa

SEQ ID NO: 113001 - DNA, 4340 bp, Cannabis sativa
gaacttaaattaataaactcttatactataaattcagcatatgtaaaattgtgttttgcatttatttttaatattctaaatgtgaatttttgcttaacaactagttattaaaaagaatatacatttatccgattactaaaatttattttcaatagctagtaaaagaattttgtaagtttgattaagcattagaaaatgtacactttggtattctaatattataatttggcatattcaatcattattgatgagtgtcaaattggtcaccaactatagcatacatattacaagttttattaactgtggtgatgaaaaatttaaggtcttgttatacaactcgaaactaatactacaatttcacaacggtattaataggaatacacacgagtttgaagaattagtataaattgatttattgtttttgttcccattttaattttaattatgatccttgcctattttatgagaagggagagaggaggaatctttttcattggacaaatactcatgtgaactggtttttaaaaataagttttgaattaaaaataataattacataatgttaaaatattgtaaatatttataatttcatatattaaataatcccaaataaaatgtgaaatctttaaaagactcctaccttaagccgttcaacatttagaacaaaaaattattctcgtccccactttaccaatttctttaagatgttcatggctaacaacaactattggccttctctaaccatggtttgattagatgtgacatatagatcaacaatgtttgatgacgctttaacgatgaaaggttgcatctcacgaaaaaagctaacacgaaatgattactaatggtagtgaactagggtagtggggtgccttctcagcagcgatcttggatacaatctctctgaaaaaaagaagtggtaaaagtactatctgttggggaagagaaagggtggttactatgtatcaactatttattcatgaaaaagaagagaagtggtcaagtatcaatatcatcctaaatataattaaaccaattattgactagaaagaattttcataaattgttcaatgcgcctcatattcacatgtaagaaagtggacacaatgactgactagaccccaacttgaagataggctttaccatctattttagagttgggtccttcaatgagcccactttccagttaatgtctcaattcaatgaaactatcgtcaatgcgcctaataactacaatgaatgcatttgcacctttgttttgaacttttattctcattcaattatgcagttctctttctctaaatatccaacagttcctttcaggtcgaaatgtagtgtgggaaaaattaaatccattccaacaggaccacagtaataagagaaaacacaaatcaaaattgaatcgagacttaaggtttgcagctaagcaaaacacacatttatggatttacttcgtttgttgtagaaacacatcaatgattagcttaagccagcaaccacatattacatccttacataaactatattcctttgcgattttataggaaattttttataccaaaaaaagaacagaaacaaagtgagcgaaaggaattggcttcatggcttgcattatttcaaaaccaatatgaagaaaaagaccttttttttcccctttcctcaattttgttgaacaaaaaagaaaggcgaattctacaacttacaaagttacaatttaccagaagaaagctattgtcctgtattgtttccctatatatatttatattatattaattttttttttttttttttgggtttgagcttaattagtatatttgtcacaagttactatagtcgtcgatgtcgttctcttcttaaatccacaacaacgacactgacgttatccgtactatgcctagccaaggcgagcttagtgagtaatatagatgcatccgaacaagccttatcggagctctcggcggccgagtcggctacgaccctctcggcttcctctttaccacctggtgacctaggaggcggcggcggtggcttctgagctctcaagcacatgcgagccacaccacaagccgtttcgttcgacaccacatcccacagtccgtcgctcgccaagatcaggcactcgtcgtcctctgttcggtccgttattgttacctccggatccggtatcacgtatggcttcaaataattgtcgccaatcgctctcgacatcgcaagcattccaaggactcgcgcgccgtcccagtaaataacgcgccctccagcgttttcgattcgaaccagctcgtcgggtcgatcaggctgagattaattaaagaaaatacataaacacacgttagtaaatcttgatccagataaagaaaaaattcaatgcgtgcataacacgcgctattatcactctctcaggcctaacgcaccttgtggtcggaggaaagaggaatagcaacgccgcttcggcaaagaacagccctggaatcgccgcaattagaaacgacgatcttttccggggttacgaccgaaacaacggcggtagatccgacggcatcgcatcgtggggtctgaagttcgcatcgacagttggagatcttatcgctttcattccacgcctggacttccttgtccatacgtgtgaagctacgctccatcgtttctgtccactgaggagattttgattcatcgccttcaagctcttccttaacgatttcatgcaaccgttctttgcacttcatagcaacctgagaaaataattagaaaggaagttagaatttagaggttaataaagaaggaaaaacaaattgaaaaatagaatacgaatggaggacctacatgagagcaaccatgaccatcgaaaacgccatagaaatggcatccattagcaaccgaaccttccacatggttcgttaagtaagggtgagcagaaacagcatcttccatatctcttctccggccacagacacaagtcacgccatacttagggttttctacctgaaactcctccttcccatccacttgaaccgaaatcgagtcatcacacagcacgttacaattctttaaacgcaaaccatcactgttagcatccgtaaaggatttcacttcacaactttccaccatagatcccttcacgcaatctacagctgacgaagaaatcgaaggatgtaggtccagtttctgccgcttaatagagcgagcctccaccgccgctgccgccgatggtacggtcacatcggagatgaacttgtatgtaaggagctccatttttcgacgtttcatggtccgagaactgctcgtctcaatagcggccgaggcctcactctctcctacaactccacagcaaattccagccatcatcaaaaaccagaaccaaattaataatcaaaaactatgctcctcttcttcttaaagaagaatctatggaaatctcttcagctacaggatactattttttcaaagctttaagcaaaaatggtgtagagagattttggggattcaatcgatgttcacaaaagaaagacccataaaattgtttggcgatgatgcttttctacacaaccctgaaatattttaaaaataataaaaattcgtatttggggagtagaggtcccacaagggccacaacctaaagacgggcagcttgcccgtcactatcacgggcaggattcgacatgtacagttgttatgacgtcgaactacagaataggaaggattaaatcgggaccgtccaccgttttaaatctctttctctctcttctcgatctctgaccacgtggtttttccttttagacatttgtacgtggaccaatgagaggcaaacacgccctgttgaaacggccacccttttcagacacgcatgtggtccttttggaccctccaccccttccccttcttctttatttgtttcctttttattaattattaatttttttcctttttttttttattaattattaatgataattggttactgaaagttataaccacgtggcagtatcatctatacatacgaggtgtgaggaacgattcttttcccacacgcattaccgagagttacgatacgcgcctagatttaacatacaatctcaactactttattcagatattttacaatgttatgttagacctctctcgtaaatattgtattaaatttgtcaaaaaaaaaaattatcattatatttaggttaattaaaatttttctccttgaattttgatgtgtaccaaattatgattgaaaatgctcctaaactattaagattaacatggatgaaagttcaggggtataatttagtgcatgttaaagttcgaagggcatgatttagtagatatcaaagtctagggagcatggttta

SEQ ID NO: 113002 - DNA, 3493 bp, Cannabis sativa
tttcttcctttttctttattaatcgatatatgttgatgttgtttcggtaaacaagtgacacgtaggcagattgctccccttgtacttttcaaaagaaaaataaccgttacaacttcacaacccccacacccaacggctagttttttgttcttctacagactccataaccatagccatcattgatttgtcttcacttacttgcgcgatcatttgggggtttctttcttcctcactttctaatctgaaccacttgattcttcttctcactcgaaggatctcgttcggggtttggttcccttcccgtcaaatctcccgattagagaaaattctttatccaaatcccaattttgcagggaaatttaatcatgggagagttaatggttgaatcggcggcggaagccaccgctgcttatgctcctccccctcctcctccgccacctgctcatcctcggcgacctagggttagggaagtgagttctagatttatgtcacctgtggtttcctcttcttcttccaattcctgcgattcctctcatttcttgccagccaaatccccccatcataaacataatctgggttcaactccaattccaaatcatgcggatcatcaagccagaccacgatcttcctctgctaatagacggcgtaggcaactcgatatggaacccttatcttgttccgacgagaatagacccaccgattctgaacctccggctcaaagtcagagttctgaaactcctttcccacttgaacaggttcccaatactctaagacgacaaagatcttcaaagcttctcaaagagaatatcggaggtagaccatcccatcatcctccgcagcatcattcttccttgagaaatgggtatggaaaaggcggtgctttctccacgcccgcaaggcctgatacgccaatgttatcgactagtttggatcggacaatgtcttcgacggcggcgagatacagactgaaccagcagaggtctgcaaatatcgcttcctcagctgctgctaagctcttgcagtcgagtgtgatgtctttaccttctcaatcctctgatttaacaactcaagaatctaattcttcatcccaagatggtcgttcttctgcgaatgctcttccccatgacggcaatcacaatcgcttgagctcttctgttcaatctctaccggattttcgctcttccatgtccgaaacagatatgttgcctactgtttcaggtagactaaggggggagaaaaatggcattagaggtggtggtagcagtagtgccaatacaagtactgattctctgaagttctcattccctaactctcgttatatgagttcgccatttaattcaggggcagagggtggcgagaaaggagcgaatgctgtctcgaatccattagcgaactcagtgaagatgggggggccttgtctgcctccagtcccgccatgtgctaatgcgaagccggctatggaattaaagaaggcaaagaaagtttctagtcaacaggaagatgtacattccttgaaattactttacaatcgttatatgcagtggagatatgccaatgcaagagcacaagtttccttacaagctcagcaaagagaaactgaggttgatcatcttcttaacttttagcaagtcaattttttattctataggaaagagagaaaccatacaaagactctcatagatgtgtaattcgaaattatgagtgataactcttattaacactttttatgcacttgagggattgataacgagtagtttctctgtgattataggaaaaaaaacattctttgagtctttattacccatcaagtaatatctatttcattttttcatgtagacaaaagtcaattctctcagggtaaagatgtcagagctatatgattctgtgacgaggaaacgtacagaacttgggatattgcaaaggactaaaactctatcaacaattctcgaagcccaggtaagattgatagctatgactattggattggcttacatattggaagtactcaacttgcttattattatcgttgacatttcattttaggttccatatttgaaccaatggtctgctcttgaagaagattactctatttctgtggctgaatccattcaagctttagttaatgcctcaattcaacttccacttggcgcgaatgttcgggtatatttttcatatcctagttttcttctacagttgagtaattcctcaattgttagctatactaatgagatataaaccctgtaggttgatgtgaaagagcttcaggaggccctgaactctgctatgaaagttatggagataatagcttcgaatgttcaagattttgtaccaaaggtacagttcaagatctctgatagaggaataaagaatattatacgtgatatatttatcatagcttgtacagaacagggtcctttccacataaagaaaacataaataactgctctgcttatgtgcacaaatctaattttccaaagggtatatttgttttggttgcttttatttacaggcagaaagaacagagattcttatatcagaacttgccagaatagctggtggtgaaaaagctcttgtggaagaatgtggagacttgttgtcaagaacattcgcatcacaggtatgtatgcctcaacctactagtagttgcctcaacctacgtatagtagttactttatgttcttattgtttgtgacttcatattcatgatagcttgcgtttggcgtttaagattagatatcttaatcttatgaatgtttcttcttctcttcctgtttcttccaggtggacgagtgcagcttaaggagtcagataattcaattgcataaaacatgtgttagcaaggataatgtcttggtaaaagaattagaagtgaataactaactaatcaccacattccattacctgaggccgacaaaggtgtacatacgcataagatttcaatagcaaaatcgtctgtttgttttttacctcaatttttgtgttgtttacaagggtaaaaaagttgagatacgcagcagccaattctttcattctttgcaaatttctgtcagttctgtaatgatggatttgcttttgatttggagttcttatatttgtaacaacatggcaactttaactgtttgttagatcaaatcgttgcttagataaataaagagataatatagtagtcactagtcagtctctatttttttcatggccaatataagaagttaagaacgaccagaatgcaacaagtcgtttagtgaactttgtctttaacggcaaatatgttcaattttgtttctgtggaattaaatgaaaataataatgagaataatgaatggaaatgggaattgaataaaatttaaagtgcctacaaaaatttgataaaaaattattaataaataacattttaattattttttctttaattgatacatttttttttttggataaatactattttgaacttgtgttttgcaaaaattatcaattagactttctgttttgttaa

SEQ ID NO: 113003 - DNA, 6720 bp, Cannabis sativa
  modified_base (6656)..(6667): a, c, t, g, unknown or other
tcttgaatatcttctaatgttccctatttgattacatccactataagaaaatggagaatatacgacactcttttaatggtggtttattcgaaaccgctgttaaaagacactttagtcggtgattctgagtgaaccgccgactaaagtgttctttaattgtggctccgaaaaaactaccgttaattctctattttaaaaaaataaaaataaaaaaatttagttatattcggtggttcaaagttaaccatcaactatttgtgtgataattgacggtttaaaaatgtcctcaattttactttaagaaaatacccattatgctccattttctttttatcctaaatcttaaataataaataaaacaaattgaacagatgtgtatatataattcttttccctcgttctttctcatttccctctcttttcttctctactctgtttttcttgtcttcactccaatgctatcaatctttattcgatgtgtataaagaaattagggtttgaaacttgcatagaattctctttctgcattttgaccttagttcactcgtcgtgacacactctccacattctcagtatataattttctctatgacaaaatcttgattaataaggtttggtttattcctcttttattttctgttaatgtatttaattttctttttagatgaaattacatttttatgttttatgggttgtaagaaatttgggggttttgagttcgtaatgtgatggggtcaatatgattaatttgaaaggttttagagctagttttattaattgcttataaattgtttgttgaaatgtctttaatcaaatattatttccggtcgaaagttctttttccattacgttttattctttctaaggcagtatacactaagtgagataggtatgttctaaaagtaattattatgaaaatgataatatattttattgtgtttcaagttatataatattatgattctaccatgatttttttttttcaggtacattgttaagtcttggctgaagaaattaattcaccaactattacattgcaagaactttctatttcacaaggtatctttctgagttctttttcaaatattgtggcttttaattgctgtaatgtagttataattttactgagatgttggctcttgttaattcttttccttattgaattaatatttgagtaattttctatttagttttatgtctttttatgtagtttatgttataaagatagtctagccaatttagatatataattattggtaaatgtaaataataaactgtgattgattataattttttatcaatttttccgtcatttacattatagtaggcatgttcatttccttcttctataaagaaatgaattatagatcattaaattgatcttgaaataaacaaagattatcaagagtatcataattagtcttttcttcagtttttttctcagtcttgatcatctttaattttctcagcccctccctttcttcctcagatgatttaatttgactaactttttaaactagtgacctctttaaattagtgatctcatttagttttcatgttccagtgttcttatgtgaatgggttgacaacaataatggtgtgaaagaagataggttagggttcaagttggtcaatcttaacaaaataggtcataaagatgacccatttattgtggcatctcaagcaagacaagttttttatgttgatgatccatgtaatagtgaatggtcaattgtattatcaagtgaaccgagaaacctaaggtcaaatgatgagattccagaggttgaagaagttgatgagttacaagtcatagagaaaaactttattgacattgacgagtttgattctatagaagcaacaactggttcttattatcgtgatgaccgtgatggtatatggattgaccacgaatgaatataaataaagaaaggttgacaatcaagataataatgaatggtcaatgtttatgctttcatgacttgtttgaatatataattataatttgtttgattttacttttatgagttatttgagtatgttgttacaacttgtttaattatgctcttattacttgttatatatgtttttatttcttgttttattatgattttctgaattattttctgataatacttctataatattttgtgtagataatggagaaacaagaggacaatacccaacttgaaaataataacaaactgtcaaacaataagaggaaaacaaacactgtggcagaaaagaaaactagaggcaattctgtgcgccaagctgtgttgaggatgagggcacaaggaagaaaggttcatgtagactttaacttgcatggtcaatcactaggcaaatctggaaatttgctacaatcatatcttggttggcttgctcgtagcaaggtgcctattacactagagaattggtcaaactgtgatgaaaatattttgggccaactttggcaagatatcatggcaagaaataataatgattttggatataaatgattatattaacatttttttctatgatttttaatagtacatatttgcagcaaacttttgacgggatcaacgagaatgcgggacatatgatatttaagtcaattggaaagaaatggagagatcacaagtccaagttgacctcacatatttttaactttttaaatgaccctgagtatagagaggaccaccccacacattgacagagcccccaaaagactacatcattagtgcagaagaatggaaaaagcttgttgcatcaagaactagcaatgtctttaaggtataattttagaagactgcaatattatcatgtatatttaggagtatgcatttgaatttgaatcttaccatagcatatatatataaatgaaggaacaaagaaaggtgcaacaacaacgacgttcccaacaaaaatatgctcatcggacagcacgtaaatctattgcaaatatagaatacgaaatgcaaaaggagcgaaacacgactgatccaatagatcgtggagagctatggaagcgtgcaaggcaaaataacaagggatcttatttaaatgatgagacaagagaaaaaagagaactaattgtaagtattgggattcttttaatatgccataatttttttgtagcaagcatatccaaacttccttagcttggaaaattacatccttaattaaaatattttggcatttaaatttgttttttacttgcaactgttagtcatatggtttctatacttctttttaagattatctttacttaccattgttatcaaagaaattgtgttgtacattttttttcttaagttaaatggcttgtgtgagttattatttaacttattaacaattcattatgtgatgtacgctgaattgcttggaaagaaagaaaggggggaactaactgttatcggccagaacgatgttcttactcaagcattgggtactccggagcacccagggcgagtgcgtggtaaaggttttggtgttgtgcaatatgaagtattcaagaagcctccaagggggtttaagactctacaggaggagcaatttagatatgaaaccaaaaatgcagctgcctttgagagtcaaataaagaacttaactgaacacatcaagttgctacagagtcaaattgaaaagatagcattacaaaaacaacctagtcaaccatcagacactaatgatgttgacgctactgtgcatcacaatatttctactaattcttctaaagatattcctactccagaatcacacctacgctcttcaacgccatcagtaaaggtaattcattctattttttggatttttcctatagcttttcaataacacacaaggccatatatgtaatctaatttgttgtacagggtattccttgtagtttgcttgttgaaccagattttaagttggttgcaaaaggatatattatagagaccatctcaagtgacatacatgggaaacccataggtgatgacaaaagggttacaatatctgaggccattgttccaaaagcaaagctacctgtaaaagttcctggggtgatggagttagttgaagaagctgtggactcatgtgttgcatggcctacacatttggttgtagtaagcaatgaggaggtgccaaaatagaaaaaactcttctaattataaatggctatgtttttttttagttattgtaaagttcactaaaagtattaactttttaattataaatattatatttctagataccaaaaaaagcaacttcaagtattagccgtaagagaaagattcctacttcacaaaaagaattttccattatcacatccaaaccaaaggaacaaccacctaagttgtctgcccaactatctctggcaaaggaaaagccacacattgagacacttatccatccatctagtgaaaaggaaaagttgtacatcgagcaaccaacaagcatcccctcatcttcatccagtgttagggaaaaaccactattggatttatgtgaaatcccaaagaacattcctgcaagcctaaaatcattaataaagtctactttcaagcttaacaaggagtacatgtatgaggttccaattcctaaagatatatgtggacttggtaagcagatcttgtacattggagtaaaagaccttcttgagcttgctaagtttaaggaaattagtgcttctgtgatcactctttacatcaggtatatttaatttgttcgttttttttcttcaatttatttttactttctttaacttagtgaataatttttgactaatgtgatctctatattttacctagaaaactacatgcttgtatcagtacagaatgcactgagcatttgtggtgttttgctgagccttctctccttgcattcattgggaataacacgattgatgcccgaactcgatatctttccttgcgtctacagaatacattaaggggaggtttgttgactctaccataccacccagggtatgtatgatcttattctttcatataaattatatgactatgcatatatatttattaatttctgtattttccattacagacgacattggatgttgattcttatcaacccatggcaagaaattgtgttctccctcaatcctagcgggcaaaagattggagatgatgcaatgacatgtgttcgaaagtatatcatagattatttttttgttaattagttattctctattataattgtttaacctatggattttttaaattttttattttagtgcatttgcaatatacaatgcatcaaagggtagaagaggaaatagaaatggccccaaatggataacagttcaggtactctttcaacttttcatttatggaagtctattaaattaaaaaattaatttatacataaaatgagatatgttttggatgttttcaattgaataacaaataggaattgttaaagtttgttgattatagaatctatatatgatgtaaaggtgtttgattatgctataatatttttacttgtagtgggttactgatttttaaaagaaaattcttgagaattttttgtaattgagattatatatgtataaattcttgttgtattgtttaagcttaagtatatggtttcatttattttttttcttcaaaattacatttaaattcttaaaacaaaaaaaaatgtatatcttaactttataacttactattcaaaatttgagtgtcccaaacaaccaggaagtgtggactgtggatactgcgtaatgctttatatgaaagaactcatgacaatagaaaatgaccgaaatgaacttcttgaaaataatgtaagttatcttatatatttcttaatatatatattttaatatatatattgtgtcatctaactatttttttttatatatagtttaaaggaaaagttgagtatacaatggatgaaatcaacgagttacgtgaagaatggactgaagcacttatggatcatatggcataggataaatacattacctggtatatcatatatagaaagaatagactgaaacacttatagatcctatggtataggatgtatgtatacatcatttggtataagatgtatgtatacatcatttggtataggacatattgatgattaaatttgtgtttttattcttttttacaaattaacacttcaatgtaattgtaagacagatagtattaatacaatttggtttatgtatttcttttttagttatttactatatatatatatatatatatttatatatactttcttgtatttatgaattacacaatatgcatgtttcattaaatattttaaaaatacaatttaattatttgttaaaaatgaatgtccatttatggtggttcacataaaaccatcaatatttcttactttgaacggtggttaaacataaatcgccatctaaaataactaaagtaggtggcttttaactatcatgataagtagaaatgtcgtctatgattatttttaatgacaattgttaaccgctaatagaacattatgagaaccaccattaaaaattattattaacgtcattttaaaagcgttgtttaaagttgaaacttttatcgacactcgttaacatgacgtttttcaaatgtcgtctatagacttttaacgggggttaagaaccaccattaaaagttagttttcttgtagtgatctcagatagctcccactcaatnnnnnnnnnnnngttaaataatacttttaacctctaattgtttggagagttacctagttgtgact

SEQ ID NO: 113004 - DNA, 1867 bp, Cannabis sativa
ttttatataatgaagggtattttaggtattaaaaagtaaaaaaagacatttgctttattattttaaaaaagagacattaactatctatagagttagcaataaggtcatttacttagattttctcatttagaaagttagaacataaatgccttttggactaaaaaaaagggggaaaaaaaaagcataggctttctttatcctttgggtgtgtgtttccctcagccccatatcgtgtgtatatgtgaatgatactattggcattcttaacattagcattaaaagcctagaaacaaaaatcattgctagttctaatcatcctgaaacaaatttaaagataaaattaaagtaaattttaagattatcttagcaatgtcacttagggttattaaaatttagcaaaattatgtaaactataatttcttttaataatataattaaaagtcaatacaaatttttagagagtcccaaattaataatgtatagaaagttaataccatatataagatgtatgagctactactctcatagccaattggttttgagatggaaccttatgaatttacaattttaaaatagtatgagagccaaataaaactttaatgagtatccgataaaaatctaataaccagttcaaaaagatgagaaaaaaagtcgcttgtgatttcaggatagtgggccaaaaggagtcgttgtgagccaaaagtgtcgatccaataagacgagccaaaagagccgcttgtgattcgttaagccaaaagagccacttgtgatcgagacgtccaatattagtgagcaaaaataatagtcaccatcttgaggggatgttaaagagtctcacattgataatgtatgtgaacataatactatatataagatgcatgaactacccttctcattgccatttagttttgagattgaactccatgtgttaatgctaattagctcaacaataaatttgtaactgaactttaaattctttacaataagatcgttccaatcaaagattagaactctaatggttcttctcttcgattgacgaactcagattttagtgaaatgcctttttggagaagcatttcgacatagttttgactgggctagtgtggtcaagaatccatgtcccatttgaatgtcaaggtcttctatttataggcgggaattggtgctgtgcagtctctattctctcctcagattggtccaaatggctttgttctcctattccctcgtgcactttcttctttgctctacttaccaagctccgttcctcaagctattccgaactcagctccactcttttgcttttcctttcttttaaaagtgatgttttcctttttctgccatattactttattaatttttattcttttattaggatgaaattacttttagaccctcatattatttttatctctgacaatttcccctcgattctgagctcagatgttgtggaactggctacccaaaattctttcacattgttgggattttatgccctaaataaaattcattgtaatataatcttatttgttatcaataaatgatcaaaagttatttaagtttacatattattttcatgattatggtttaatatataatttttgataaatctagaacatatagttatgcataattacagtgatgtcatcacagtagaaagtaattgtggttatatatttcaaagtttaagtcccataatttatcagtgcactgaattcacactgaggtgataatcagcgataatgtttacttacacattgatatgtggtaagtccttttcgggacattggtaaagtatactagtatcggatgtatggagtagacattggactcgaccgatattgaaattggaaaagatatcataaactta

SEQ ID NO: 113005 - DNA, 4797 bp, Cannabis sativa
  modified_base (1059)..(1066): a, c, t, g, unknown or other
  modified_base (1241)..(1241): a, c, t, g, unknown or other
tgtatccagatcgtatttttagtgaggatgatgttcctcctgattttctttctattgtagtggttgaatcttcttattaataaagttaccattttccttcaaaaaaagtctatgggagagaattggaaaatgaggtaaaaaaaccatgctaaacaaaagttaaggtaaaacaaaaagtaaaacaactatgcccctataaaattctacataatatatttttctttttgaataagattctacataatattaaaaataaaaagaagaagaagaagtaagtgcatgtatatacaaaatacgatgactaacatacaaaaaataaataaaatgttggtcctctaccaattattatcaagaaatatagacataaataaaattcaaagagcttacaatctataaaggcatacaaaattcagttttcattcatattcctatcaacaatctacttgaaaatcttagtgtagattagcatttaactcgtactcatcaataaatgttcttaatcaaattccaaacggcagagaaaattgcttataatcaagttcttcactttacaatactatacactcaaaaatctaaatttcaacatttactactgaatgtttataatttcaatatttcaacatacctgccttcatcagtcaagaagccaagaaacttttaattgttacagaaagagaatttcaacagtgacaaatatgcaatgtagaaagatgcagagtggacattgatcttatacatacaagatatgaaaacataaagcttcggtagaagcaattcccatcaccccgtgttctccgaatagtcgcatattgttcactaagcacctgagagaagtgatatctagcatttcagtttctctgcatcccataacatcaatcacaacctttgaaaacatacagaattcaactaactctgatataaattagaataagaatgtccaaattgtaataggaaaatgaatacaataaataattaaagaaaacccaatcgtagatgtacaacaggaaaaacctaatcatattttttttggatttaataggatttattttatttattttnnnnnnnntaaataaaaagtgacccatgaatatatttttttttggatttaataggatttattttattatatataaataaaaagtgactcatgaatttctcataaattattaattattttatttttaatataaataaaaagttacccatgaatttctcaaaaaattctgttatatagacacacnttatatagaatagatatatacttgtaattacttaatacttatatttgaagttgaaccttatattttgacaaataaatttttttggacattatattttatatattaattacacattagagttttttttaaaagtaaatgaatttgttataagtttttctatattgattagaagagccttccattaatcatttataattactaattaggatataaaatctagaagaaaatgttcaatttatggcattgttgggtaggcttttaaaattaatttttacaaaataattttgggctacaaattgcaaaaatacttttactactagttagatgatcaataaattttaattttcaactcttaaaaaacttttttaacagaaatcaaaaattaaaacagaagtgaaaattcacccaaacaaactaagagtgacaaaataagtcatgacatgataatatgacttggaaacgacgatcagatttgaatttaacataaatagttatgtgttaaaatagattaaacacgattaaattttaggttaaatataaattaactaattaaactcaaaattgacaaagttaacacgattaagtacatattaaaaaacaaattttaaaaatgtttacatgaaattagtaaatgtgtatcaatttactagtaaaactataataggttatacttgttaaaataaatttctttgacatatttatttatattttatatatgtgggtaaaagaggcattaaacatgtcgtgtaagattaattagcatgatttgaatatcgtgtcacaaattaatttatttataatcatgtcgtgttcatgttcacattttatgacacaatctttaatcgaatcgtcaagaaacatgacacaatacatgaattgatagccctaaacaaggcgtagaaaggttcaatattaatttattatatatagctaatgaaaatactttcatttataatgaaaatacatagaaattaaattaaattcccaaaaaaagcatgcatatcaatatcattatgaaaagtactcctaagcaagtacttacaatttaattaatgtatacacctttttttcttctctgcctaaaacacattattctgactgatattgacaataagcttcttaattaagagtactgaaatctatttgggggtgtattaatgtcatgattttaggaattaattaattaataaattaactccaaaatccattaaaacaactgttgatgatttgagtagtttttttttcttctctctctatatttacagaaagtggtggaatgtgactaattaagtaatttaactaagagcacaagccagtgctaatacatgatcttcatcattattattattactactaataatgatatcttgttcatgatgttgatgttgatgttgattttggtctactattatttcttcatctattggacatggacatgatgatgatgatgatgatgatgatgatgatgatgatgaaagcctttccaccaaaatgtctaaagcttctttcatccaccaatgttggcacacttctcttgcttctgttacactcatctgcaacatatacatcaaaccctttaaatacaaataaatatatatatattaatttgtacaatattactagtaaattacaactattgcaataatatttcatgtatgatttgaccgggatatatatacatcaaaaatattacacttacataattaatgaggtgaaaaatagtgtattctaatttaaattgggtcaaacttccactaaggtgagttaggccagcacttaaggctcactcaactcagagtttcaaaattatttttcttcaattgaaaaatataaataattttttttattttttaaaaatattaaatatttctttcatgaagacccaataatattttttttattctaaagcttacaaaattttaagaccagccctgaatttaaataaatatgattggttttaaaaaaaaaaaaaattgttattacacaatgataatgatgtgtattaaaaattaattaatcatttataattttaggtaagaataacatcacttttaattatatagttaagattaattatatataaattattgtgtgtaaaaagtgtaggataaattaaagaagaattagttaatgtattgtatagctaggtacccaaattcttcggcggagatttttctcaggccagaaatcaagttgctcattcacaagcaaaggaaacatgtaaccttcataatatgtattatgccttttgctaatgaagctccatttacccagttccaactgcagcaattatcatttaatatataattaattaatcattaattatataatttaacaataatattaattaatgatattaatagtaaattattatatatatatagaagtaattacctggactttgccgagtacaccagcttcctcatgagactcccgagaagctgcttcctctaaagattcgtcaacctcccaaccaccctatttatataatcaatatatatatatatatatatcatcataaatataaataaataattatatactattccatattcaaaacaatatataattaaatgcatgccacgtgacttattactagtatacatcataattaatttaaattcatgcatatagtacatatattaaaaaagtcttcaatcacgagcaattcgagtcacgtgtcacaacgtgagttattaaaattttgtaagaaaatttacttgacattcttttgcaagttagttcataatacctatttctatattaaaacaattgcatgcatatattggtaccatattttgattagtaatagaaatttcatgagcatataattttagaagtgatgtcttaagattgattaataatattctctaaatgtcaatacatgttagaagatgttaaacattattatagtgttttatagtatttctctaaattatttaagactcgaaattaaattgtattaataacgatataacacgttagataatgcattttattagcatttttctaatttcgtgtgtgtaatggtgcatgtaatatatttcagatctagagataagagagtttattaataattaagccaataataatgtgctaattaaatacctttggaaacatgaatcggccttgacctttttgtgaactgataacaagaacttccaattcattaatattgctactaatattacaattacttgaatcatctccattattattattctcaatatttttgtatctgtaaggtatacacctgcaccatacataataatatacaatattaatcaaatatattaagagcattattatgagaggtattaattgtgtctaacactctgataaagtattgtctcataattagttagcgatttttataatatttattaaaataaaataagtgagacttaatattaagttgcaccaataacaatattacacatcacaaaaatactgctaatgtttactaataagtaatgagaatcaatagtaaggtaatcattcacttacatttgtttacttacattattaaaattaggaaagggagaacttgattaaa

SEQ ID NO: 113006 - DNA, 2120 bp, Cannabis sativa
  modified_base (2093)..(2094): a, c, t, g, unknown or other
gaagatcaaggtatggattcttcaataaaaattttggattggatgttcgattgttatacaaaaataatcaatgataccctgataagaggtaattgaatttctttcagtagttagatttaatctatatactttatgttgagatctttgtgcttataattcatattagataaaaattaatttaccaatattctgttttcacttttataactgtgatatggaccataaaaactaacaattggtatcagagtaatcttcataatgatatagattaaatactgtataaggtgattatgcatttatatatatatgttgatatactatgaatcgatgaaatttttatgcatgaatgtgaatcgttaattatatggtaaatatgggtgaggaattttttatagttttactagaaaaattgtataccatatttgtggtataggttttgatataatttttattttaaattatttgtaaattttggttaaaaattgtaacataaaaaatccacaaaaacatccattgatgagtgagctcaggtttaaggagtaaattccaacctcattgagataacgagttttggacctcgaatgacaaaccacaaaccccagagggttgcggttatgaggctcagaagggtcaaagcatgtgattctcatgtgtgcatgcaagtcgtgcaaccccatgcatgtgaacaaggggagttgaacccatgtgtgtttgggttgcatgcaactggccattgcagggactcgacgatcccgtggccggagaggaggaagtcgactggccattatgggcccaaggtcgatgtcgacgaccaaaaaggaggaccatcgtggtcattggccgtcgagctccttggagggagcaatcgggtctcacgacccatttcaccacaaacaaagcttgctttgtttcacctcctcctgcactgccagcttgcaccggcgtcctccctagaccaccagccaccatgcagccaccaccatccacgaccaaagcttggctggccccacctttgtatatatatgtatttgtgtatatatgtataaatattatattttatttattttaataattagattattaattagaaaaataaaataaaagataaaaatatgagatattttgatatgtgcattattttttttattttaatatgttaaaataaattattttttcaaaatttaattttattaattttggagtatatatatttatcatttttcaaataaatatatatatcaagatattttctttttaaattgtattttattataaaaggatataaatatatacataccatattaaatataataattttggaaaagtggttaatgatacttttagatagtggaggtgagtacaggccttttacaaagtttttggcagatcaaggaattatcatccttgtctgcatactcatcagcaaaatggacatgctaaaaggaagcatcgacatataactaaaacgagcctcactctacttacacaagttagtttagatcaaacctactggtggcatgctttctcttgtgctactttcattataaataagttacctacaccagtcttgtctaacattaatccttttcagtatatttttggacagaaaccagattatgctatactgaaaccatttgggtgtgcttgtttcccatatttaaggccttataactcacataagatggatatgagatctcgatagtgtttattcctggggtattcttcataccataaagtctatctagtgaaaccaactaaggaagaatatagattgctcgcaatgtggtgttcaatgagtctttatttcctggacctcacaatccaagctcctctcatgaccaggtactttgtccctctaatgcctttaattttcctattgccagtttcaacacaattagtgctaactctggtttttttctatgatacctattgttgctacccctagagtgactgagaacattttgttttttagacctagtcctcctcaatcaatacttagccaagccagtgttgaacaataaacaaatcaacctctaccttatgcatcacaaagacctgcctcaccacaaataaatattgggttttatgccctnnataaaactctttacaatctgattagt

SEQ ID NO: 113007 - DNA, 10217 bp, Cannabis sativa
  modified_base (9570)..(9580): a, c, t, g, unknown or other
  modified_base (10149)..(10155): a, c, t, g, unknown or other
agagagagagagagagaaggagtagtaaatgtggtaatgaaggatggccaaatgaaccttatataggttctggcatggtcttccctccaaaaatgtagtggcaaattcacagcctacaaaatggccatgtaaaagaccaatagttcactagtgggaacgtgagcagcaagaaaatcataatgattggcaaaaatgccattcttagtcatgaagtgggtcatatgagaggccaagtacctgactgatcgtaagctgccgaattaagacttcaacagttagaactgaagttagaaagtctctatccgtacaaatgttcgcacaaatactgtaacaacctgactcatagggacaccacatgtatgctttcataaattaatctataattataaattaacagtttaagaaaagtgtagtttatttaaaacttttgattagattgaaacataaccattctaaatacggttggattcgggatccctgtttaaaagcttcaacatcacattacaaaaccacttttccaataagggattacattttcaaaatacggtcaaaagggtggatcctgtccactaaacccaaaacacagcgattgatatgtacatcgctaggagacctctgactcatgccttgtccacaatttccttcccttttatctacaccatgaagcacccgtgagtcgcaaagacttaacaagaaaagaaaatgaaatgcaaataacacataacacaagaaaacacaatcctgcgtaagcaataaagttatcattcaatataaacatttattcaatgtgtattctaacattacataaacaaatgtttgtcttataatacaaactgtatttgacgcttcataaagcatccttaccacttgttgcccacgagctacgtatgtcaatatcgttactcgataaagcaattgataagtaagaaacctatctgcaatttcaagtaagtaattactcattgacaataacgataatgaccgtatctttactcattcctaataacggtaatgactgtatctttactcattcttaataacggtaatgaccgtatctttacctcaatcataatcgacccacacacgataataattgtttctcacttaacatgcatagcaagacaattatcttttcttacctcaatccaatattaggtatgcgggcgacctgagtggaactacggtcgacgatcccgggtcctatgtcatgacaataaaacttgatgaacaacttaattgaattctggaataaatcctaatttcacaatcagagaaaccctaatccccacagacttagaaatagcttaaacatgactaaaatactctaaataaagttttggaaagcaccctgagcaaaataagatttgggagaaaaccccaaaatttcccttgttggccaaccggtagaccagttcactagtgacttgtagaaccaattgactagttcctgtagaaatagaaatttctagtttttcacatcgaatccaacccaaaacctctacaaaccttttcaaacctcccacaacagttaaaaaacataaaaatagtgtattcaaacatccaaaacttagtaacacatcaaaaacacaaattcacctttgaagagtaaaaattgggttcttaaactcaatttttcctaattctaaacctagtagccaaagacttacccaatttacatacaagaaaacttaatttaacatcttaaaacatattctacaatccattttatatcacagccctgaaatcacaaaaaaaaaaaaactaaccaaaactaaccttaaaccttgaaattaaagagaaaggatgcaagacttacctccaagctttcaacaacacctagggttagttaatttaacttagaattgctgaattgaagaagaaaaatcctccttgctcagctggttctagggcccgaagagagtagagagagaaggatgagaagttatgcaattttcttagtttttaggttttatccttaattaattaaaaacttaaataatataaaattctaacatagaaaactttaatttcagcgtacataattctataaaagacaaaacaacattgtacccaaggaaatgactatttcaccggtcctttcaaacttaagcttaaataaaccctaagggtattctggtcattttctaactgccccgactataccgaactcttaatattctaaacttgttcggtacaattccaagataactcaacttttatcgtcgtgacagctctgactactccgtcgagttcccacaaccgccgaacccaaaaatattttatttcgaaaattgtatttacactacccacataatccattaagatctccgtaattaataaattacggtttatttattcatttactaaattttgcactaatcaactcataattaacttaagtaagatcataatcttactccaatactcatataaccacatatttaataaaatatgtccaattaaatattattaaatttttcgagatattacaactatcccctccttatagaaatttttttctcaaactttacctagaaaaatagtctaaatctcaggtcacctcttcaatcttgttgttcctccagaacactttaactagcaaaatagtcttgttccgcaacactttctccttcctatccaggatctgaactggttgttcctcgtatgacaagtctgtttgaagttcaatatcctcatatcttagaatatgagtcatatcttacacatactttcgaagcattgatatgtgaaatacgttttgaagtctagacaaagcagggggtaaggctatctgataggctacttgacctatcctttctagaatctcaaatgggaaaataaatctgggacttaactttcccttctttcgaaatctccagattcccttcattggcgatattcaaatgaagacaaagtccctacctggaacttaatatccctacgcttcgaatcagcgtagcttttttgtctactctatgaggcaagcatacgagctcgaattttttgaatggcctcactcattctttggacggcatcaagtccaagatatctccgttcaccggcatcatcccaatgaatgggtgaacgacatttcctcctataaagcatttcatacagttccaatagtactactattgttgtatgaaaccttaatcagaagaaggtacttgttctaagaaccttcaaagtccatcatacacacctgtaatatatccttaattatttgaaaaatcctcttagattgaccatctctttgaggatgaaatgttgtactgaactttaacttattacccatttctcattgtagactctcccaatacttggatgtaaattttggatctcaatctgagacaaccaactttagagcaccatcaagctgaattatctccttgacatatagatcagcgtattgatccactgtatacgtagtccgaactagtaaaaagtgagctaactttgtatattgattgaaacttaaccagatggaatcataaaaccctactgtccttggtaatctaactacaaaatccactcaggaatcttcagaggttgaagtaatcccgctggtctctgatgctatgtctttacttgctgacaagttaggtattttgacacgtactctataatatcatctttcatacctgcccaccagtacagtgattttacatctagatacatcttagttgtccctgaatgtaaggaatatggcgtggtatgagactcgtctagaatctcctgcctaatactagccttagctggtacacaaaccctacctttatactacaataacccatctaatgaaattgagaaatcctttactaactcagcttcaagcttctttttacactcttgtaattatagatcactctgttcggtcatcttgattctttctagcaaatcagattgtaatgtcatattggctaatttcctaactgcgaactcaatgtttgctctggtcatatcctcagctatttttggtgcaatcttcttcagctcataaacttgcctggacctttttaactcaaagcatcgactaccaccttgcttttccaggatggtagagaatttcgcagtcacagtccttaacgatttctaaccatcgtcgctgcctcatactcaaatccttctgagtgaaaaagtatttgacgcttttctgatccgtgtagatttcacacttttttccatacaggtaatgacgccaaactttcaaagcgaaaactactgctcccaattccatatcatgggtgggataccgctgttcatactctttcaattgcctagacgcataggcaataactttgccaaattacatcaagacacaacctaacccttattttgaagcgtcacaacaaatcacgaatttttcattactgactagtaaggttaacactggtgcggtaattaacctctgcttcaattcgtagaagatacttttgcacttgtcactctaaacaaacttacagttctttcgagttaattatattaagggtgtagaaattttaacaaacccgtcaatgaaccttctgtagtatcccgctaatcctaagaaacttctaacttcggttgcaaacttcgatcgtggtcaatccggaaccactttaatctttactgggtccaccaagataccatcttttcttacaacatgccctaaaaagcttacttgaggcagccaaaatttgcatttcttgaatttagcataaagcttgttctcctggtgacgttgcaatacaatttgaagatggttctcatgtacctcttcaaaattagagaagatttgaatgtcaccgatgaagacattacaaaatcatttaaaaattccttgaacactcagttcattaagtccatgaatgtcgttggagcatttgttaatccgaatgatatcaacagaaattcgtaatggccatatcgggtacgaaaagctgtcttgggaatatcctcctctcaaatcctcaactagtgataaccagatcaatgatagatctcagagaagacggtctttccctgcaactgatcaaataaatcgtctatccttgtaaaaggatacttgttcttcactgtcagcttattcaattcctggtagtcaatacacattcccaatgttccctccttcttctttacaaacaaaaccaacgcaccttaaggtgaggtactcgatcaagtgaatttcaagtccaacattccttgtaactaaaccttcaactcttttcagttttgcaggtgccatccgatacggagctttagatacaggttttgccctgggtatcaaagcaatttcaaagtaaatatcatgttttgttggtaaccccagtagttcctctggaaagacttccatgaattcttggactaccggaacgtattctggtcccattggtacttccttcatggtatccaccacactagatacgaaaccgacacatccatcccataacaaatctctttccttaagcaccgagattaatggaattctggatcctcaaaccctacccacaaacacaaatgggtcctcaccctctggttcaaaagttatcacctttcttttacaatcgatgcttacgttgtactttggtagccagtccatccctagtttaatatcaaaatcatctaggttcaactcaatcaaatcgaccgacaattctcttctctccacaaacactagaagggatataaccctcctgttgtagataaccaattctccagtaggcagtaaggtaccaaaaccactttgtaaaacatcactaggtttatgcagattcctaattactctacttaacaaataagaatgtatggcaccataatcaattaaaatagtcaacaaggtaccattaatagaaatttgatgtcacggtagaaggaccatcatcggcctctgtctgggtcgaagcaaacacccgagtaagaactaaagtgtcatttttcttttgtttcaacctctgtaaatgtgggcaatttcttttagatggcccattaccccgcactggaagcaagctctagtttgacatttgccctgatggtgtctcttgcaccttaggcactctagataggttcgccaatttttgttttcaacatgtcagaaaccttggttaccttgaaacctcttgttaggacctatagctaatgggtcattaggtcttttcttgcgatcattagggtcaacacccttactagaaccgacactgggtgattgtttccatgaatctctcctaatactatttgtcttttggatctggtcttctgcaccctcagcagtaagggctagctcaattacctgagcatatacgaacaaaccctcgttgtttggcagctacaatcatacctcaggcaatatgttcttccaatcctcgaatgaatttggcttttctagcaacctcagtggccacttcatcaaaggtaaactttgtcaatcgatcaaatttggtgggataatctatcaccgtcatgttgccctgggtgaaccgtataaattcttttgcctttgcagcttaaatagatttgtaataatacttttcataaaacaaagtctagaaggcatcccaggtcatgttattcaaataatgaccctatgatacaatttcccactaaatgcgagcatcctcacgcaacatataaatgacacatctaacctgaccattactctcaacccgcatgaaatcaaaaatggatgttatcatactcatccactgtttcgccttaagtggatctacaccacattcgaacacttgtagattcagctttctgaactgctcatacaacggctctagacgattcccacatcctgtggcacaaccaaaggtgctggaggtttaggagtaggtcgagcttgctgctcctttaattctctaatctgtttgacttgcttccggatggttaattgcatcgcggcatacatttgttcccagtcttgtagtggaggaggattcacaccctcaccgccaaccctgagcccaaaaagctcacgattacccttattaaatcgccttgggtgcatattctaatacactctcgaccataactttccatcatgagaatctaccaaaccaaaaattaatgctaataagcattaccgcacatgcatatacatatttaacaatctttatgaaaatctatctgcttccctagtagcttgcacattttaaataacgaggtaattcaaacaactaacaaataatttattaatcacctaacaaatgccacgtgtgtgcttttataaattaatctataactataaattaacagtttaaggaaagtacaatttaggtaaaacttttgattaaattaaaacataattattcattcaaaatactgctagattcggggatctcctgtttaaaagcttccacatcacattacaaaaccatttttacaatagagggttacattttgaaaacacgatcaaaagggtggatcctgtccacaaaagccaaaacatagcggttgatatggacatcaccgggagacctctgactcacagctggtccttaatttccttccgttttatctacacaacgaagcactcttgagtcacaaagactcaataagaaaagtaaatgaaattcaaacaacacataacacgagaaatctcaacattgcataaccaacaaacttatcattcaatataaacatttattcaatgcgtattcaaatattacatatacaaatatttgtcttataagacaaaccgactttcacgcttcataaagcatccttaccacccgttgcccatgagctacgtatgtcactattgtttcccaataacgcaattgataaataagaaacctatctgcagtttcaagcgatcaattactcattcacaataatgttatgacagtatctttactcattctcattaacggtaatgaccgtatctttacctcaatcattatcgagccacacacgataataatcatttctcacataacatgcttagcagtgcaaataacttttcttaccttaatctaatatcaggtgtgcgggccaacctgagtggaactacgcttgacaatctgcggtcctatctcatggcaacaaaacttgatgaacaacttaattgaattctggaataaaccataattttacaaccggacaaaccctaatccctactgacttagaaatagcttaaacatcactaaaatactctaaactaagttcgagaaagaaccccagggaaaactagatttgagagaaaaactcaaaattttccctgctggccactggtataccggttcactagtgacctgtagaaccggtcgaccggttcctgtagaaatgggaaatttctggtttttcacaacgaatccaaaccaaaacctcttcaaacatattcaaacctcccaaaaaagtttgacaacataaaaacagtgtattcaaacatccaaaacttattaacacctcaaaaacacaaattcaccattaaagagtaaaaattgagttcttaagctcaatttttgctaattctaaacctagcagactaagagttacccaattcacatacaaacagacttaatttaacatctataaactattctaaaatccattttatatcacagccccgaaattacaaaaaaaaactaattaaaactaaacctaaatcttgaaatcctaagagaagggatgcaagacttacctccaagctttgaacaacacctagggttagttaatttagcttagaattggtggattgaagaaaaaatatcctcttgctcagctggttctagggctcaaagggagtagagagagaaggatgaaaattatggaatttccttagtttttaggttttatccttaattaattaaaaacttaaataatacaaaaaactaacacataaaactttaattttagcctacataattctataaaagacaaaacaacattctacctaaagaaataactattttacacctcccatcaaacttaagctaaaataaagcctaagggtattctggtcgttttctaactacccgactaaactgacttctcaatattctaaacaagtccaatataattccaatataactcaacttttattgtcgtgatattttttaccactccattgagtttctgcgatcgccgaactcgaaatattttattttgaaaaatggtatttgcaatacccacataatccgatcagatctttgtaattaataaattgcacattatttatttatttatttactaaattttacactaattaactcataatatgctaagatcataatcttactctaatattcacatatttaataaaatatgtccaattaaatattattatattttccgagatattacatagactttggaaaaatagtatctcaatttgtaaccacatgacgcagcatgtcaatacaggccaaattgatgccacgtggagtacaacctgtcaataggtgaactgagtcatcatgcacaacttaccaattgatgaagggacatattgaggacacaactgttcctaataaattgctataagacactagtgactattattaagagtcatttggcaacaatattccaggtgaaacctatttgttctcagggttatcccactcttttgagacactacaagaaatgtcactnnnnnnnnnnnatttttgtgctggcaaaagtttggtattgtgttagtaaaatagaatttacttctgatgtgttggcaaaagggattggcaaatcaatggttgtattagaatttttgttagtacaaaatgaaaagtgctagcgaaaatgacttttcccagtgcgtaaatgcgctagtaaaattttagccactgcaaatgtgcgctggtaaaactttgatctttctaccagcgtaatagcgaactgttggtaaaagtgatatttcttatagtgagagattatgaattttgaaaacgaaacctttttattttatgaaaaaattactaaatggacatataaaataggatttaaataccataattaaatactactttaaactttatattttataaaaattaataatcagatcttctattttattaaataacaactttaatcttatttttttaagaaaaggtataaaataatacttcacactcaattttttttttcaaatatatcataattataatgtgacctgcaagtattatgactagattatattttttaggctaattaggattttttcccctgaactttgannnnnnncaaatcatgcccctgaatttttaaagtcgttaaaaatgtccccctaaactattgagattgtt

SEQ ID NO: 113008 - DNA, 888 bp, Cannabis sativa
ggttaaccaaaccgaaggagagaatgagatccaggctcagatcttgttattactctgcgacagaaagaaacaagggttagagatctaagcggaaagagtcatattcatccgctaccatcaatgtaaggttttctaaactcttatttgtttaattttatcgtattagagaattcatatttagggtttaaatgaaacatgcatgttagtaaatctagatcctagtaaaataaattcaaacactttcacctccttattagcaacaaatagctttgtgttcaccttgccaagctggccgtctaggtcatcaaggttcttcttattggctgcaacagaccgtttaaggtgagcatacgtatgcccaagcttcaaggtaacttgaaacaaaaaacaagagttaggtggtggactacaatatacaaaaagactcctgaaaaaaaaagtatcacttaccgaggacaactcttttaagactccaaaagtacagtttcgatgggctcactgtctgaatccttcaattgctcatccacttggactgggcacctatctaggtagttgttgacaatatccttttcttttcctacccagctagatctcggacattctttattggacctcctaggagcatgaggatgcctgtccaagctacccaccatcagttcgttggccagaggagcataaggaagtggtggaggaagaccaaaggaacttgatccctccttctgggcagacttggaaagagactcttctttagggacacatataggctttcccttgatgaattgccccagctttgaagccataactgcaaaaacaaaacacaatgtatgttgggttttacgccctaaataaaactcatttcaatataaacagatttacttattaatatag

SEQ ID NO: 113009 - DNA, 4160 bp, Cannabis sativa
  modified_base (3990)..(4002): a, c, t, g, unknown or other
aagaagacttagctgaattatttaaacgctgaaccctttccacctacgtgtcatcatccggttggtccacgtattttaggcaaaatcaggggcaacagatccaataaatcttcattcttaaaaacccattccattttagaatagattctctctccattttcttgattgttagatcaagtaaaattagaaccacacctttttaattcatctgccagtcctaaagaaaacgattgattagcatcaactaactcacttgcactaactggccttcctccaatcctatcatcacaattaaacactgaattaaattctgcacagattaaccaacgcttcacatgcattgacaaatcagttaggctatgtcataaatctagtctctcattcacagaattactcccatacacaatagtatggaaaaatactttattcatacctcatattctgactttgcaatgaagaaattacttgatttcctttaaaacctccattgacaaaagttttgagcctcatttgcgaaattctaccctcaatgttggtgctggaatagaactcccaccctaggaagacatatttcaccatctcatcaactttacttcctcttcttttagtttccaaaaatgcacaaatacccactttattctgcttcaacacttcttgtattttatcttgtttattcttgtggttaaaccccctaatgtttcagcatagtagattgcaattctccattaagaatattaaacgagttttgcagttgtttgccaattttcttttaaattcgaaaaattttctccttgggaatttgccattcacctttaagttgagtctccaaagtgtccacctattgaatttcacattgagatactttagacttcgaactcccttgaaccagaggtgtgatatagctactgaatctacacaaatctatgaatcagtagaattaatatcttgtttctccattgctaagaacggtgaacctgctgacactttccattattttacaataagagtttttggctttattgttaccccaatacctccattcgaattcccaagctgagtgaaattttttccctaattcctaactgctctattaactgtttcagcaatctcatcttgacccatatccactttctattatgaattaatgggaagtggcaacctcttaaagtctagagccgttggcccattcttcttctctgaattagctatagaagaggacttgaaagtagttctagcctttttaaagctcaacatgtgacaatatgatgatcataaccccacatttcgagcattgataggaaaccattcatattcatattgaattggaattcaattaagtcgatcccattcattttcatagttgatcactgtacgtaaatcttccttaatttctatgtcaactgaaatctgagcaaactttacttgtgatcactatttagtaatattgtctacaatgattggggttccaatagtattagctggtgcactaagacaattggttccctaatattatagacctaggccaggtagtttaatccaaaccgagactgtttttacaaaattcatggagtcaaaattcaaagtccatggtctatttataaattgtttgtttccaaattgtacaaacacgacttccaaaacaatatctctggaggcttcatctaacaattttactagtgaaataccatcgtgcattctaaccattttctccaatcccatatttctccaaacccttcgagcgaacctctcaaacactttcaatgggggattttcccctaaaaccatacataacatagcatatttccaataatcagactcaatttcaatttccttaagatcaagcttagcaaatatatagccatccttcttaagaggcgaagagaaatgttgccttacacccacatgacttgacttaggtgagatctctacccacatctgttgagatctctcttggaatttctatccacattcatcttctcacccacccacatttggaaaagaggttttcaacatcgaaccttggttgagaaaatcttgcatcttatggattggaggaaacactccatcgagggcatctgtgaactcttttgtgaatcctcctaattcacttcttcctagaaggagggaataatagctacatgtctcctacaaaactaagataaagaatcaactttcctatatggtgattcggtattcctcgacgttgaaactgtctttcagtgggtctgctttgccttcctcatcgatagagaacaagcagatctcacgcctaatagataacataggaataaatatatttattatgaataaatcataatatttgtatagaacattttatataaaataacattgtaatagtagtattcttaaaaatttagaatatttataaagaagaaaaataatttaaaatgtatctgtctaacaaaattttagtggaaaatttattattatttttgaaggaaaatatatttattatttaagaagtatatatagattttataaatattaatttaagagaattttatatttatttttaagagcattagccctaggttttgttgtaattctattttggttcgccagggtgtctgttgacagggacatacctcttaaaaccctatagacaaaaaaattgtattacaattttttattttatttgataactaaatacaaaccaacacgagtacgtcactcatggcttttatacatgggtacatcactctggctgcttcttggaatgacgacaggccctacaaaccaacacgagtattttcagtatgatttatcctcacttacaagcttcttaagagaatttcccagtagttaacccatcctaagattactccagctcaaacacgcttaatattggagttctctagtaatgggcaactaaaaaaaagatgtaccttgctgatataggtagtacctatcaatctatgtaagtcttcttcaactatttagtcaaactcttagaaaatcttagaatcatcatacttgatcttccccatgcgatgtgagatttcacagcttactcggtattaccccttacagatcacgagactactgactgtcacaataataatttaactaggttcattttttttataataatgaagcccccacaaagaaatttttttcggtcggttactatctattgataggctagttttaggtatattttataatgtcttttagccgattatgttcatttttgttccaaattgcatttgtctcttgttgtttcatatttaatggtcaattaattattatggattgaaatgagaataaacatatcaaataagacaaatatggtaaatatatcatagattttggagttgtaaaatataatgagtgataaattttatgtttgggatgctcaatacatttcatttgagctttggaaatgcaagtttaaagcatcaatcaattttttcactttgatcctttcactttccagaaaactattctgaataaaatttgtagagcattcttcaagattttcaaaatatcttaaatcttaaaaaacttatcgaccattgcagtaggatttaagagtcccaaattcacaattagttccatggctcccaaataaagagttgcagcgcacacgtctatacagtacacgaaagctcaatttgaagggacaaagttgtcttttcacctaaactaaaatcgttatggttactacataaatatctttaagtgtgactttcattatttttttcgcctctaaaaacttagaaaagcatttagaggcaacgaataataaagattcaaaatttttaactcctcttttcttattttatttcttcattgttatgaaatattatttatggaggttcaaatcaccaagttaattatcaccattaattatggatgttatgtaatattatttatggatgttcaaatcacccatccaaacgcaaagacagctcggatgaagtctacacgccacttcggaagtcccgtacagacttggggggcaaatgnnnnnnnnnnnnntgcactctgacgtggcatcgcacgatggtgacacatggaatcaactctgggtacttgatcgcaagaaatatgccgaacaagacaccacatacatttgctcagacgaagtcctcttagccaagcagtgagcaatccgtgcaacacgccaacacttagca

SEQ ID NO: 113010 - DNA, 2042 bp, Cannabis sativa
ttttagaaaatacatggtctatttagtcatttaacaaaatagatagtccaatcgataatttttacaaaacacaaggtctaaaatagtatttatccatatttagtccaaactccaaatccaacatctaataccaaaggaaggagactgtgtcgaccaccgcctatactgaattatatatatatatatttgtaaggagaaatttcattctccaatccttttacccattaacatcttagaagatttcacaaaacccttatcgcttaatttttgacttttcggaaatatattagctgatgaattagtagttgttgttcttgtttttttagtacctttagtggttcatatacctgtcgtgttcctgggattaaaggcttacaatgagacaaagttgcacaaatcttacttggagatgactcagctatagaccaatcgtacccaaaaaaaaatgagcaatgagcttatagcatatgcaggagctactaaaaagacaaaccccacaaaaatggctcaaagccaacgccactaaagacataaagtgcaaaacactacaaaaactaaaaaaaaaaaatgaaaaatgcaaaacaaataaagaaatataacaaaacagcccaaaaaacccccctagtacaaagaatgagccactaaggcaaccaaaaacagaccatcaaagtgcaaagaggcgctaccaacttctgagaagaaaagcctacagtcaacctcctaaaaagtttcaaaatggtgaaggacacaaggcaaggaacacacaaccctttgagtaaaactcgactccccaccttttatatctacaaaacattgagagctcaaaacaagtctaagtgcactataggtagaatgcttaaaatgaaactcaggagcacaaactgagatctaacaaccaaagaagaaaaaaatcactctaaagcccacacacccgtctgaaaagggccaccacacagctctaataacaaaatcggcaaggggaggaccaatggaagcctaccaccaccatcaccaagcatcctgcaagactgaagccaacaaattctcccatctgttggtcggaggcgcctcacttgagaccgatggccacccccaacagatgacctactccagtgaaaaccacaacaacacgacataccccaatggaagagaacaaagcttgacgcacaacctattaagatccatcattaagaccacctatgaaaagaaaaaaaaaaggctcttgaggcgccactaggccaaatcgagtcgacgatgcccaaggaaggtgaagaaaccctaggaaacgagtgggagagaagaaagggtcagaaacccttgaaagaaaacgtagtgaggtccattaattgagaggaaccaaattggatattatttatttatgattttgtaatgtttagttcactccgtaacgttttatacattattactatttttgatgaaattagagtccaaaatatcttgtaatacaaattaaaattgtatttttatacgctatttgaaattacctttttcttatgaggtgtttggagtaagagtttcacttggtagattttaaagagtttaagattacctaaaaataaacttaaaaatggaacgaactcaataataagttctccaccaaaattataccaaacataatagtttggatttacattcaatttcaccctctcatttataaattatttatgcacaaaataaaaaacaatctctccaacatataaatggttagaaatatacattttcattattttttataaaattaaatctatcgtaaaggtatttataaactactttactgtaattcttagcagataacctcctattctttgtttatttattttagaaaatggagataacctcctattcctaagactccaaacattccttatagtcttagaattgttaatagttttacacacctattagtaaaattagtcttatctttgaatgtgttgtcgagtcaatttcgcaacaccgaaaagtactatttaattgatataaaagagaatttttagggaaatgacaagtgcgagtattcaacc

SEQ ID NO: 113011 - DNA, 1335 bp, Cannabis sativa
aaaatcagttcagggtcctattataccattttaaaaaatacatggtccatttgtcattttacaaaacagaaggtccaatctgaaacttttgcaagatataggatccaaaatggtatttacctattattttatacttcatgaccccaatgaaaaagaataaatgacattcagttagaaagaataaaaatatagaaatagaatcaaatttaaaatgtatacaaaaattaataaaaaaatttgttaaatttcttcttattttttattaaaatggtattttcttttattttaaatagaattatcattccactaaaataataaaaaaaaaatccaataaattcgaccgaacataagaatagaataaaattatttcttttctattccattttatttcattacctccaaccaatgcgacctaaatttctactaatttgttaccattcatttctttgtcattgtgttatgattatataagttttacttttggaaaagaagaaacagagcacgaaaggaatgaggagtcatttcattgatctatggagctcaatacaaaatattctttaatacaattcacacaaccaaaacaaataccaactaactctaacaaattttctattaactatacacttcatcctactaactaattaactttgatgctcccctttaaggtggagtatatatgttgcaaattctcattttgtctttgagaatttagaattaattaggaagaaaagtcttggtacagatatctgttatctgttctttactgaaagtatgaactgtctttataactccttgttggatattttctcttaccaagtgacaatcgattgctatgtgtttagtcgtctcgtgaaagacaggattagaagctatttgttgggctgctttgttgtcacagtgcaatatggttggtcctacatgatcaatgtttagctcctttaacatggatgccaaccatatcagctcacaagtggtattcaacatggctttgtactcggcttcagttgaagatcttgatactgtgtgcttctgtttgcttttccaagacaccaatgatctcccaaggaacacacaaaactctgttgttgatcttctcgtgtcaacacatactgcccaatcagcatttgtgtatgcctcaaggtggatctttgaatctgctagataaaaaaggccttgtccaggggtccctttgacatactgaagagttcttaaagcaggatccatgtgattcattctatgagtgaccaaaaattggctgagcttgttcactgtgtaggctagatcaggtctagttatagtgagatacagtagaaactctatttaagaatactctat

SEQ ID NO: 113012 - DNA, 6232 bp, Cannabis sativa
tcaattcaattggattggatcggatggaaaaatccaacatccaataaataattggattggattggatgggtccaaatccattggatgtgatccaatgaacacccctaagcgtccatcctcaaattaaaagcaacacataagacataacgttggataactcaaccttcaccagataaaaaaaaaaaacaaaaggcaattttttaaaatggaatagaaggaatttatcaaaagaatgctaacctgattatttcagattttctagctacctactttttcagaaaatgatcttttcatccatacttgatgtagctcatatcataaattaataatgcatttcaaattttacactttatttttgcacccctttccttgtattggagagatcaggtactgaaaaaccattaacattacaacatatgtacaaaatgataaaccattacagccatttactttggaagagcatctcttacgctgcacctgtcaaattcgattaatctgccttatgatgaacatatgttttttaacaccagctaaattgaatcaaggaacctgtgcgcagagtaacgatttaagacccctcatcccatactcacgctcattcgagaaaaaaactgaaatcaggtaatacagtgttgcctcataggtgtgagtagccttgcaaatcgaagaggcacgtgtgccttcactaatgtcccattctccgtgtattcctgtgaatttttgttaataaatattcgaattgaacaaaacactttctattaagatatcccaagttcagatcagaacaaagcgagctcacacagacaaaactacatgattacttacagttctctctaccatgccaacctgatgtacagtacttaaaagctcccctttctcaaaagggatcaaggcttcgatccataccatagtatcctgttgcaaattgtttttcaaaaaacgacattaccacaaatgaaataaaaaattaccaatttttagttatgaaacgaagtcaaaataaattttgcaagcgcatcaaggttaagcaatctacctttaatctatcctggactgcattacagaactcaagcaacccttcgccatttaaagcagacacacatactatatcacctcttttctgtgcttctaactttaatttttcaggattggcaaccttatcaacctgtcatcattcatatcatcataccaagtcgcaagatgcaatatattacggacattttaaatacaattatactcaacctataagccttccagtgcaacttgatattcaaataaaataaataaatcaacgcatgaagtatgatcaagtagccaaatcctgaaccaaggtaccattcaggattagtattaattgattcacaaaattttgagtttttaatgtgtgctttcggtgatatgttcataggttggaagatacactagcaaagtggtgaagttagagcagtttggattttttagtatacatatagcccttggacacatatattctccagtttcccaaaagaaatggggtttggaaaattcacctaacatgaaactacatgtattctctagtttcccgaaagaaactagagcaaaggtattagcacctaggaacatacattttagagatcattataccttgttccaaacaatcaattttggaattgaggagacatccagatccgctaaaactttgtctacagcatctatttgttgctgggctagaggatggctggagttgacagaaaaaacaaataagttctaaattatcacccgaaacatgtctttttgacaattttccaaaattgtacctgatgtccactacatgcactaacaacgatgattctgttatctcctctagtgttgctctaaaagcagcaacctgagaaaagagaagatttaattccagttgaaaagagaaatgacggtgagaaattcatcacacaggaaagtatattaccagggtagtaggtaatttttgaatgaaaccaacagtatctgtaagcagaaactctttcccgttcttcgtctagaaagtgggacattggaaacaagcatctttattaaaggtacaaccaactaaaattacaactactaaagtgattctaagccatagattataggctacatcaatttctaatagattgtcaaaaggtacatattttcagtagaaaggggggcaagtggtaactctaaataactgcaaaggaaatcaaagcttgcttcacttattcctcattgaaatttattagacatataataacactttgtaatgtggtgaaaacaagagtttcctgatgtaactgacctgaacccttctagtagttggatcgagggttgcaaataatcgatcctcagcaagtacattagctccagtcaattgatttagaagtgtgctctttccagcatttgtgtaaccaacctaaagtcttatgtcaagcattagatgactacaaatattaggaaggtacaataaaaacattgctacccaagatttgtgcacatacataccaaagacaccactgggacgggtacagaagtgcgtcgagttctgtattgctttctatgttttcgaacagattccaactccttcttgagcacaccaatctaaccatccaaacatgctttaacagattatacatatggagaaaacaaaggttataactgaagcatcttgaatatgtaaactattttgcagtctaaaatttgttagtaagcaggcttaactagggaaatttgagtttctatgctgtctagtatgccttattaaaaaaaacataagaaaatcagcttttttcaaatcatgggacataattgcactcactaaaagccccctcttccatttctcaagctctctttctctctatcacaatggcataaccaccacctccccatggtgggaaagtactacttcaattctttattggttatggttgtttctttttttttttctcagatctaaatctcagaaaatctacagaattttaatcaagacaatgcttttgcgatgcttagcaatgattcattgatgctctacagatgttcccaattttcattatttttgaggtaagaaacgatgcactatgttcccatgaaacttgaaattggcctaaaaaaatcaacttttccatgggagcaccgtaaaagtgtatgaaaacgggagcatcactagagcatctcaaaattattaaaagaaaaatcagagattagatctgaccataaaagaaaaaaaatgaaaaaagcaagcaaaactcatagatgtaaatgtgtttgaaacctttaaaattagtgttttaagtgaatattttgaggatctaagttttgaatttcattctgactaatttagaacattaaaaaaatatatttatatataggaagcaacgaggaaagcataattgcctgtggtggggtatagtctaattgaggcacttaatattatatgttttttcatggcagtattcattctaaaaatttctgactgtactcaaatcaattctcaaacagtttgttgcaaccgtgcttaaattttttcattttcatatgcgtggaaaacaattatttacaccctgctttgggcactttaaatcactaagttgtccataactttttaaaaactacaagtacaatgaatgctatcataatatatatatatatatgaatatttatatatattagaagtgcttcattagaccatgccccaccttaaggtacttttttaccccattcgagtcgttccctatttatataaattatacataggtatataggtgcttcaatggtgatatgaggtggcgaggatgatattaacagcagtggtagctgggccactttggggaggaggtggtggtgccatagaagtagagagaaaaagatcttaagagacggtttgtgtgagagagagaggggggacttattattgggatgggcaattttgtgcaatgtctagaagaaaaaaaacaagcttatctttggtgataattataaaggttggcctgttttgttagtaaggcatactagatagcataggagctcaaatttccctcagcaaaaggctgatttacttatcctattctatgcaagggacagttcttgcaactcaatcaaagttacttacttgagtgcgtaagatacgtttgtccacttcaatttgtttctctcccatccccttcaccttgcctcctgcttgacgctcaagatgagtccacatttttgttaatcgaggcaattggtattccatttgtgccaatgctacctgaaaatttatagaagtcaagggaaaactttataaatgatttcacttttcaattctcacacataaagtaagaaccccaaaagaagaaaaataccatactaacatgaccccattatcctcaagcttctatcatgccaagttgttggcaaagatttcatatgcagatatcttattaaaattaaccaaaaggatacatattagcttacctgcaaagctgcttcatgagttgccgcacgctggttaaaaatatctaggatgagggcagtgcgatcacaaactcttacatctccaccaaaacacttttccaaattgcgcaattgcctattaagataacatttctaaataagaaaaaatatagacatttatacatacgtagttaatattgacctacaaaatactagttaaaatttagttgaagttaacagggaaaacaaaattaacaaaaatccatgctacttccggaaaagtcagaataagaaccgcagcatcatgctgaacgaagaaactgctatgataattaaaattttcagtaatctttaatcaaagctcacatcaatgatcccaatttctcaaattgttaaagcctggttagatataattaccatttgcataacaattaacaatgatgtaaagatacatacaatatccagattaatgatggtagttaagaataatgtccttaccctgctgatagctcatcatcaaatattacagtctcggtgtccaaggcacgaatagcagtcttgatttctgccaccttgccagatccaatgtaagtccttgggttcggagaagctaacctgtatagtgagaaaaaataagatgtaaccacacaaaaaccattagttaccagtatcctggcacatacaattatgtgcaaacgacccctattctgaagacaacaacagctatgctagagctgagaatcagatacttgcttttgatacgtggaaccaacaaccataagccctgcggtgtctgccaactgggccagttccttcagtgattcctctatgccaaaggagtactctgtatcacctttgcgctcaacgccaacaaggtatgctttttcttcaaaaacctgaaagaaaataagtttcgttactctgtcaaggtaggtattcaagataataattaacaagttcactcaaactcaatcactaactatcagcgcgaagcattcaaattaccagactaccactgattttattctatcaggaatctctaatctacatgattcatcaataatacaacacaagcagttttctttgccttttatctttttttgggtctctcccctaggaaaacacacataacataacgataaatatagaaattgacctctcttccattccgaagcttaaacctgttatctaattcatcatcttcctctgtcttcttcttaactctaggcaaagaagttggggccttatcatcaaatatattatcctcttccgcagctccatcaaaaacactaagaacttcctcgttttcttcagtggcggtctcaaccggtggggtggggggcaaagaaaggtcttccggtgaaacaagccccggaccttgtcggagaactgtgggggaaaatctaggtgaatcaatggaggattttgtgagaaaagtaggggaaatgaagcggttagggtttgaagttgaaggaggccatggaagagagaaacggttagaggtaatggagggaagagaggtgaagaagcatgcggtcatgatagaggagagaaatggttactcagtgttgtgtgtgaatgtgaaacactctgaatgtcgttttgaagttccttttatacggacgttactttaacggctttaccaccccaaataaatatgatcattgttacaaatactattgtaaatacaggtcagattttttaacacagtacgaaattaacacaaactacaaagacacgagtatgattagacatagagaaatttgattttctatacttagaaaataaaaaaaaaatttccctaaaccaa

SEQ ID NO: 113013 - DNA, 608 bp, Cannabis sativa
aaataattgccaaaaataataaaataggtaataaaattgtgatgttgttgatgattagaagaagataactttctgggacactttctttctcgtgtgttttgctatgtattataccctgagccctgagcatagctaatagctatgtcatttaaaaaaggaagctatgctcaggcttcaccaatttggtgttgagttcgcttcaatgaaattttgttaaaagcaagattgcaaaaggaactttcaacttcgagtcaattgactcaattcacactcactatatgcaaccctatggaattaggaaaccaaataaataagtacttataaagtaattttcccactaaataataaatttccattctcctaacattattaattatatgaattttattgtatctctaaatatattgataaggttccgcgggcaacattcccatccttatcctagtttatttaagtcactttcccttgttcgatgtgtcagatacttaaagagaaggaacatattgctggaattctttattggaggcttatggaaatgttttcttggcaggtcaactcttctcatgtaatctttttttgggatattataaatattggaatatgatttt

SEQ ID NO: 113014 - DNA, 3472 bp, Cannabis sativa
aactaagcggtctttacatcagggatcgggagagatttaatgccccgttcaggttttttgatgcttggtccagggatccttcttgtcgaaaggtgattgaggaggcttggtatcaggtggtccatgggtatcatagcttcatcttgtcaaaaaaactagccatcacggcgggggcgcttaagaaatggaatgttgagtattttgggttttgcaaaactaaaataagcatgctggagaagctcttgagcgagattcaaaagaagcctccctcacaagagaacgttgaaatggaggggtccattatgatggaattggaagagatggaagcgaggcaaagctccatttggaggcaacaatcccgtgagctgtggttaaaagagagggataggaattcaaggttttttcatgcttcaatggtaattcgtagaaagaggaacttcatttgggtagttaggaatgataatggaatgtggttggaaaatagaaatgacatggagacgtattttcgtgacaattttgggaagattctcatgtcctctaatccgcgcatccctgatgatttgtggaatctgatccccaagtcgattactgatgaagaaaattgtatgttgaaggtcgctccctcgatggaagagatcaaaaaagtggtgtgggagctccctcctttaaaggccccggggccggatggctttccgggtaaattttacaaacaatactgggatgttgtgggggtggaagtctgtaactttgtccaagaatttttccgaacaggcaagttcatttcagatatcaaccgcaccttcttggtgcttatttcgaaaaataacgcggctgctactttcgatgattataggcctataagcctttgcaataccacttataaggtcatttcaaaactcctagccaatcggctgcgaagagtccttgataaggtgatctcgccaaaccaatcggcttttatcaagggaagatggattacggagaatgcgattattgctcaagaagtgatgcatgatttcaaaagaaaaaaaggtcgggaggcgtttgtgggaattaagtgtgacatgtctaaggcctatgatcgattggagtggggatttattgaggcggttctccttgctaatgggtttgattctcattttattaccctcattatgcattgtattaccactgtcagatttcaaattttgcttaatgggggtcttaccaagtcgttctctcctggtaggggggttcgacaaggggatcctttgtcgccttaaatttttattttatgtgcggaggttctttcaaggcttattcttaaaagggaggaagaagggaccttggtggggactggtatttctcgagaggggccaaaaatcacacatctcatgtatgcggatgacactttattatttacaaaggtggatcctcagtcggtggcggtgcttatggaatgtttggataggtatagctattggtctggacaagcgatcaatacccataaatccaaagttaccttttcggccaattgcaatcaacagaggagagaggagatttcgaacttattgggttttgaagctatgggggaggaggagaaattcttgggaaatcctatgtttgtcagagctaaccgcaacaattctttcaaatttgttgttgacaaagtgtcttcccgttttgagggatggaaggccaaactcctttcccaatcagctcgtactgttctcatcaatagtgtcattcaaggtatgcctcaatataccatgtctgtgttcaaattgcctactgcaactctttctaaacttgataaaatggctcgccaattttggtggaaaggggaaacggatgggggcagattcttggctcttgtggcgtgggataatatttgtaagacgaaggcttgtggtggtctcggattgagagaggccaatgacattaatgtttgcttcctggcgaaattggcttggtgtttggcgagcaatagtgacagtctttggtctcagttcctcaagggcaagtattatcctagttccacttttttggaatcggagttacgaagcaatgcctcgatggtggcaagagggatttgggcggttaaacctatgattgcagacaactcggcttggcgagtttgtcctcaatctgataaaaatatttggaaaggaaattggatccttttttattctattggcatatcggtgggtgaagttaattcgagggtgcaggagcggatcactttgaagaatttgatcagagaggagactcttaagtgggattttaacatgattaggaatgttttcgtatcgacggctgtggataaatttcgaatggttaatccggttgatatggcgcttgaggactgtcttatatggacccctgaaacgaatgggattttctctataaaatctgcctactggaagctcaatgcaagtcattttgtattgtctgatttttttaaggatctttggaaaagctctatccatcctcggcataagctgtttttgtggaagacggcaaaaggggctctaccaactggtgacaggttggcggttattttcaataacgattatggctgatgctctttgtgcttggcggatgggggaaacaccttggctcatgtgtttggcggctgtgatttggttagaagattgtggtttctatcacaatggaatatcaggattgaatctttcaatttcagatctggcttggagctggtgcaatggattattcgggcacctttcttaggcctctcccagtctgatgaaaaactgatggaatttcaaatatatgcggcttgtttggttcataatgtttggggcttcagaaatcatgcatttcatcaccaaagtgttcttccattggttgaaatgaaaaagtgtattgacaatgattttgcttctcactggaaggaggtcttgtctcatgttgttgatcgctccctggatgagagcagtcgcactactagcggggcagtggttgaggattgtgaaggcttgttggtgtttgtggatgcaactgttaagaatggggaagcagctattggggtggtggttaaaaatgaggctagacagttgcaagctttgtatgcttgtaaagtgtcggcagtgtctgctcttcatggagagctttctgctatcttgaagggcctggaggttgtggagaagttgaatgtgaggaagggaactctcttctcggactgccagagtctcaccaaagctgtggaggttagaaggtccccaaactggtctatttcctcttctttcgctaagctgctgatggccattgatggtgcgggtgtggagatccgttgggtttctagaagtaataacggcggagcgcatgctcttgcgagatggggactcaaccatgtttgcaacggttttcttaatgtttgggatgtgtgttgggttttatgccctaaataaaactcattacaatctggtaagttatcaatttagaagtgaagtatgtttacatgtatgttaca

SEQ ID NO: 113015 - DNA, 1030 bp, Cannabis sativa
tttttttttttttttgtaatgatggagttttacactctttgttttttgtgacattggctttagactatttttgtgggctttggtccttttagtttgcagatcttgagcttttttaattggtgtggtttgtggtttgtttgatcatttctttataaaatatatgcgactatgttttaacttgacatgttgaattttgtcccaattaatttataaattcaccttttaaaaaaaatagaaattaagcatcaaaagatcttttattaaataaataaaagagacattaatgaagaattttttttgctgatatattttttttttgctgatacataatgaagaatttaaacaactaggttgagttgtaggtttctagttttgttttatattagaaatcactaaaataatttaaatgaacaacaacatgagaagctttcgagggttgtgaatattgccctgccctttggaagttttaggaggtcaaataagcaaataattacatatttaaaaattgatataagaatgacagtagaactactttacaatattttattaggaagctattgatataattttttcacttaattttccttaaaaaataattatatatatgtaagaacaaaattaacatgtatgtagcttatgcaattcaagagagtacatttgcactaaaaatatataaaaacacctcattaaataaaaaatataaaaagttaaattatttttcttaattcattcttatcaattttctttaatgttactttagttttactgtatttgtgttaattttaataaaaatagatatatagttgatgtaaaagaataagttagtagggtttaaaatttttaataggatgtgtcatatgtaataattgtgatgtaatatgccatctttaacgcaagcaataattatgatatttccacatcttagatttcctatctcatttgtcaagccatggacttctttgctttccctgatttcaatgcaaacatatccaaaactataaagtttttattttttaaaacaaaaaaaaaa

SEQ ID NO: 113016 - DNA, 4994 bp, Cannabis sativa
aaagttaacgagaggatcaaacctgttaacatcgttaaatttaacagaatattcttttatttttaaaatatattctattaaaccaagaaataccgttagataggcacttttaatatataaagatattaatcaatactattaattaaaattaaggtctcttatctctatttttcttttagccaactttgaaaagtcaaaatatatatgctttttttttaatttttaatctgtttttttttttttgaatcaaagatggtttttattcaaagacaatcaatagatgcaatacttttaagctcaaaaggagcatgaagctcactaaattcacaatttggcaaaaaaacaagaggaccctctagcaacataatgagcgaccttatttgcagatcgtttaacaaaaattagagacattatttaaagaagagattaaaatgcgacaatctcgagctaataataatccaaactcggaaggcgtaataatagagttttttatagcttgaaccattaacaacgtatcagtctcaattatgacattagcccaccgtttcctctttatccaatttagagcttccttgaccccaattatttctgcaacttcaggttgaactaagccaacacggctcgcaaagaaggccacaagcagacgactattagaatcacgagcaacacacccaaacctgaacttgttctgcgcttcaaaaaaagcttcatcaacattcaccttgactgtattcaacgttggtttcctccatagctcactaacattattaatatcatcaactagcaatgcaccatatttttgagattgagcattcttccattggtcaaggacaactctagctgaccgaactacctccctagcagagcacgatttgttcttccacaacacatcattcctaactgcccaaattttcaaactaatcatggcagcttctagcaccaacacctcactttgagtctctgccacattaaaaaaccagctgttgtagtctccatccataataacagccatgttcacaccagaaacactccaacaagtctttgcgaacccgcattggagaagaacatgttgtatggtctcgacatccaagttacaaaaaggacacattaaatcaacattaacatgctttgtgtctaattgtaccttagtaggaagacaacccgaaacaacacgccataaaaaatgatgaacttttgaggggacatccaacttccataataatttccactccgaccgaaccacttcagcaaccccattaacattacagaaacttctaagtacttttcatagtataaaacccagaagcttctctattccagtaccgctcatcgttttcagctgtatcacaaagtttgtatagagacgatcaaatctctatctcttggcccaaacatatcatcaatcacctccaaatccagcttgtagatcccactgagaactattaaaaaccatttgattaaccaaaccacgatgacccgaaatgacataacggttgtcaaaatctggcaaccaaggatcatgtaagatactcaccaatttaccattgccaattgacttcgcacccctacctgaactagatcttgggcttcaaaaatactctgccaaataaaactagaattttgtccaagagtagcattgagaaaactactcgaaggataatatctagctttataaattttgctgaccaaagaatcttcattagtcaatagccgacaaccttgtttaacgcaagattatagttacgaagatcgcagaacccaatgcctccagcatatttgtgtttacaaagccttttccaactcacccctttattacccaatcttgactgagatttccactaaaacttggacatcattccttcaaggctagaatagatttcttttgtgagcaaaaagacgctcatagcataacatgacaatgcttgggccaccgatttcaacaagatttcctttcccgcttttgaaagaaattgtactctcccagctaaagatctttttctgcattttatccttaaggaaaccaaggattgcatttttatttctccccataatacaaggtagccccaaataaaaacggtaacccgaagcttccaccatgcctagcaattcacacatccttgaccacatagccacactagcatttttactaaagaatatggatgatttagtatagttaacctgttgtcccgacgccatctcatacacatgaagaagctataacacattagaggtttcgttcttattagccttgcagtacacatagctatcatcggcgaaaagcatatgtgaaactctaggagcacctctagccactttacaaccagtcaaccaccaattatactcatagtgtttcaacagagctgataatccttcagcataaacaagaaacagataaggagatagtagatatccttgtctaattcctttgcccaaaattataggacccataacatgacccccataagtgacattgtagctcacggtaaagacacagaacataatcaaggaaacaacacgcctactaaaacccatacgaaccatcattacctcaagaaacatccatccaactcggtcttatgccttactcatatcgagcttaagcgccatcacaccctcctttccccttctctttctcttcaagtaatgcataatttcaaaagaaatcatgatattgtcaaaaatcaaacgcccacgtaaaaaagcactttgcgcattagaaatgacaaaaggcaaagccactttcaatcggttagcaatcacttttgaaattaccttgtagagaacattgcagagagagataggacgaagatcacccatatattctggtagttttttcttgaaaattaacacaatattaattgcatttaaagagacgggaaactcaccacagtagagaaaaatgaccttaccagtgacaccacgtcatcgcctacaacactccagcatttttggtaaaatcctggtgtcataccgtcaggtccaggggacttctcaggatgtatttaaagcagagcatgtcttacttcttcagtagtaacatcatggagcaacttagcattttgctcctcagagataaccgaaggaatgagctctaccacactactgaaatcaacattggtcacctggaagagttgatgaaaatagcttgtcacaaccgaaggaagcttatcatcccaaccaacctaagacccctccaaattttttaacctttgaatcgaattatttcttcttctataggtagccttagcatgaaaatacttggaattttgatccccttcacgaagccacagctgcttacttctttgcttccaaaatatcatccgttgaagtaaaacattactaagatttgcctctacttctctatatctttcaattgacaccgggtcttgacccctcttccaccgatgcacttccgctttgcaatcttgatttgttttaaattaccataatagtcttttctccactccaataacattttggcacaatttctaatcttcttaataatggagctaccagtagaaaaattccatgtgtcctcaaaaaccttgaaacaaaggggttcttgaagccaagaattctcaaaacgaaagacttgtcgtttacctatagtaatcgaacttactgggatcaacggaaaggggcaatgattagaagtagacgcctcaacattgaaaatcttacaagtaggaaaaatatcgagccgttgttgagaaacaagagctctatcaatcataacttcaacccagtcaatcaaacctcgagtacgctcccaagtaaaaggatacccattcagctctaaatcatagagaccacactcttccaatacataacaaaaactattaatcaaccactttgggtactaattaccccctctcttatcttgttgagaagtaacattgttaagatcacatatagtacaccacgacagatcatactcctctcgcaaattacgaattaaatctcaagttcttctctgcaagctcttatttggttctccataaagtctagtgagtctccacttcccacaatcatttgcttcaatggagacatcaatgtaattcaactcatagccaagcaaatgaacctcttcactacaccgccaaagcaatgctacacccccactcttatgtccttgtacatcaaccccgaaagtaccctcaaaaccagtagacacccaagcatttcaacaacatctttccttgacagagttttgcacaaaaagataaagttggctttcctttgaaccacaaaggtccttgatgaattaaaaggcccatagattctcaagcccatggcaattcaaagaaatgatactcataatggttggtggacctttgagccacccaccttgcttaaggtttttgacctatcaccaatagcccccacgtgagccatatcccttttttttgtctctaaaataatggttattcccttatcaatagcattgaccttgtcaccaaaattaactcctcccttaaagtatcaaaagatggttgaattggcatgcttatgctagttcacctttggtatattaattgctcaggtggatactaaaaagttaaactaaagtatttttgtaaactgatttttgatggaaaagggctcttaataaatgaaattaataatatatatatatagtatataattaaataatatatatagatttgtttattatttatctataataatgtcttattatttatatattcattagttttcattatcattcatattgatgtaacatttgttacgtgttttatttattttattgttaggatatggtaaagtttaatttgatcattaattgaagattttagttacacagtaagacactacaaaaaaacgactacttttagtaacaatattttagtcactaatatatttttttgcgattaaatgtgatttttagtcacaacaaaatgttacttgtgactacaatatagtttttagatacaagttgccactaatttagttttagtcacaacaagtattgt

SEQ ID NO: 113017 - DNA, 4365 bp, Cannabis sativa
  modified_base (4309)..(4315): a, c, t, g, unknown or other
aactttttaaaacttagtccgaacgttaatagcgtttttcatttaagggctcgatttttatttctgtgacataaggatggtaatatttatggtatacatgcaccttgtaaagtttggagtgatttggctaagttttggtagtgtttcggtgagtgcgaaaattggaattttcgagtcttgtattttttagaaattcctaagagatcagaaatcgtatttttgtcataacttttgactcgggtttccgttttggaaccaacttttttagtaaaaagctcatcaaattccagaccaaaagaaggtttcgaagtagaatagagctcaagaaagtgtgagttaataataccttcaatatcttttttgtcgttccatactttaccatccctatctttgagggaccatatttgattccttcttctccttatgatagttgaagcatggaaaagctggtattcttatctctaagtctaagccacacctctctagatttttacctccacataatttctctccttatccacacctcttttaattgaccttgaatcttactttcttctctagattcatctgagattggttgattttgaatccattcttctcttttttccaagcttttgatcatttcctaactatttcccataaacgttttcttccaagcttgaaatcctctcctgttactgtctatattgcaaagcagagaaactgaggactcaacatcagagtgagccaagcccttactatttcctctctacatgaggcgctcgaagactaggcttcaaaaaattgaaagggtatgttccctctttttgaaaacatatgagaatccaagaggatgggagcatgacctgagattgtgattgggaagttcagaatacctaggaagggtacctagaaatccaatcaaaggagccaatgtctctatcgagtctctcacgaattatgccaccattgaatcttttgtttttccaggttaatttgttcccttgaaagcgaaggtttacacctccagtatgatcaaaaaaatccagcagccattttgtgtcacggggtttaactctaactcccccaaccttttcctcataactacaaatacaattgaggtctccaataacaatctaagggatgtcacaaagattgacttcaacttccaaacttctccaaaacacctctttatcattctcatgcggagtaccatagatcacaaataacttctaggatagattggtttggaaatcccaaacagtagcttaaaaaaaccatcattgcatatattcacatgaagtttaatatttttattccataacaaaccaaagcctcccgagagaccttttgcattgatacaagcagccccaaagtaccccaatttctttgccaaatcatccattatgctccttttgacttttgtttccatcaaaaaaatacattctggactgtattttattacctaaacctgtgaggcctgggttttcgagtccctagctaggccatgacaattccacgaaaatactttcatgggaaagtggggcttgataatggtcgcctcctcgcccgaataaaacttttgagcatattcaactcgaacctgaaccaaattcaacatatccactaggttcttttgtgcttcaaaattggtcacctttgtaattcgatctttacttttatcttgcgttgaaagtctagaatgagaacctttcttccttcatttatcatttttcaaggaagataatgaagcgtctgatcccatcttgaaaggagtttcaagtggtcccgaggaatatttaggaagctcgagcacttcttgggagaattcacaggtggtttcaactgttctttggacaaaaggaatcaagttgaggctttctttcctcttcgtggttgtggacagtggtggacttggtctaagacatcaataggatcaagaaataaggtaggaattggcttaaatttatcaataggagctgggctcattaattctttagtcaatccaatttcattggcataagtgggctaaggaaagtgggtaggctcaggatatttatgggcttgtctagacttgcaaagttaaacatgtgatttttctaccatttgctcataagtaggcccaatattggccataatagttgtaaggattctagcatcagctgcattgagaaaaggcctagcagaaaattttgaaataatatctttttcagagacagagttgggattacctttcttatgtctgcacataaacccaggtgagactgagtgagttcttctttccctaaaggaaattatgggggaaggtgattttgcaactaagttatctccgtttgatactgctggacaaaatgaagttttctccacaactttcaaattctttcccaaaatagctcttggaagattaccttgaattttgaacactttcttcaatggctttatgttgaggtttgactacacagttgacactgtaagttcctcaaggatgagtcattttcctttgtccttactcatcgtatctttacctaagggtctcctaatcgccggagatgactatcgttcctcttttctaaaccaatcaagctggtttttcgttttgaattagctaaaaattatcgtcttcgcctttatccaaggcccgtaggttgggaccgcctgtccttccagaagatacgcgaaggaaattgggcgaacacaagttttttatcatgtctgagataaccacagatgaaacaaagtcttagttacttgaagtaacaaaactgaatccactcctttattcccctcttaacatctagaaagaagccagatgcaaattgatgatatgtggtaatcttgacttgaaacttcaagaagccccttttgataataggtctctggtttgtagtatcacaacctttatagtccgctcctgtagctgctactggttgggtgttaacccaattgaggtaggggttggtaagccaatggcttgggcccaaaaaaatagccttccccttatcctaattgccattttcaggccattcttgtataattagtagtttcccattaatggtccaaggtctatttttcaaaacatccacgcagtcttcctctaggtcgaagaagataccccaaacccctgttttcatggccttgattttccaatggcccttgagtttccaaatcttgtccaatatatttttcagcgtagaccttgacctcattttccttcaaagaaactagtaagaactctagttttgactatctcagcattgagctcaaagtttggctcaagttctaaggtcatagatttgagaaactccttgcgaagaacttccagttcctctacttttcttccatctgcatcaatgttttgattgtccacaaatccctcctctgaaggctccgcattaatacacgtatccccttgaggtggttgggaggcattaatattactacctactaacaggtccccctccataatcacaaagtcatcattctcaattttatgtgcatgtcttaggttgtcccccataataacaatccttaaagttagagtccaagacaaagaaacttttaaagaaagagatcaactcttgctagaactttaaggatcactagaaaaaaaaaagaagcaaaatactatacttttcctaagtaggaaatagagaagacaaagagaataacaagataaaagaatcttaagaagactaaacaaaataacacaagagaatcgggttaaggcaaaagagaaggagatgaggaaaacttttccttgagtcataggacatataatcaagttgaagactcccactctcttactaaagagaaaaactccccatatttgcctgggacggagcgaagacttaattactaggggagccaactattagtatttttttttaaaaaaaaatctatacacccgtagctaaaaaattgttttaatacattttctatctgtttcgacatctaagtaagtttttagtccaatttttttcatgatcatgtacattatagttttctcgcactatttgtattttttagaaaattttgaatagtttacagtgtcgaaaataaagtttaaataattacttaccacgcgtataagaaaaaataatcacccgttaactttattttcagcactataaacaatttagatttttttaaaaattacagattattcttaataaccgcaacatacataataataaaaataatttagactaagaaactctcctgaatgtaaaaacagttagggggtgtactgaaataaccctttttgaggatatactatagaattaccatactttgtgtaacatatagtatatacacacacacatatatatannnnnnnatatatatactagcaaaaaactatgtgcgaggcacgtatattaaatttta

SEQ ID NO: 113018 - DNA, 1825 bp, Cannabis sativa
taaaagagccagtgggtaagcacactcctatctatagtcgatattttctgaagaacatgttgtaatctgaacttgatgttgaatttatagcaatggtgaaactagagccagagcagtacatcgaaaagccttactcgagactttagcaggtgaattgccaactaactcgatccgtttctcttcaaagctcactaaaattgaaacagaatcacatttgagttcatcaattgctgtgattcatttggaagacgaaaatgtcattaaagcaaaggtattatttgcgtaatgtgccatagtaaattttgcaatggactgatagttaattctcaatttgattgctctttggggttgcacagattctgattggttgtgatggggtacactcgatggtggcgagatcgttgggaatcatagcagctatcgattcaggtcgttcatcagtccgtggattggctgtgttccctcaaggtcattgccttaaagatgaaatgcaccagttcgtaggtacaagaagaagggctggtctggttcctgtcaatgacaaagagatttattggtactttacttgttcttctccttctaaaggtaaatctttttaattatcataaatatccaatgaaccataagaaaaaagccccacttatatttgtatttgacattttccattgcaggcacaggtctcttatcaggagacccaaaagtcatacaaagagaagtaattgagaagtatgccaaggattttcctgagatatatctagatgccgttaagcacacagacctgtcgacattgacatgggctccattgatgttcagatatccatggaacgtggcatttgggaagttaagcaagcaaaacatcacagtggctggcgatgcaatgcatcccatgacgcctgacttaggacaaggaggttgtgcagcacttgaagatgctgttgtcttgggaaggcacattgggacatcaatacaacagaatggaggacttgtccaaccacaaatgggtaaagcattagcggattacgtcgaagaaagaaggtggcgagcaacttggttgattatagggtcgtatttaacagggtgggtacaagaaggagggtctctttgggggttgaagttcttaagggatatcatattttatggattgctttttcgaaagattggtactcttatgcagtatgattgtgggaatctgcctatttttcccatctcaacagaatcagataagatgaagtaggtaatgttaagagtgattcagtctccctccaaatccatcttcactctgagcactttaaatatctttgtaaaatgatgcttttataaataattgaacgagggggcaattgatacatgaataaatatgtggcattttgcacttcttttataacttaggtatctctatatattttagggatttttttattattacattttaaagcagttctttcttttttttacaaaaatccacatacaaattaacggagtaacttaaatagtaactcaaatctatatgacaaccaaatagcaaccacttaagtgaaaaataaaataaaaaatagtatataaagtgattttcttatattttagttcacattccaataactattcttaagaatctccaattctattaagaaagatttatttgtactctacaaaattataaattttaaatgatgctaatattaagaaaaaaaaacttagattaattgtaatactctactagtttaagcgtgttaacgtgatttttaatttaaatgtgtagctcgttgttaatccatgagtttattgaaaatcttgaataattaaaactttatttaactatttataa

SEQ ID NO: 113019 - DNA, 887 bp, Cannabis sativa
catttcttttgaatatcgttaactttgtttgctatttttagaaagtgttaaacactattggtatctaatagtaataaatagtatgtaatagtaatatttcaaatgtaaaattaaaatacctttcacttgaagcattgggagtaaaaaaagcattgagttgaatcaaaaagaaagcttggaaggaagttgtggttgaaacggataatcttacacttgcacaaaaattgagaagtttgattcctatgttttcttattttgggagtattatttcagattgtaagatgttattagatgagttgtgtgatgtctctgtcatttttgttaggcaatctgcaaataatattgcttatttcttgacgcgagcatatcctatttagttattgatcttgtaatcaaaaatagtgatatttctcccgattttaataatgtaattttgatgcattgcgtttaataaaagctgatgaatgttttaaaaaaaaaacaatatagcaaaaattaataatgtaccaaaaaatatgcaaatttggcatataataaatgaacaaatattttttttttctaatgcacaatatttattttatgatgcaaattgacataatatttactatactataagttacacattattttgaaaatgaaagtcatcatttatatattaaacgaataattttgttaccaatctcggtaacagctcaaccggaacagtgtacaaattgaaaggcgatcagggtgagatatagaggtccttgaaaaggaatgagccgctacatttgctgatcattttacaaaataaaagaaaaattacgcaaagtacttaataaattcttgcaatcactaacaactttgccaaacaaggaaagcataaccacagagctacggatagcttg

SEQ ID NO: 113020 - DNA, 6244 bp, Cannabis sativa
tcttattcttatattttcattcctatgttaagtgttcaaccaataaagttgttcatagtttggcttttgttttaggggtggatgaaacttgcttttggtttgaggatttacccacttattcattttgttattgtaaatgacttgtctaattaatttataataataagtattttttctgaaaaaaaaaataacgtgaaaataatatatttttttcttttttgagaacactgtaaaacaacggttcataattttgtgaaaaagtattagtccgcaaaaaagtttaaaatactgtaaatccttatttttattattttttggtatttataaaatagtccctaacttttctcaaagcccaaacccgtaatagagtccattacgaggtaaaaaaagcccataggcccatataacgataagagagcaactggttcgttcgtctctgagactctgcaacgaaccctaattttgtgcgactaccagacaaaattccattttttttttgcaatcactctttcaagtttcaggtatttgactaggatacccaattaattcttatttgttttctttcgttactctttaaggtattttgatttcttcaattttctgtaatctatgtttattgcactgtcagtttagatgaattagcataattgaattgattttttttttttttgctgttggtttttcagtttttttagttaagctctgatatttttgtactgatgtagttttagtagtatgaccatgtagttttcttgtgtttaaattacttattccagaggtaatacgcttatgttgatgcttttgctatttataggtgttttgcttattatacaatggcatctgtatctagccaaccccagtttcggtacacccagccaccttctaaggttctccatttgagaaacttgccatgggagtgcacagaagaggaattgattgaactggggaagccctttggtaaagttgtcaacaccaagtgcaatgttggtgcaaatagaaaccaagcttttattgaattcgtgagtgtgtagttatgtagctttacctgtacttataatctttgaaatcaaattttcctgttagcatctgtggcttgtgatttatttatttattttcttaagaaaaaagttcttttagagaactactatcaacataggttggagaaattatgaagggaatagtgattttataatagaatgtcttgataaaatcaaaatctttagttttaaagcattgttattttgttatgttagttattcaaatagaatcataattatagaaattggtaggtaataagcaatttttatgggagccatactttgcttttattattattaaatgattgtgtatatttgtgcatagaaaatctacaataattaccaattatatttcctttaattatgtttaggcagatttaaatcaagctattgcaatgatatcatattatgcatcatcttcggagccagcacaagttcgggggaaaaccgtctacttacagtattccaataggcaggaaatagtaaacaacaaaactgctgcagatgtagctgggaatgtacttttggtaacgatagaaggtcccgacgcacgccttgtcagcattgatgttttgcatttggtaagcaagttgtttgatttctttggacacttatttggaatacgcttgtgactatgaggatgctggtgttgacatattgtgtttgggttgtaatttgccagtgttttgaaaatttggtttatttgacatgaatgtgaatggatcagcaggcccatgtgaaggaaatatattcgatggcagcttagtgcatcgggagaaagagcgcatgtgtgtttgtctcttttctcctttccttaacaccgcctctttcttccctactcttccttttcaacatcctactccttccattctattagtctaggatgcttgagtttcttctctcttttgcatttctatcccttttcatatatcgcatgttgtgctacattacaaaaaaaattcttttcgtttgttcagtgtgttgggacagttgtttttcaaacttttcccatgttaaagatgtgtgttttcattgctattgttgctgaaggtctgcatgtagacgctagagctagtcacacctaaatactgttttagaagataataatatagtaattttttcatcagaatgatgaaccaaatgtttatgcaatctacttcttgctgtctcttgtggttaaattgaaggaatttgtatcattcattggttttgaacttaacttcctgtccacttttattcttcgtatgatgacatatctatgtctgtacagtagaatatgttgctgcagtagcctgttttaagtttttgaaatattttgatattttagtcttcatatatttctgaaacttttaagctttgcaggtcttttcagcttttgggtttgttcataagattactactttcgagaagactgctggatttcaggtgtatattagttgcctttctcttaatttttgtttattacacttaaggcccttaagctaatttcatgtttctatgtttaggcactagtacaattctcagatgctgaaactgccacttccgcaaaaaacgcccttgacggaagaagcatccctaggtgacagttgtattacttgtttgacatggtattatgtccaactattgtggaccacataatctatcaagattgtgggcatctgttttcttatgctcactttcacccactttgccttgatacttataaggcttgtttgttttgtcagtacttttatgccatattagcttctctttccttgcttgtaactgtaactttccaagtgatccaatcctaaagaaatatcttcttattgggtcataaattagcattctagtatattttttgccgttatgcaaattttgcgcttgattgttatgtaatatgcatgcttaatgatctgactactatcattgttttgggtgtcaggtatctgctaacagagaatgtgggaccatgtactctgaggatcacgtattctggacacacagatctgagtgtgaaatttcagtcccacagaagcaggtactcaagatttttcatgccatctggtgcctgtgtgttaatgccgtccgttttagaatgtaatcctgtgttgttctgtatgttgtgatcctacaggttgatatattcttgtgaatgcggttttttcctattgctatcgttttccttaattctaacactattggaaatatatgtctcagggactacactaatccttatcttccagttgctccctcagctattgatggcagtggtcaggtatcataatgaatgtgtactcttggttctatttcttgttggaagcagtaacaattggatacagaaccaaacttgaatttgtatctctcaaaaagtggcctaaacatgtcattgcgtcatgtgccaaacttgttaaacatagtttgtcttgcattttttgtttaccaaattaaaactatgcaatttgtttttctctttttaaaccgatggcagtattgtttcaacttttagatgcttctgattttgtatattcgcgttcaattaatttcattttttttagttatttgatggtattcatcaaccatgcgtgcagctcactgtgggtttggatggaaagaaacttgagcctgaaagtaatgtgctgcttgcatccattgaaaacatgcagtatgctgtcaccttggaggtgttacacatggtatgtcttcaagcagtttgaaaagctttattattgtagcgtgccttttccattttacgtgcatgcatagaattttagggagcatgcttttatcgaacttggactcactttgcccctcccctttggtaggttttttcttcttttgggcccgttcaaaagattgcaatgtttgataagaatgggggagttcaggcgttggttcagtatcctggtagtttcattcatcctcgtttatactctaatttaattgttatattaattacttacataaaattattggtttaaatatgtcacccttttgtcccaactgaattagttgttgccttgaatgagttagttgaagttttaagagttgtttcgtgatgctatgggtgcagaaattcagactgcagttgccgccaaggaagccttggaaggacattgcatttacgatggagggttttgcaaactccatttatcatactcgaggcatactgatctcagtattaaggttgactagatttcaacatgaatatttgtttatttagagagttctttgctcttaccttgagatgtttgccgtttacaggtcaataacgatcgcagcagagattatacactcccaaatgtttctactgttaccatggtgaattcccagccatcaattttgggtcaacagccatctaacgtttcaatggtgactaccaatcctcctcagtattctggggctcagtatgcaccaaccgagcaggttgggatgccacagcctttggctgcatggggtgttgcagctgctccacccgcgcctcagtccatgccgatgcccatgcctatgtccatgcccatgcctatgccgatgtctaatcattcctacatgcctcctcgatacgggaacatgcctcctcacccaggaacgatgcacatgccaagccacagtggcctttcacagacaatggtataccgccctgatcatattcaataacttatacctctcaaaccgattccatgtgtttaaattccggtagacttttgttcagtgaagtaagcccacagcactagtaatacaaggagtgtggaaatcatagaatcctcatttcaactttgttatgttttttcctttcccaagtttgcttatgagattctatgagcagagtgggcttgagaactgagaactaacaacttgttaagatattgttattttgttatcatgactggaaattttcttttttagaggtaactaatttaaaggcaaataaaaaagctttatttctctattaatatataaatttatacattttcccccttcggtgttatgtaaatatttgtctatttaaaatttaagaattggtagaaggtgccattatttaagatattatatcggtaataaaataacgctttcacataatttaatttaataactattataaaaatattactaacaatttataaggtatcacttttaagtagtgctagacgccaagggtgaacatccgatttaatttaatttttttttctcatctaatccaattcaatcagtagctagatttagaacattattatccgatccaatttaattagacttcaaaattcaatctaatttaattagtaattgaattagatcgattttttaattaaatattcaattacacttaaaaatataaagaaaaatacgtaaaaattaaatatcaccttttatttaaatttaataatttataaactattgtaaaaatttacgagtcctcaaagaggacttgccctaaaggcatttttacaaatgacctcttcccatttttatcagagagaacaaataaaattgactttaagacaaattgttgtcaaataacaatgcttcatcggaattgatattatttcccattatttagtggcaagcacacacacgattccttgtgactttggtttggtaacaacaattattttggtcttttcttagttaataactcataaatatcaacatattgactttattcagaagcaagcttttttccttttgttctcaattacaggtcaatattgaaactgaactaggatagtaggataggattaggataggatagaataccaaatacaaagaagctcaacaagaatatactatatatacgatgacatgaaattatggccttattctcagttttactattgagtagtcgaatccgaacatctatgtaatggatattaacacatttatttatagttttatacccaatattttccaacactaaacatcactgctactaattagctctaactacacattttcatgttgtgaaattacctcattaatgtttacctagggttgtttaaaaaaattaacaaattgtcgtacttgaataaactgcccaaaccaaactgaataaaccgacaaaaattataacttgaataactttaagaaaaattgaaaccgtccaatgaatatattgggcggcccaaataacctgaataaattaaataaaccgatttatatatttttttactaaaattatttataacctaatatataaattacgtttaatagttaaactattttacatttaa

SEQ ID NO: 113021 - DNA, 2956 bp, Cannabis sativa
tcttatataattattggtattttaaataaagtgcacacgcgtggcgtccctgttggacagggcgttacaatttggctttcccagccattttcccccgttttgccatagcaccggcgaatcaccgaaagagagagaaaagcagagaaaaaccttctaattatgttatcataattcattcatacttgaatgcatttccctaatgtttggctacccaacaagaaatttactaaagaagacattagaaatttattgaagtttcaaagaacctattattgattacaagcagtataaaaataaatcaacgacattattttgaaaaatatccagagctgctccaaacgcctaaatcctattcctctacttcttatggcaaatatgcaagcattaaaggggaaattcataatcgaccagatatgttatcatgcaaagttgttcatccagctgtccaaaatctaaacacattttagaattatagaagtacagatgttacttacgtgttgaaggcaaaagtcttagggaaggaatttggacgctgtgcgttggccgtagagaaagtcacgtggtaggaggtcatcaagacacataaccctagaccgaagagcacgagtttgatttataagtacttcaatcttagcttgaatatttagtggttctgacgaatttaaggaatcaattgtgagaactgggggtggtgctcctagttttaaccttgaacaaattcgatgaagaagatgcaggcactcatcgaaataattggacattcaccaaaaataattttttccttttctctctcagaaaaatcaagcttggaatgtaaaataggaaaaatttgtaaagagataatttatagaacaaaaattgtgatccacgtgcccctaaatcgatgactcagattacattcaagaaaactcaaattgcatctgacggtttagagcaaagaaggattagcattaaatgactattacagaatcgaggtaattttaatgatgatatttgccttcgtacacccgttgacattatatgccatcattttgcaagtttaggcttcacacattttttcaaggcgaataatcttcatgagccaagagaacattgccacgtgtaagtgatattcagaaagcgcgaagttgtcatccattacatattggcttggaatttcaaaaagtccatacctttttgaaacatccacatatcctcataccatctggaaggaagactgtaagtttccacaactcttaagttccaaaagcttggagggtaaatattcactacaagaaatgtgacttttgccagcacaaaaagttggtattgcgttgggaaaatataatttacttgtgatgtattggcaaaagggggttggcaaatcaatgttggtattagaacttttgtcagcataaaatgaaaagcgctggcaaaaatgacttttcccagcgcgtaaatgtgctgataaaagttagattttagccactgtaaatgtacgctggtaaaactttgacctctttgccaacgcagtttgcgaaatgcgctggtaaaagtaacttttaccagcgcagtaacgaactgtgctggtaaaagtgacatttcttgtagtgattacccgtgtttttagaagacggacacatgtgtacttctgagatctaaattcaattaccaaaggcccagtttatatgcttaattaggataatggaccaaattcgttaagtcgggccatccaatttttggagtgatatctcttatctcatgtagacgacaagaagagtccaatgaagagagcatctggatacctaccaacaatacttccagaaagatgataaatcaacctccatattgattcattgcttatttaatattgaaatactttgttttcgaagttaattccaaaaaattaagcattctatataaggaaatatggtgattgtcaagagtcattaaattacatttattacatgcgaaaatgacacgcgttttctacctgtcaagattccacgtaagcctcatgggctaggcctcatcaaatcaacccaattgtcattatatcatttgtatttattctattagtgggccacatttatagagaaaccctaagcttatatataatgataattcttcatgcaaaatgttcagaattcatttcttacaagctaggacaagaaataaggttcataaatagtagacaaacacttgtgtaatactcaaagacttttctagcgaaataatattgactcgtgaattagagttcgttaatactcgaactacataaaaaccctcgtctacaatctctatattttatttattttctttaactttattatatatatataataggtttcaaaaatcttgctaaacggttttaaaggcaatatgtttcaaatttttaaagaattagccaaataatgagcttccatacattaacttttttttaatccagtcttcactaaattaatttcgaattgatgtactgaattcaaattaattatgttttgccttttcctttagggaaagatgatcaaacagttggcctttgcatatcggatatcatctatatagtacatacattatttcttacaaacaagacctaactagaataatagtgctctaattaaatgtgcaccgtaagcaccctgctcaatttttttgtttattttctcactttccctcacttcttcattttttctactttaattttattatttaattaaatgtatttttctaatttaaaattataatatgtataagatttaaaaattggtatatatttgaattatataataaaatagaaaagctattagcagtgatctagatcatatcagccaagatttatattatgatgaaaaggtagattgcacatatatatgcagagacggacctactcttatcaatgtgggactatagcccccactagtaaaaatattactttttaaaaaattaaatgtattttttttaatttgataattat

SEQ ID NO: 113022 - DNA, 6894 bp, Cannabis sativa
  modified_base (57)..(66): a, c, t, g, unknown or other
  modified_base (6784)..(6794): a, c, t, g, unknown or other
tcgttttagaaagttcatatttattgtgttaatccacatacttgtgagtagatctannnnnnnnnnaaaataatttccaacatgtactctggttggttgcacaatgggggctgttgctgagctagagatccctggacggccccccacgctgttggttgtcgagatttggctatttttgtcatctgacctttgaggaaaggtatgtcctccctctagtaagggaagatctattctagttcctgagcaactgggttgatgtcttccttgaagtggatcggtctagagatcctagcctcgtctatcagttctttggttgaaccgtcttatcagatcgttggcctctaagttgtggcaatctaactctgcttcatgagatcaaagaatttattccaggtcatccatccatcttaagaattcatgtctctactgagcaaaaacatcacaatcagtagcacgtggttctttagttaggcctacacggcctacagcttctttgagtttggctaactcaagatcttctcctaagtccagatggggcttgccaatcgcaggctcgccaactcttgggcctatctttctagcatagaactagagacaagatccatttgtttttccaagggttgttgcctttgggtccttcctttagtaggaggtgccaatggtgggtgttctcttagaggcaggggcctcccacttggatccacagggatgcctgtatcagtttggccacttgtaatggccagattgttggcgattgttgtggtgataggatacaccacatctaccttattgatggggattcaagttgtgactagaacctgagcgtctgtacctgtagtttgtgtgtcttgaggaagatgtgaagatgcagattgtgcgacaggggttcttcttgtgttaaccatggcatttgattagatacgatatccacgctttcaatcaaaacaccaacctgttgacctcatgaagtgatcaaccgacaacaagttcgtatagatttgatgcttgccacgtgttgcacaaataagaccgaaaagtagtaaacacatagattttttatagaggtttgacccccttgtgatagcaggtaaagacctactccccttttagttatattaaactcgagggttaatactatccagatcactatagatgggtgttatactcgaaatttggctatttatgagaagctaacatgtgtactataaaaggaatatgaatcagctgaatgatcataatattaaattgcattattaaattcgacttaaataactagtctcaattaattatggttgatagaaatatttaaactcgcaaccacataaatatgtgcgagataagagtaataactattaacagatgtaattaacgagacaatatgtccatctcacgatagacaaaataaatgctagaaatatacaagatgagacatcaaggagcttacaactcattgacccacatacttggtaataagagcttgcaacttattcatccacatatgtgtacattaagaaaataactccattcatccatctccccgtttacgtgacggagtaacaaagtcacaaatatcattacaatatgacaaacactatgaggagaagtatattcatacttagcatcttttcctataaagacggtgaagaatgacaactcacattaagggagaaacaaccttcttagtcagcataatcgtttaaggataaagacaaagagcagttgggtagttattaagtattttttacatgtgcataaaaatgaaacatggggaatgtccaaatttcatgaagagttgtaaatgaacaaattccaataaaaataaccgccatcctatacacctagaaataggggtcgaatcaagggaaaaaggatggaaaacttgaggaaaaactactttttacatttatagagagaattgtattatgtatccagagaaatatccctaataagaaagactcgtggagtatgtagattttaactacaaagccacgtcaaatatctggtgttcatttattattataattaaattttgtagtatatttattacgtaaaagacttatgtatttagttaacaaaaatctgcgttaacagtttgatgctttcattgagagccttggtgataaaaaccaagaaaaatccgtccttataagcataattacacacctatatctatggtagataatattccttatgaaggaagccatccaaaggaggctacgcatcgccctagaaaagaagctcaaggatcgcagagaactaacacgactgaaacaccgcgttttgggaggaatgatggaaatttcaatcttgttggtgaacagatcacaaaaagatgaagtgaagatgcttatgatccaaccagatatttcccactggtggaactagaaaataggcaactttgaaaatgcctggctgaatcgaaccgaaaaaatactaagttggagcgagaagtcgcgacagccagggttgcacagggaaccattctttaaactcaacctgatccatcgataagtagaccacgaggaagacctttatgttccaggaccaacacgcaagagaataaccaagggaatcccacaaaagctcaggaagatcaacctagggatgtgagagatatcctaattaaaagagaaaatctacccaacacaagtaatacaagcaaccaggaacatcgatgagcttctctcggaacttcccattggtttgtaaactagggaaatgaacaaactaatgagccagagtcgtcttgcatgaatgcagatgtaagacagccatgaccaagaaactaggaaatccctcgtaatgatggaagaaatcctagaaataaacatgggtccagtcgactcctgtgacatcctcaaagggcttctcgcacaaataaagagaatacacacacatacttgagtaggggacgtgtctcaaatctcttttgtagaagaaggccattgtgagatgagacatgtgaagctagttcaagtataggagaatcacaatctcacaggcatagtagttgaactagaactaataggaaaacgcgagacaagaatagatattaagattattttactaattaagaaagtatgagtaactcgcgtagttaccagtctgaaagttattcagggactagatcgatgagtaattatgatcagaggggtcgtgaacctaacctccacaaacacataaatcgaaggaaaccagaccatcgtgagcacttaaatcgaaatgcacctcatctgcataatcaacttaatcaaaacttaaatcaacaacctgtggatcccattcaattgcgagtgatccaattggaggaaaagttttggaagtatcaagatggagcatatggaaaactgcaaggatatcaattagatgatgaaattgaaccatttcattctgatatcctaaacatcaatcaacaaccaggagaatcccttaaagtatacttgagtcgcttcaatatagctgcaactaaagtgagaaatttgaatgatagcattcatttaacagtccttcaggctggaattaaaattgttttatccactacagggggagacttatgggatgatttgcaggggagtcctctaaggtatattaatgaattcaatgaaagattatagatttttttgcaaaaagaagaagtagggattgaaatgaagttattaaagtaaggctcaggatataaacccagcactagtacagcaaccacgagcactgtgactacaaaggtagaaaatccaaatggttcaaataccaagagcaaagacgagtcaagagactcatccaaggataagaagaaacaaaagaagcatgagaagtatgtaactatttattcagtgtatactaaattaaatgagactcgcaaaaacatctctctcacgaatgaaaattaggtcgaattttgtagactagaaccaatatgacatgcgaggaataagcgagatccaactaagtgttgtcgcttccacaaatatattgggcatataactgaagaatgttgtcaataaaaagatgaaattgaaagtctaatctcgagaggatattttaggcaatacgtgaggacacaaggaaattagcctaatcaacccaataacctgaataacccaaggatacaacctcctcctatggaagggaggcatatcttagttatttctggagggttgcacctcgcagaaaacagcaatagtgcacaaaagatgtacattaatgaggttaaaaataaattatctacatttgctctagaacctttgaagaaagcaaagtcagatgaactgccaataatcttttctaaagaagactcgaaggatgttaggtaaccacatacagatcctcttgtgataacaattcaatttgccaataaaagaataaagagggttctcgtggacaatgtgagatttttcaacatcctttataaggaaacgttaaacaagatgggattagaggaagccaaattaagacattgtatggtaaatttgtgtgggttcgaaggtgatagtgtcacaagcctgggtatcattgaagttcctttaaccatgggggaatcaccgctgtctgcgactcaaatcaaagaattcttagctgtcgacatctctttcgtctacaatgtgttgaggggtcgcccagctttaattggactgggaccaataagttcgattaaatatttatccgtaaagttccttacacacgcagaagtggggactgttaaaggcgaccagttgttagcttgagaatgttatagggtggaactcaaaaatagaagagccagtcatcaactcattgtaattttgactgaagaaattaagaaggaaacaaaagactctgatcctaggatccatgatgttaattacaaactcaagccaattgatgagtttgaagaggtgaatttagaccttaacaatcccattaagtatgtttatattgggaaaagtttgggggaagaactaaaataacaattaatcaatttttgaaggcaaacaaacaatattttcttggagccattaagatatggtcaggatgaacctgaatgtgattttccatcacctaaatattcaccctgatcatctagcaaaacgtaaaaaatgacaacctctagattttgagagacaaaatatgctcaaagaagaggttgataagttgtttactaataaattcacacaagaagcctttatccctcgtggatatctaatcccatactcgtaccaaagccaaatggtacatggaggacatgtatggatttttcagacttaaataagacatgtcctaaagatttctttccactcccaaggatcgatcaatttgtagatgcaacagcagggcatgaatggatgactttcatggatgcatgtttagggtataacgagaataaaatgcatatcctagaccaagaatatacaagcttcgtgacaaatatggggctttattgttataaagtcatgccatttggattaaaaaatactagagtgacataccaatgcctcgtgaatggtacgtttgaaaaccaaataggatgaaatatggacatatacgtcgatgacaagttggtgaaatcagtcaaaagcaaggatcatacagaggatcttgcagaatgttttgccataattagaaagtatgatatgaagttgaatcctaaaaattgttcttttgggtttcatcagggaaatttttaggtttcattgtgaatgcaaggggaattgaaactaatctagttaaaataaaagcattaatcaagatgcctttatcgacaaagccaaaggaattttaggctttaacgggaagaatgacatcactcaatagattcatctcgaaatcattcgatatatgcctccaattttttaatatcttgcgaggcaataaatagttcgagtggaatgaagagtgtgaggaagcatttaagggaatgaagaaacatctttctacacctcaagttttagctaaagaaattactgtggaaacattattcctttttctggctatctcaaaacattctaaaagtgcaacattagtgcaagaattgggcaagaaccagaaacctatttactatgtcagtaaaaggttactagggatagaatcgtgataccaacctctagaaaaactcccactctgcttgattcatgcatctcgcaaattgcagccatattttatgacaagtactatcgaaatgtgatgcatgaggaagattaataaaatagtcaattgagctaggacagttcgaagtaacttaccaccaagggacttcaatcaaagggcgggcattggctgactttgtgatagaagtagttaactcaggagaagactccccaataggaaatgaaatagaaacatgtaaattgtttattgatggggcctcaaacgagaatggctcaggggcagggggaatagttgtttttgccagaaagcttcaaatacaattatgcacttaggttttagtttgaaacttaaaataacgagccagagtatgcactaaaagtcaagaatataatatgctttagttactcgcagctaatagtgattcaagtcttgggagagtactaagcaaagggcctaaaaatggccaaatacatagagaaagttcggaagaacttggaaatgttcaattatttcaaaatagaacaaattccaagagaacaaaactctaatgcaaatgcccttgacaaaatggcttctgagtttgatcttgataagttgaacttggtccccatggaggtactggacgagacaagtatatgtgaagaggaagatgtcaacatgataaatgtaaggcgtacatggataatgttggaatttattttannnnnnnnnnngatctactcataagtatgttgtttaacaccctaaatatgaactttcttaaacgataaataaacacatataaagttaagaaaaccttagattggttgcagc

SEQ ID NO: 113023 - DNA, 4371 bp, Cannabis sativa
  modified_base (3846)..(3869): a, c, t, g, unknown or other
ttaaaaagtacaaataaatacaaaccgaattagcacgacacgcaccaacttaaagcaccacactataggattaccattcaacaattaattaattgtatctcagtctcaccatcttgttggaataggatcaacatggcgttattatcaactccatatctcattggatcccttctcataattcaaataacatttataacattacttgtattataatgaattacagaagaaaaggctgttctgttctgtgctgggagctgccaaataaaattatttatactttttctttcttctttacatattgtttatcctaattaaacattttgtcgggtcttcatgctttttcgttccttccttcttctaacgcccaatcaacggcgctcatgacagagtaactgcaatggtagagaactagcacggaatcctcctccatgttcttcatagacagaaggcatatggtgatcttgtttagtcattttgccagcaggaaacggtgaagacggaagggacatcaaatgctgctgctgatgttgctgatgctgctgctgctgatgatgatgatgttgagtagtagttggtccattttgccagtttgcgattttactcgtcgttttgggagtgtcatccggcctatagtgaccactccaaacttgttgctgttgtggttttgttaagcctgctgagcttgcttgagtatggtagagaaggttaccatatggatgtacctaaaaaaaattcacgtaggtttgtaatgtcactcgtattaatataaacaacaaaaaaaaagaaagaagcagaacaatgagtgccgagtcataaacctgccccgctgatgaaatatggtcaaggtaagctgagttatgggaagactgggggtggaattgattttgcacgagtgaatgagggtaaggaacttggagtggagacaaagacaatggctcaactacgtttctagttctactagatccagctgacaacgacaggaaatcgaaactcctctggaaaaaagagagtaaacaatgagaagagaacaacacaaacaagataataatgataaacatatgttgtttatttaacgcacctgcttctgcagtggctgatcttgattgaatctttgctgaagaataccattgttaactccatttgaattagttttattggcaacagcattagtgacggtgggatcagaaacaagtccatttaaatcatcattcttttcaccatacatattgttgttaagggtgactgcaaccccttgttttaatccttcttcgtgagatctcttttgattttttggcaggctcagcacgtcttcgtatccagactttttcaaagcttgaattaactgacttatgtacacatgagttgcacatctcttagatagtcttcttttaacgggagctttagaaacctgtatgtttaatttaataaataatcaaatacaatctcacgtagcttatgcagacattctaatacaaatgaattgacaacgtcccacctttctaattgactgattttggaccactgggttagttcttggggaacaagatggaacatcaagccaagctggaattttagcagttggtaacctgcaatagtaaaagctaaattaaaagggtccaacataatattacaagagtaaacaagcaaaagcacttacggtgtacatgtatcattaactctagcaccttgtgaaatggttgatgacggtccaggcaatgatcccattccttcaaattaaagaaggattcattttaatttccaaataatgatgataaaatgtgtttatcagaaagaccatatacacttaccagctttcttggagctcaaaataggtgtgttctgaaatggggtaccataaactacgttcagatcatagtcaaaactcaaaaaagaaaaattgttctagatcaggcgaaaattactaaccttccccaaccaaatttgtttttccttctccataactaagggatccttttgctggggttgcttaaatctgattgagggccaaagaaacatattacaaaagaagataacatcttcataagctgaagtgtgtttcaaatgtatctaaagccactcacctagtatctaagtgaacctcagagggaatacgaaacttagcagaacaactgttcaatggcttcacattcaactgttgttcactcttagggacataggattgtgtgaacggattcactcgaggaacataatcgtcaagcgaaattgggttcgattgactatttggtttattcgaggaatcaactttaaccatttcatttaatttgtcagcactagatgagggatcatctttagtccttaatggaagagtcgagtttattacattatcctttgctgcaaaatcaaaacacactataggagttaacagacaagacatgtctacatcttacacaccaaagacttaaaactacacaaatcaatttgttataaccttcaactgctggctttgactcaggaaaatttgaaggatttggttgtaaagattgagtgtctcgtttggatttatcatttgagttgttgttggagaacatacgagccaaggcatacaacgtttcagccacttcttcctcatcttttgtgattggcatagaaactgttggtttgtttgatactttttgtttcttcaaaaccaaaaccaaaacacatgtaaagttccatgtttagaactgtattaagatacaaagaattgaaagcagaaccagtttttttaatttaaagtaccaatattgacttgggtttcttaatagcagacatttcttgtgaatggattccagtaatggtatggattttcttcttcgaatctgataaaggaggagatacagaatcacgaccacgcttcttcatagctgcatacaacgaatcaagaatgaattttttttgttgttgttacattttataaaaacacccccttcatattcactatagaatatctcctttggaaaagtaagagataaaaaggaggaggaatcgataagactataacataaatatttagtatttacacaaacttcgaataattgcaccatcaatcaaagtcatagaatccacagcatgtttcttatttcttttcttttttgaaataaaataaaataaataaattacacagaatctttttgtttttgtccagcgaaacaaataaaaaaagcaaagttcattatttatttattttttttttgctgaaaaaagcaaagttcattaatgctttagtcctaatccagaatgaacagtaaggcctattaaaaatattatatttatgaatatagtaaaaaaaaacatctataaaagacgatactcttccaaaaatatgcagagaaaaaattatactgatattacagtctccacacacacctgaccgtagctttcggggaacagaagcctggccaacgccgtttccgtcgtcagaaaactggacaaaaaattgaaaattgagaattaaaaatacataaaaagaaatggaatgtatattttgtttgaaaagaacaagaaaacttgttactgttgggattactaacctttttcgaaagttgaaatttgttgctagcacttggactgcgtagctcatcttctttatcagatacattaaaacccatctcgcaatcttcttggctggaactcgatctaccaacaacagcactcaatttctttaccttttctttcttcgattttaaggaagacaagacttcctcaccaccaccatccacaccttcaaatcagaaacaacaaacccaataaaagaagagacacccattatctgcgaaactcttatcagtaattgaacgaagagaatgtgcagataagacaggtattatatagatttttttttttttnnnnnnnnnnnnnnnnnnnnnnnnacaaacaaacaaacaaacatgaaagttttctgaaaaagaaaacaaaaaactggattggtcgagaaaagaggaagcattaagtataaattttacagagtttatgtgtggtatgtttgaaccgagtggctccacgcctcacgtcccgtgctttgtccatatttgggatgacttaaaagaatcgtctaactcaggaaatcgagcccgaaagaaaaacccagatcgttatttttgtatatgggttctccaatttcagcttcttcagtcacagaagagtgaaacaaaaggttagagacgaagacgatgataaagaagaagaaaaagcagagttggtaaaaatgtttcgttatgtgataagagacaatgaaattgcgtagaagaggaaagtgtacaaatacaaggggaatgagagagaaaggaaggaaataccaaaaaaaaaaaaaaaaatcgattcggaaaactgaaaaagggggtttgggttttacaaaaaaaaaaaaaaaaaaaa

SEQ ID NO: 113024 - DNA, 1140 bp, Cannabis sativa
acatacttgtgagtagatctaaagatcctggtaaaataaattccaacaagtgcctagagctagtaaattgccaaaatagggaaactagtctctgaatgttgggaggtggtagggagagaatgtcctggacgatgttcttagaaaagaggtggtcaattctgttaacattccaatttcctatgtcaaggataaggctagagatacgagtctggtctgagttctacgatgggggcagaaattggcagtttgggatccaggtgtcatggtagattctaacagtatccccatttccaattttctaagggagtcctttttgcagagggtttttctccattgaagactactccaaacataagatggggagtgacccaactgggcctcaaggaaggttaaatgaggaaagtatttagatttaggaagggtggctaacagggatatcaggttgagttggatacgccaagcttgcttcgcaagcatagcttggttgaaagaggttacccaagacctctattgaacttggagttacaaagatttctaatttttccaatgaattttcctttgtccctcttttgtttcccaccagaaattggccatctctctttcaacaaatttgcaaaaagaagtgggaagcttgaaaactgacataacataggaaggtatggactaaatgacaactttcaaaaggatccaccacctttagagaatagtttacgttttcatttttcaagataggcccaaattctatccttaattaggttaaaagagtgcttcttacttctgtcaaagaattgtagcaagccaaggtacttatccaagctgttggtggctagtatgtttaagtaatcttgaatgagcatttgataagtttaggaagtgctgggagagagaaaaacagaggatttgttaaagttcacaagttgcctcgaaacagactcataggttgcaagagtgtctctcataggattgggggcttgaatgttggacttgcaaaagaggataatgctataggcaaaaagaaggtgggaaattctttgggcagttctggcaattttgacttccaccgctctttcctccacttttgcttgcctaaggagggtggaaaggccttcagagcaaaggagaaagaggtaaggggatatg

SEQ ID NO: 113025 - DNA, 3392 bp, Cannabis sativa
  modified_base (3365)..(3366): a, c, t, g, unknown or other
agttcatgtatactcaggattcatactgatctactaatgatcatcgttttgatatgaataactctttcatgataaacgacatgttgatgaaagatgttattacacatcggtccagttatgtataatcaaattatacacagtatccatatatgtgatccgaataaaaatcacacacactagagtatagttcatagtaaattgtatttagtagttctatgttaaagatcgatttactattcattatacttctacaatgcaattataccttctctgtacgaataaagaattttcagatatttatcaattgtacttctacattaacatatttatttatcttataattacattttatatgttttataatatattaattcattaattacttacttttagggcataaatcccaacaacccagacccggacctaggacttgaatcctaacccagacgcggatgctgacccaaactcggacctagaacttgacttgaactcgagattgaacttgggacccagacccgagacttgaactcgggacccagacccgaacctgacctgtagtcggtgttggggtcaagtttattgaaaatatattataattttgcataatttattaatacaagtcaatatcaaatgtagtgttgtattaaataatactaatacaatataatataacacaatctaatataatccaacacagtaccctacaccccatggtatttgggatcacatactttaaaattcaataccctagaccccatgatttgttactctcaattgtgtgtaaataggcttaaactggttatttagagattatagaaactattagaaagcatcctcaatattcatataataaagccaaataaaatagcaattggttgctagtcaccagtttttttcaacttttgtcaataaccctctaaaacattcatattcatttccaattgattttatatcacttatacatattataagtgataaaagtaaccattcaaaaataaataatagaaataaatccccaacatctatatttttattataactttaaattttaaaggattaagttgtgtaacctctgtttacataattaacgataatgtaaaagttacaaattgtaaataattcaatctcataagttataaatatttacacttaattaatttgttacattatatatttaatctacacattatattaattaataaataaataatataacaatttttatatcaatggtgttgtgctcaacaaaattgaatgaaatctctccttgctcacaatattcaaggattggagatagagcattggacgaattctttggctaatacagttaagataaatgttgatggggctatatttgaagcagctggttcttttggctttggttttattgcaagagactctaacaccaggccaagttttatctgagattttcaaggcaagtgggatcaaagaggccctcagctggattaagagtaaaaactggcaagatgttactcttgaaacggattgcatggtggctattcaagacatcaaaagtaatgtccaaatgtcatctgctttcgggtttctagtttgggattgcaaacagctcctatttgagttgagtaatgttaagttatattttgtcaaacgttctgctaacaagattgcgcatttttttgcgcatagcgcctgttatttgttagatcgtattttttatttcaacaattccccgtcagagttattagacattgcaatggatgtttctttattttaataaattaccatatttccattctaaaaataatcataaaatttgaagaatttttgttctttatattagttcttctattaaggatacacataaaaattcatgaatttaaaataaacaaaatagtgactacttattattcaaatgtaaagtagcaagagatattatgagattacccttatccttgtgttagttacgatacagttaaaccattcttgactcagttagttaggttattctgggactaagctaagttagttattcctctaactaactcagttaatgtatgcctatatatatgcatgtacctgtaaatcaatacacataataataataatacaagctttaagatttttctctattgcactctatttttttcatatggtattaatagaaaccttgaccactgcatcaatggggagaacctccacactctctcaagagggtgttcctccatccacaactgagcacaatcaatcggagtctaatcctgatgccttttctgcacctgtagtcaatacctctgttgctccacgacaaattcacaattctagatcgcgatctcagatcgacaatgacatcctcgaactagctcattcttcttcagatcctctagtcggtgatcttcctcaaccttctattcctatacgtcacccttcgactctcaatcatctggctcatcaagatgtctcgagccctttctttctcaccacagcagatcaccctagcttaattctggtttctaccattcttaatggtgctaactatcaatattggaaacaagggatcataattgcgcttacatcaaagaacaaatcaacattcgttgatggcaccttcctcgaccagcaactggtaatcctcttctcaattcttggcttcgttgtaacaacatggtaatgtcttggctcgtcaactctgtttcttctgagatagcatagagtatcatgtacttcgatcttgccacaaacatgtggcatgatcttcaagaaagattcaatgagggtaatggacctcgaatcttttagctgtaaactcaactcacacatttgcaacaaggtaattaattcgtcacctcttacttcaccaaacttaaatcaatttaggatgaattaaaggaattccaaccaaacactacttgcacctgtggtgccatgaaactgttccttgactatgacaatcaaaataaagttgtacagttcttaactggtttgaatgagttgtatgctttagtatgggcttaaattcttctcaatgaacctatccccaatctctctagggtgtttgctatgattgttcaagaggagaggcaataaactcttggctcctctgatctgtcctccttggaatcttctattcggcccttttcttccaacaaccctccacgctcaaagaaattaagaccctcatgcaccaactgtggcaaaccatgccactatgcttacaagtgctacttcattcatggtttttctcctggctatggagataaaaaaaatcaaacaaaggaaaaactactgccaaccatgctattgctaacaatagcttggaaaatgttgctagaaactcagcccatgtagacctctctactcaatgccatgttgggttttatgccctnnataaaactctttacaatctgattagt

SEQ ID NO: 113026 - DNA, 1803 bp, Cannabis sativa
tttttcttgcattgttttggctagtctagtctggtgtatcagtattgttgtgtacatatataaatacatatatattttttggattgtagtgtttcttaatataaggatgattttgggcattgcgaaagagttgccaaaaaatgggaacaacaagttgaagaagacaaaaatgaacaacataattagttctacttgggtaacaagatctttagttcttctctctctctctctcacctaaaatcatctcaaaatgaacaacaaaattaaatttgttatgaagtttataagttctacttgagtaataagaacaactaaatgatctgttacaaaaaaaaaaaacaatactttcatttaagtcaatctcagttctccacgtgtcattttaggcattttcttctaaagtaaaactttaaaatttagaaagtcaagttagtcaactgacgaaacaagtctacccaatattcctatcctaagttaaacaaaaattctatatgacaccgtttatttgagagttgtaaaaaattttggggtaaatttgctaacatataaaaatacttcagcagtaaaataaaataattgaacataactaaacagaaaaattaaatttttgtaaatataaaagtttaaaaaaaaaattaatagtaaagtttaagaaacaaattgctaattattctttagttatttagtgttattaactttatttaaaaaaaaaaaatagataattagaatttctgctttttaaattttaacatgccccttgaatttttatagttgttaaaaatttctcttgaactattgagattattggattttaagtatttttgttcaattttattcaattttactaatttagtgattatttgtgtagtaaatcatgctccccggacttatatatctgttaggattttattagtaatatttttaggcagatttttaaagtgtttttaaatagttttaattgtgttttgtactaatattttacaagtttagtattgaaaaaaatagagaaaccttaaggataaaaatgtgtaaaaaggtcaattaaataaattcttgccgctaaagcaccttgaaatccttcaagaaagaaatctaagagattcggtgtgtttggagctcctaatacaatggaattaaaaaatatggaataacgcctagacataaaaatttaatgtcatagcattaaaagggacaaatttggcagcaaggttcacttttgacaagtccatagatgcgcctcaacattgggattcaatgttgaggcattcgaactttaaatgatctctgcctaaaaatcagcttctagggtttttttacttaatgcctcttatatgtttaagtttattacaagagtaaaaaatttgtatataaattgtgatttatatatcctagcccaaatataagttactttattaaatctactattgcatagaaatcggtatttagaaattaagttataataaatcatataagatagataaaattgaaattaataaccctaaactctaatcattaaaaaattaattgcttttattgctttagattttaattttttttcttaattttttattgccaaatagaatgaggaatttaatttattagtacttaagtacaatccgtgtggatcgacctcactcctgtgagtatatacttgaaatcgatacgtatacttgcgttaaaaaaatccataacaatatctactaaattatacccttcgaagtttcacatgtaccaaattatgttctcttaactttcattcatgttaaactttcctcactaaaattagaaaaatgtccttaaatc

SEQ ID NO: 113027 - DNA, 6105 bp, Cannabis sativa
ttttgcaaaagacaaatttctcaagccgatatgctttatcaccacaattcgcacccaatcacaaaaaattgtacttgtgacccgaactacaaagaaaaattaaatgttttcaagattcttggccacttaaatgcaacaacgcatcaaaagaaaaaactatatacttactgtgcaacgaactaaactataagccaaaagatgtagggttcaccactacctaatgcctaagggtgtacggataattctctcaggtgaaaagaaatctcatgtctgcttctgttaattttcccaaagctgctgagcaaccaccaacagtactgtcaaaaggaaaaaagcaatgggtcattctatatggggaaaacatatccctcatcgcaaaacttgcataacaaattaatctttacccttcaaacactagttccttcttttcttgcagcttcagaattctttcctcaattgtattctctataacgaatctaacaattctgtacagagacacagattttagagaacaaaagaaagaggttagcttaagtgaatataatattatatgatcttaaaaaaaagcacaaatgccaccttattggcttatactgtcctatacggtgaattctatcttgtgcttgccgctcgacagcagggttccaccatggatccatcatgaaaacctatagtgacccaaaaatatgggtcatttagtccatttgtattcaagttgtaagaattacaaagacgaaggcaaattcataattattatttgaaaaggctaggaaatcttctatttgtcagatggatgatataaaacttacatgtgatgcaacagtaagattgagagcaacgcctccagctttgagactcataagaaaaatcttgcattctggatcttcaataaatttcttaatagcaacattcctggcaaccatagtcatgcttccattcaactgaacacattttataccggactgcacaaggtccatcagactgacataattaatatggcagttactcaaagggattttcttaagagctctttaagaatttttttagtactaccttctcgagggagtagtttatgagatccaagaatgatgtgaactggctgaaaactattccttttgcggaaccatccttctcaatcatgaacctgatttcttctctctgcatcccacatacttaacttagtaacatgcaaaaagccacaaaactgaaaagcagcatccatacaaaaaacatagcagataaaaggccttctagtccagcaacatcaaatgaacaaaaaaacagacttgtacacgcaatgcctgttatcagtaaaaagatttcaacgtaagatttgtaagaaataatgtacacaagatggtgtaagctaacaattttgccactggaatcatgtcaccaattttgtccctaaatatatcccaaaaataaatgataataaaaccatgttctctgcaaacaattaaatcataaagattacaagtaacgaaatgcaattaacaccagccaaacagctaaagttgatagttggatgttatctatttatataaatatatttataacatctaattttattgttagtgttaagatacactggcgatttaaaaccgtcctcatgccataaaatattctgggcagcaaaactactaaatataacaggatgaaaaaaactatccaagtaattttaaaagagacataatatacatgaatacttgtcaaatcacgtagcagcatagttattaggtatacatagaacactgtcacatcaactaaagaatttcaagtcaatacataattgataaaagttatacacataccagagcctcaatttttgtgcttgtttgaaaattgtcaagttgaactctgtttagaatacttgatgccctgaagccctttattgtagttttactggtgtgattcccattatctgcatttgatgtcaaatctacagtaagcaatttcgaacaagatgggcatgagacttgtcctaaggaagcagcgtaatcaatcaaacaagctttgcagaaggcatgttcacaagaggtaacctgaaaaatagaggaaaagttcacgcaaaactcagtaacactaaaaagcaacatttaaaataaaaatatacactactctaggacttaaaaaagtaataaaaaaaaaaagtaacctatttcacacacacacaaaaaaaggaaatcaacaaataaacatttaacttcttttcagaaaagtaacctgttaacaactattcgtcaaatacttcaacatttcaaaccaaaaaacataagttaaactaaccataaaaattgtataaattatctttgaattaatctaactaatctgtatctacttagttctttgacttctttcaacctaaaatgaaataactactgataatttcaactttagaagccatagctctgaatgtgatgctttcaactttagaagccaaagctatgcatcacttatcatcatacttgatcgaacgcagtgattggaaaatgttgtctcatatcaggagctgaatatccgaaacagtaaataaaaggccaggtttgtagtaaaagtaaaaagatgaactgaccacatgattttctgctggctcgtgacatatgccacatactcgctcgtcattatcaatttccaccttgtttgcatttctaattgctgcagttgcagagtataccacaaggtagggatggtcaactgcctgcgataaacaaagagaataattagaacctatatgaatgacaaaaagcataatgcagaatagagataaggatgatataagagttgttttttctttgcactaatacaaatcatacttcaaaaatatgaagttcgaaacaaagcaaccagattgcttactgagagaatcattattatagctgctcacctgacgcaaacgtgtgagaaggtcaaatatgtgggcataattattcataagtgttcctgcttcgatatatctggaagcaataaaccatattaaataaccatacacacaaacttgacatacttacatagtaaaaacattcaaccaatcatctttatttaaaagataggtcccacctttgaggtgacttcgcacataagtgtctctcacgtttacgtgtaatttgtgtgtacaagaaatgaattttacattgcaatttaaaatctcattactcatttcagtatattatgagaagcaaccagagaaatgaattttacattgcaatttcaaatctcaagaaatttccattagacagaattaaggaaaacacttttatatggtgcattaaaagaaaagaaagagatggattatatacgtgttaaactgtgcctgactctcattgtataatgactcgtaataatcctgctccttgatatcgagcacatccctcctcaaagatatctgtggtagaatcaagataaacattaacaaattaagaaaattaagcacataactaagtgcaataggcaacagaagccacaaatttggaacttactattcgtggaggaagagcaagatcagcagctcttccctgtttagttcttcgtagcactactttttttaaaattttgtgcttaagcaacatcatcgcccttttcccagggtcttgattcacatatgtttgtataggtgtagcaataaacttgcaagagtaagatttcacattagcacctaaaaataccttgccacaaaacagcaatgagataataaaagaatatgaattggatactcactttattccaccaacaaaaatgtctaacagaattatgagggcattttgaacaatctcctgaggaactgcagaaaagcattgagttgtaaaaaacacatatgcataaattgtgacatatataccagattattgaagttttggttatctctaaggcatgataaagtaatagacaatatccccttaaatcatacctatgatcaagaactttgcaatcacagtccttacagaagtaaaaggagtatggaacaatttgtagaaagcgtaactgttcatataaacaactatgtaagtgagaaaaaaggaacgtcactaagcattattaacatttgtaagcatagagtaaacttaccaaagagtaaagttcaccaacacggttctgaagaggagtaccacttaaagcccatttgtatgaagactctaaggaaagaacagctctggcagtattacttcgtctagatttgatataatgcgcctatgattgaaagacaggtatcacatcacattttatcatctgatcttcaaaactaaatgaaatcattttaaagaaaaaaaatacttaaatacaatgcaaacagaggtaatagtaattgcattaatgccaaatcacctcatccaaaataatacgttcccaattcacagcatgtaaggccgattcctccttagccaatgcttccttctcgttttgcttcgctggcttcttgcctttagaagatttgtcatccaacttcggtgttgatggcatagcttgaaacttcttcctttgttgcttagactgcttttcagttttcaaagcattcgggccacaatagtatttcaagtgcactgtcaaacgtttctcattaaacttctttgaacagtaagggcatttctctttggcaggcatcgtatgcctcctgtaatcagcctcaacaattgagtaagtagttaagacaaaatcataatcagaaaacttcttggaaacttttcctctgtttgccccatgataaaccagtaccttcgtgctcccctttgatgtaaacttatcaatttcattttcccactgattcacagcaacaacaggacagattacaagcgtgctcttaattcgaggcaggtctgttgatgtgccttctgatgaatcagaagttacaccacttgccctataaagttctcgtttggcaagtacaagtgaaatggcttgaatggttttccccattcccatctcatctgcaaggattcctcctctatttggagtaccttcttgttttaaagcccaagctagccattccttttggtacctcagcaaatccacaaccatatccgcaggtgcttctgccacttcagtaactatttcattctgattctccaagtcaagatcttttgaaaaattctcatcaagccatttctcattctcatttttccaaatgttccacatcaaaactggctttgagtcccttttctttgacttctttttcttttctttcattttttgtactactccctcaagagccaggtctacttcatcctcaatctcctctttccctttctttgacttctttttctttcctttcattttttgtactactccctcgagagccaggtctatttcatccttaatctcatcctttttaatagttttatccaacccaatctcagttttaccccggttgtatcccactttcctccttttgtaagggtgaaactcctcatctacattaacattattttgaaatttttataatattatagaacaccaaataaattctgacattaaataaaaactaaaatctttattagacccagatgagaagtaccttcatcgctactgattttttcatcatctgaagatgacgctacgaaaatttcatcatcagagctatccgaattgtcaatatcaatctcgtcttcctcatgtccatctcctaggcgagatacgaaaatgaaattagtgtatgattctcgtcttcctcataccaaacaaaagaattattgcaaaaccaataagaatggaagggaaaaggggaagaaacgagagagagtgagggttttaccatcgttggcagagtcggactttgttttgagggaacgggaacgggaacggagctccattgatggaataagttgagaaaggtacgtagggttattggtggactgcctggcgatgatatcgaaagggaaggaggagaagaagaagcgattgacgattatagtggttagtccaaacaattctaggggactgtatatataaccgaacggcgggaaagtactaggaagtggtggcacccaccgaatagctttttttttcttttttccttcctaataaaaatatttatttattatgataccttggtaacaattttattttttatttttttaatcataaaataaaataaaatttttattttttaaa

SEQ ID NO: 113028 - DNA, 1461 bp, Cannabis sativa
atccaatctgcacttttgcggattggattagattagatttgagctattatgcggattagattggatccaaaaaataaaatccgtacatagtgggattggatgcactataagcaaaatattgcgaattagattggatgaacacggccaaacctctataactatctgtattctttctatttatttattatttctaactctttattgttgactaattgacctaatttagattcttggcaatttttccaatcaatcaacatagggaaagcataaattcattttttgatagctgtatatataaactcaaagactaccttggagcaatttgtggagcaatatgataatgcagtgagaagtaaaattgagaaagaaaacttggcaacattttcttcttttaattcaaacattccattgataacaaattttaaaattgagaggcaatttcaagatgtttataacaaggaaatgtttaagaaatttaaaggtaaagtacgttgattatattcttgcaatgtcacattagttaagagtgatggatcgatttcaacatttctgaggttcttttgataaggtcaaatgtgaaattagttgcatatgtcatttatttgaatttaaagaattttgagtaggcatgtaatagctgtcctaacagatcaatacattgaggaggttcatctaagatatattttagatattagacaaaaatacacttatattcaaagcttataatgatagctacactcatacagaaattgaatggtatcaatttgacgaagaaaagcaatgaagttatagaaaatgtaattgattcaccttagaagtgtgaatttttttcaaagcattggatgaaattaatgggaaattttctcttagagaatcaagatgcatgtaatacacagaatacaacttttttgtttgtttcatttttacaacaagacaataatacacccaatcaattgaattcttgcaagaaggtgttaagtccattgaaagtgaggactagaggtcgacctccatcaaaaagaaaagaatcaaatatagaaaaaaaaatagtaaattgacgtaagaaaaaggtatatatatataatatgtgtgtgttattaattgaatttaatgtatttcatattttttatgctaatattttattattttgtgtggaattagatctaatatgttgaaaagaaaaggcaatttagagtcacatgcttcagaatcaaatttggatttggaactaagagcaccaaaaagatttctaagtaaaagttttatcccatttatagctttaatattaaaacaatttttattagatattatgattcaacaatttcatgacaacaattaaaaatacaaagagttagtggtgatattttttttttttttttttgagtaaaaatacttgttattataaattaaaaagagcattcatttacaataacagagtaaatgggaggagggatttcctca

SEQ ID NO: 113029 - DNA, 2839 bp, Cannabis sativa
tgctgtactataatttaagactttactttttgctttagaaaatagctctgaccctgggaatcttgacatggatgattctcgaatcagtgatggttgtcctagtatacgattaacatagccccatacaactctagaaccttctctgaaaaaacagcaagggaattcagaaggtaattagatgggatatccaatcaataacacaattatggacataaaccaatttgaatttgatataatttgaagtgttacgtttaatattcaggatttgaattttaattatgtggtgtttcgtgtttactagagggacagtaaatttggttgcaatacagtcagctaccctcatcatgaattaccagctccaatggtttatttgagtttataaaactaaagatttagttgaagtcaggcaaaaggattgtgtacaaacctagtggtataaactcctgccgctaatgctgtaactccacctacagtcataaccaactttgtcctatcattcaataaacttcttacacctcctgcagattgtaatagaaaaaggattacatcacagaaatgttcaaatattatttaaatgaaaacattaaaaatcagttaataaaagaactttttgcatcaaaattaaagcattcagaataaagaacactatctctaaacatgtttctctgattgtataccttctatatgcccaaaagttgtatttatagcagcaagccatttttctttttcaccggtaattctttctataagcattctccgattgtgatcttcagtcaattttgcttcataggctcgaccttcagcctctgccatcgccttaactcttatggtttcccgttcaatttcagctctctctttctctgtctggcgctgttgcgcttgaatttgctcctctgtagctctacgagcctgttctttacgtgttgacgattgctcttgcagattaaccaactcaacattatgttgcctctgggcttcattgtctgtctgcaaacaagaaaaacaaatataattaagtgatttctatttttatcattttaatgtgctgaaaaggatacccattaatttctactgcactttatatagctgtatgcacatagcctatgcatagatgaggaatgaagacctaataaacaagaaagagtaatgacaaagcaatttcagcctcattaatactttggcgttcaacttaagaaaatactattagatccaataataatatgtaaaaaagagaatggtgaaggataggattaaggtacgtttcacgataatgaattcaacaaacttatggatgtgcgcctttatggaaacatgaaagtgtattcttgaaaatttaaagttcaacacaaattctttaaggaaacacaatactgatatcactatgcacctgcattctttttctagctaactcatcttcatatcgtagcatttgtgcttttgcatgtgcttgctgctgtactatattcctttgttcttcagccagttttctctgtctttcctgtaaaaaaaaaaaaagatgaatacgatataagttgaggtgcatatataagaagcgaatgggaaaaaaaaaatgacactaccaaacttcaaattataaataatcaaactctcagaagcatgaacttcagtgaacatactcattacaactaaggtacataagttataacaatgaacaaaaatgtacatgcaataagaagccttaaagtaaagttataaatggtatctcacaatatcattttgagcttgaattgcctcatgatgagccttctcagcagccaactcggttaggcgggtttgttcctgttttctcatgagatcaaagacctgcaaaacacaaaccacccacatggccaatttatttagttgaccttaatagataaagaaatctcatctcagttcatctgtcccaaaaaccaaaatgctaactttaatttccataaacttcattacctataaactaagccagatgatttaaaaagttatttgcttttttttctttttctaaaaccatctactaactaaagagcacaaataccattaggttttcgtaaaagggtgatcatttcattttcagcataacaaaaagatacaagaagaactgatattcctcttcggcaataaaatgaccccaaagctaaatttcaccatttccagcaactttcccagcatagaaaaatgaattgaaattgaatataaaaaaccaacaaaattgagaacctgtttagcgttgggagagctattaatttcgcgaagagctttggcacctctctccaacgattcagggtcgaacccggaccctttggactcttcagctttcgctccatcagaatccgatttggaattttccgttttgtccgacgaagaagacgaagaaaagaaagggaagcgaaatgaggaatcggcgtacgcggagtcggagagagtggataacgatgccgccgcggccgccattgctacacacgaggaaatttttgagacagccattgtaaaatcttcgaattgtgattgacttttcttaagttctaacagaaatatggcaatggtgtcattgttcagatgcttgagaactagaaaggtttaagctttaaggcttggcgcgacaatgaacgataaaccctaaacccctaaattgtagggtttaaaggaaatgtgtattttttctcttctttttgggcaattttattttctctacaaccgtttaatttttcattttaacgacaagtcgtttatacagtgaaattattttttaaataataatgataaatgaagaaattgggtaaatacaattttggacactgtgttttgcaaaagtaaccaattagactctctgttttgttaa

SEQ ID NO: 113030 - DNA, 4446 bp, Cannabis sativa
  modified_base (4413)..(4417): a, c, t, g, unknown or other
agaattctcctttggttataaaaaaagaagagaattctcctttggttataaaaaaagaactatgttaaatggccattggccacattttttatataaaataaaataaaagttgttgtagattcttataaatcaataatgatacgttattttaaataataataaaattagaaaaataagaaaataaatggaaaaattgagaaagaagttgaatgggttttgttatattagatatttataaaggtagagttcagtatagataactaacattaaaaaataattatagatttttttaattaattaattactatttatatactgaataaattttttaaaaaaataagaaaaattaaaaagagaatatatatagagctctattttgagttatttttcttctaaataataatatcaaactttattatttttaaataaaatcaaattaaacaattaaatgtctaggatatttgtatattagcgaggataaaatcaatttttttaagtcacaaaaaacatcataataaaatctaataattaatttaatacgcaacatcctacaaatagttaacctagctttgaaaatcatcacacaatacctttgagtttctttctgtctagggtttcatatatcgatcatggttcggtcaacgaaggatgtatggtctttattgaccagcattactacgattataatagtagttcaaacagttttgtatgagatcaaacgcataagtgagcaatttatacccaaacaagtgagggagagaatactttggatagtgaatagtttggtgaatattgggtttggggtgacaaccttaagcatcgatgaatttgatgattatttgggtaatgaaatatacaaggcctcagccacatatttaagcacaataatcacaccctcatcgtgtcaaaacctcaaagttttcatgaacaccaacttcaagcgtactacaaagggatcagaaaagaacatgatgtcactcactttggaaaatggtgaaaaaataagagatgtgttcaatggatcaattgtggtggtgtgggaatttatagcaacaacttcaactagtccacttaaaaacggttctagtaaagcaattatgaatagaacatttaagcttagttttaaaaagaagtatttagagaatgtggttggagttggagggtacctttcgtacgtattagaaaaagccaaagccataaatgaagaaagaaaagttgtgcaacttttttataaattacatgatgattaccattacacagacgggaatccatggcttggtattgattttgaccatccatctacttttcaaacattggctatggatgagggagttaaggaggaattaattcttgatttggagaggtttttggatagaaaagaattctacaagagtgttggtaaggcttggaaacgtgggtacttgctttatgggcctcctggtactggaaaatcaagtttgattgctgctatggctaattatttaaagtttgatatttatgatttgcaactttctaccattcgtaaagattctaatcttaggaacctcttgctctccacaagtaatagatctattttggttgttgaggacattgattgtagtactactactaattcagaccaacgattatgcatgcaacctactaattactactccaggaattacaatgataagaatgaggtatgtatcaattatatgtgctaaattcaaaattgatattttgttagtatttctcttaaaatatttatatagttttattttgaaaagagaattgtcatttggtagtgtacaaacaccatactaaagtggcatactataattgttttagtaattttttatatatggttcattaaataaaaatgtgacattcatatattaagatgcacatataattatttgccactttctgtagtgtttggtatacgtaccctcttaacatttttcttttgaaatttagtagtgtgttaaagattgtgccaaatttacatcaaatttcacaatcccaaccttaggcatagaagaactatgtctctgcctaatgactcaaaaaatattttacccttttaaaattacacatttttttgttgattttaaaaaatatctcattttgcctaaccaagtataatttgttgtggtatgtatgtattattacagctaactctatctggattgctgaactttatcgatggattgtggtcgaactgtggggatgagagaataatagtattcacaacgaaccacaaggagagacttgatcctgcattgttgagaccaggccgcatggacatgcacattaacatgtcttactgtacttactctgcattcaagactcttgctctaaactatcttcacattcaaaatcattatcttttccaacaaatccaaaacaagatcaaccatgtgaatgttactccagctgaggttgccgaggagctcatgcgtactcatcatgatgatgttgatcaagctcttcaacgactacttctcacactcaactccaaaccaacatcatcatcatccaataattaatcatcctcaagttgatttatctatgttttttgtcaatttaatattatttgatatcctatgaacctttctatttttcttttgattttttattgtttaagtaatatattaagttgatttatctaattacatatgttgtaagtaatcatggaattttattaatgacaatcaactaaaataatagcttacaatctaattaggatattttttcattaaagacacgattaagattaaaattaaaaaaagagataaataatcagtcatctcattctcagatcgtttgaaaaaaattaaactaaaatcaaatgaaaaagattgcagcatcacaattaacttcaagaacacttatattctattgttccaaaggtacaatagtagtaattgttacagttcattcaacctcgtagtttgagcactcaacttttgtgtaaaataagtaactacactactataccaaccccttcaagtcgtagaacacttgttattaccaaccactaacaatgatttgatggcaacccatagaagaataaaaaagaaccaacaataaaacagaacaaaaaaaaaccatgtgacagagacaagacaaacactcaaaactatctcataaagacaagaccaaaacactaaaaactatgtcacaaaaacaagattaattgctatagcaaaaattttattgtagtagaaaaacacagcctcgaccaagccgcacctaaacccaagaaaagtcggcggacctaacgagagaaaaaagacaatgacctctgatagctatagatttaagaacaaaaaatctttacttggttaacaaataagtagtatacatttattattaattagtaaaatttaatattggtacccatatatttttatttgatacataatctagaaaattactaaccactcacaacacgcacatgagtatggtgttaggtattttttttggacatagtattagaatcactcatgaaattataatgcgaaaatcttcaatcagcacaggacccttctcgaatcaagatagctcatcgtctaattgaaaagcatactttgtcaaaccatgagctgctaaattcttaacacgaactatatgggacaaaactgttccaagaaatttagacaataaagctataacgtcttcaaataatacccccaacacattgaaaaataccttcccgttattaaaaattgttgctagagctagtaaaactgaaaaataaaaatatagcaatgccaaactaaaaaagtaaaattatattaaaatgacaattttcaacataaaaattaatatataaacttagaatttatcacacaactcatttcactagctcaacattactaaaaaattagaaaccaaataaatttccaagtagttagtataactagcaaaaagtattaccctctggctagtaacaacttactagtaccccactaatttaaaactgcttaaaattaatatccaacaaattatatttaaaaaattaaacttatcgacaagtaatcgtaggctcaaattattttacctgattttatgaggaaattatattatacactttattttgtttgtttaaaattttacttttatttttatattttttaagatgtaccaacttttataatgtttttattataccttttaggttaatataaattatgtgctaaacttaagtgaagtgaaagtatattggataattctaaattttaataatataaaaatatttttgattaattgataaaaaaaaaaggagttatttctccttattttatcaacttctatcgatttccttcttcttgttcaatgagcccaattcttaaaagtgggccaactcatacaaagtaggggtaagttgaaaaatgcctcttttattcatcaattaatcaaatttacctnnnnntttatatttatttgaaacatacctctttt

SEQ ID NO: 113031 - DNA, 3113 bp, Cannabis sativa
  modified_base (35)..(36): a, c, t, g, unknown or other
  modified_base (66)..(67): a, c, t, g, unknown or other
tgcaataggggtttctatgtaaaaaaaaaaaaaanngtttctatgtaaaaaaaaaaaaaattattnngaagtgtaaaaataaaaaagtcattataaatataactgaaattaattaaagaataaaataaaatatttttatcaaataaaaagatgtaaaaaataaaattaacaagaatttatcatcatctcataaaattttggtgtaacgtgtaaaaagtgtaaagagatgttatcaatcttcattattaattaccaacttcataataaattcaaagcaatgggtatcaaatcaacaatcaagtgcaggtcacatttatttcatcaacaacttcatataattaattttttagctagtacatttaattatataatataatatatggattggataggtaagctgtcgtattattttatataatattattttcaatttaaatttatattaaaatattattattattttaataccttatataattttaagtacaaatattgcattaaatatgaattattataaatactgttttggcgattctgaaaacagactattctttcagaagtcattaatggaggataacaggaatcctcttctccatagcttaggcggcggaggccatggaagtagacctacctctgcttctttcacttcctcattcaccgccgacgttgacgacatccagcccattaatgacgttcctagtttcttcaaagaatttactatcgaaacgaagaagctatggtacatcgccggtcccgccattttcacctctgtttgtcaatactcccttggagctatcactcaaatattttccggccaactcggcacccttgaacttgccgccgtttctgtccagaatttcgtcatctccggcttcacttttggagtattggtacgcgaatttatttatgtatagataaaaaaaattaacataaaattgattttgaatttgaatttgagtattgattgaattgattaagctcggaatgggtagcgcattggaaacgctatgcgggcaagcatttggggccggtcagctgaatatgttggggatctatatgcagagatcatggatcgtcttattcgtaacaggtttgatattgagtctgttctacatatttgcagagccgattttgttactgataggacaaacgccggagatttcgaaggcgactggtctttattgtctgtatgtgcttccggagatcttcgcctacgcgttgaactttccgattaccaagttcttacagtcgcagagcaaaatactggtcatgtcggcaattgcggcgattgctctggttctccacacgtttttcagctggctttttatgctgaagctcgggtggggtttggtcggagccgccgtggttatgaacacgtcgtggtggttcatagtggtggctcagttcatttacatccttagtgggacttgtggtgaagcttggtctggtttttcatggaaggcttttcacaatctttggggttttgttaaactttcattcgcttctgccgtaatgctttggttagtcaaattctattatgccattttttcctgctaaattattttttaattataaatttcttcatttgttgcatttcattcatttctgtaaattgtttcttttttagattacatgtctaatatgtaattttaaaattaatatttaaatgtttaaggtaatatactcttggaatttaggataaatgaaatgcaattgaataaagaaatgaggcgaaaatgtgatggtttaaaagaaaaacaacatgtttatttattttttcaatattatacacaaaataaatataactatttgtaattctgattttttggaatacttgggcagtttggagctgtggtattttatggtgcttattgtgtttgctgggtatctcaagaacgcacaagtttccgtggatgcgatgtcgatatggtaattcttgccttgcacttacttattacaatatattatcatgtatatcacaccctttgactggattttactaataatcaacatagtcaaacataaaatatatggataatggacctaccttgtgaatgctttccaataagtatcaaattgtaagcgacataaacttaataatttttttagtagcataagtattaaatatttataaaactataattttcttctagtttcaaccgtacagattctgttattgtcttaaacatgacacatataagacctaaattttaaattatttggtgtggacaaaaaatatgtaatatcagttattttcaaaaaaatttttaataaatttgaaacggagtctgtactgacgaaaatagagaaaaattacagttttacaaatattaagtacttatgccactaaaaaaaattattgagtttatgctgtctacaaactcaaaactttaagtatttatgccgctatttacccttaattaatttattagaaatgattaaaaactttcaatgcattagatttagataagcgtcctaaataggtgtcaaataataatacttagcagatatatttaagggtatcttaagtgagataacaaattgttatcacatttttatttaatattataatataattaatattaagtaacttaagatgacaaataataataatatgcccgggtatcagtatgtgaccgattgacgcgcagacaaaggaatcaatatttattttatgagaattgttaaaaatatattatgcgcgtttaatattttatttagtgttatattattattagtgtaattaaattgatataattaaaataataaattctatataatttaaaaaaaaatattaaaaaatacgactaattaagcttcaagtgtgacttataaaaaaaaataggagcaaacgagtacacgcaagtttttttaggagcaaagaaaaagacatgtggagtatcaaataccacgtgggtattcttatacctaccacatttcttttatcatatatataatttataagatagtgcacacaagttacaattactatatgaaatataaattttaaaaggtggcgtttcgttggaggtaataaaatggaatggaaaggaaataattttcatttcattcctttgtttggttgcattttaaagtattggaatggcattcca

SEQ ID NO: 113032 - DNA, 4266 bp, Cannabis sativa
ccccgggaaagccaatgttgtggcagatgcactgagtagaagaggtctcgggcaagttttcaccaccgttttgatagctcctcaattgccctcagagatggttaatgcgggaattgagtttgtagttggaaagttgcatagcctgacattccaatctgatttgcttgatagaatcaaaaaggcgcagttggaagatcctgagctaattaagattcgagatgaggtgatggctggtcggcctaaagacttttcaatctcaaataatgaaatgctactgtacaaggctcgggtttgtgttcctaatattgatgagctcgctcttgtcagctctttaagagttggtgccatggcaaaaactagggctaagaatgtgggaaaactgaagatttcaagcaagaaaattaagaaaaaaggaccgaattctactgcagaggtgaagaaaacgaagtcgatggatgaaattctgggagtggaatccctagaattctcaaaagatgatgaagatagagtgtttttggatcccctgatacatgataatcttcaacagcctttatccccagattcatcactacgattgttgaagcaacaagatgagatagctgctaactttggattctttcttgctgctaatcaagaatgccaaagttctatctttaaaggaattaaagttacccctggtactcagagctaaatgagtgaaacgaaatttggatacattgtttgcgagttcgaagaaaacaaagaaagttcagatcacaatggatgacattgaagaggaagtttcctattggagatcggcaattgtgtgttatgtgctgggtgctaatcctcccctttctattttggaaggctttgctagaagaatttggaagcataaggtggacaaaataggtatgatttcatatggtgttttcctaattcgctttacaagtgttaaagaaagagatgagatcttatctggtggttatattttctttaataaaaggccagtgataaagcttgggatccaaatctcaacctgaaaaaggaagatgttagaactgtgcgcatttggattcaattagaagacctagaattgaaatattgggggtagaaatcattgtttaaaattgtgggacagttagggaatcctattatggtggatgcagttacaaaggaaagggataagttgacctatcctagagttctaatcgaagtctatagtcatcaggaattccctgacctaatttactttaataatgaacatgggaaggaggtatcaatagcagtgaactatgaatggaaacccattctatgcaagcattacaaaggtatgggacactcaactgatgattgtagaagaaaggagggtaacaagcaagaatggattgtgaaggacaagagcaaacatcatgttgatgcacaataggggcctggtgagtttaaactagtggctaaaggttggagaccaaagaataaggcaccaatcacaaaaactcagctatctaataccttcaaagcactagaaggagatgttgaaatggaaaaaaatgagtttcaatagaggatgaatcacgaagggaccagcaaaggagggggcagagcctcctcttcttaatggatagagtgcttaattggaacgtccgaggaatcaacagtccaaataagcagaatgaagtaaggcaatttattgctaagaataatattagactggttggtctccttgagacgcgggttaaggcttcgaaactcggagccttatacttgagaatgtttagtaattggtgctttactactaatatagcttggcataaaggtggcaagataattattgtttgtaatcctttgagctttgaactgaatattatctcttgttcaagtcaagttatccttctatttgttgcttctatagacaaaaggaatcaattctttgtttcttttatttatggatttaataataaagatggtatgaacctactttggcaagaattagtgcagttgaaaactgatgtcccatgggtggtcttaggtgacttcaatgacattttagaaagaggagaaagaattggtgctcgagttaggtatagcccttctccatttaaggattgtactgttgcttgtaatatagaagatgttaagttcggtggtagttttttcacatggaataataaacaaaaaggggaggatagaatctattctaaaattgatagggttatggcaaatcaaaattggttaaatgactatcctaatgttgaagcaatttttcttaatgagggcttgtttgatcatactcctgcattactagcagtatatcctaccattccaagtggtaggaagccttttaagtacttcaagatgtggtcaagcaatcctcaatttcagtagcaggttgaatcagtttggaatatgaatgtgaggggaaccaaaatgtatcagattgtgacaaaactgaaagctcttaagccagtccttcaagagatcaataaacagggatttaatgacattcaggctgctgaaaggggggctaaagtaaaattagaggagtatcagcagcctattcaggcagatccactaaatcttgagcttcaacagaaagaacaagaggcaagggagaattatgcagagttgcagaaggcatacctatctttcttgtagcaaaaatccaggattgattggatcaagaatggtgatgtaaatacagaagtgttccatgccagtattagaaatagaagagcatgcaacagaattctatctatagcagcagataatggagaaagaatagatgatccaaaataggttactcaagcttttttggaatattatgaatgcctattaggaaccaaaatgcaagggaggcatcatgggaagaagtcagtgatttctgaaggtccaatattatcagatatacaagctgcttctctcttgcaagaatttacagaaactgaaattaaaaatacagtgtttagtattcttggaatcaagagtcctgggcctgatggatttgggagttacttctttcaagataattgggatctcattgacaaggatgtttgtgaagctatatcatcattccttcattcaggtaacctgttaaaggaaattaactctacagttattaccttaattcctaaaatcaaatgccctaatgaggtgagtgattttaggcccatatcttgttgtaatgtgctctataaagtagctactaagctaatttgtcctaggcataaaaacattcttcttgatctagtggctctaaatcagtgaggattcatcaaagggaggtatatagcacataacatcatgatatatcaagacttgattaagaattatggtaagaaggtttctaagcctaattgcatgatcaagattgatctacaaaaggcttatgataccttggactaggatttcttagaagaaatgttgagtgctttgaaattcccaattaaattcattagcttggtaatgacttgtgtgaaaattcctagatattccttgttgtttaatggatctttatatggctttttcgaggctaaaagaggcttgggacaaggagaccccatgtctcctttattgtttgttttaggtatggaatacctaagtcgaatcttgattaaagtggggaaaaaggaggagtttgcttttcatgagagatgttctgaaatgagactaaatcatctcagctttgcaaatgatgtcctattattttgcaaaggtgagttcaagagcattagcttcttaatgcaaggtctcaaactcttttctctgacttctggtttgaacaccaacaaggacaaatctgccttgtattgttcgggtatggaatatagagagattcagatggtgctagatatgtctggttttactagacatagagatccattcaaatatcttggggttcccatttgtgctaggaaaattaatgcttcggattgcaacaaccttgctcaaaaaattactgctaaaatttaggtttggggcacaagaaacctttcttttgctggtaggttggttcttgtgaattcgatccttttttcaatacacatttattggagtcaaatgatgattcttcccaaaaaagtcataaaagagattgaacctatctgtagaaattttctatggactggtaaagacttgatgacaggtgctggaagcatttcttaggagaagatttgtgctccaaaaaaagttggtggcctaggcattatgaacattgctacatggaacattgcagcaatggttaagcacgtgtgggttgtggctaacaaaaaagacaacttatgggttaaa

SEQ ID NO: 113033 - DNA, 2999 bp, Cannabis sativa
  modified_base (26)..(58): a, c, t, g, unknown or other
gtttaatttatcattttagaaagttnnnnnnnnnnnnnnnnnnnnnnnnnnnnnnnnngtagatctaagatcctggtaaactaatttccaacagtttgtgggtcagacagtgcagatgtatggaacgtggataaagagtgaaactggaaagagtaattgtttcaatacatttggaaagggagcaacaaaattgttacttgaatcaattcaggtccctaaatgggagttgaataggaaggatcatagaggtacttggaaaaggagattggttcctgattccagggtgtccaacggcgagacgagcaaggacaaggaaactgcggttgctatggtggcagataaatccttggcggtgatgagttgtccttccactgggagtgcgcataatgcaaaagccactactcagtacgattctggtagtgggaacaaggaggacagacaatgtacgagaactgttggggagatgactgacgtggcaaaggagggtggggacccagaaggtagtatggtggtgaaacctgattttttgaatttacccatgccagactttgcaaaggtagtggacagaccagagttaatccctgatttgggtcctactttggcccaatgtctagatgctccccatgaatggctttgtctttctcagaaaccacacctattccctgagcccacccccatatgctggcccaatagtgatactgaagcccaaaatcttttctttcaattatatggactggacttcttaaacctctataaatcccaacagtctattctctcatatccccctaatctgcctgaaatgatatcacatctgttgggaataatagaaagaggaaagcacacacgtggtaccaacctttccctgctaactcaagatttagtctccctgcttgcccagaaagggaaacaactgtaacaggcgaagatccgaacctgattaccaatagagggttctacattggtgcatgcattgagggaacaacctgaaaatgtgctagctgtggcaggaaatcaagaggaaaagagaagaaaggatccacgaagagatcctcaggggttaagactcgaagtggcaggaagaagtgtgtgatcaatgatactaagacttcagagtcaacaggtaaccttgatgaaatttcggcaaattatgttgaagttgaagttgtttatgagcaaattttttggaatggcgaggaggcggccgtaagcatgcccccaccatcatcatgaggtgcttatcgtagaattatcgtgggcttcgtagacctgcgtcagagagaaccgtacagggtctaattcgtgatagtgatacagatgtatttttcttgtcagagacgaaggtggatacaatttttattgttagtattatgaactgtttgggttttgtgaattcttggtgcatttcagcgaatggtattgctggaggtttctgcgtggcttggagaacagggatcggttaccaggtcttggagacttttgaggcttgttttcgtttaactgttcagttagacttgggacaaccatcttggtgccttttctgtgtttatggtaccccataccacgctctaaaaaaaccttattggcagtggctcgctaataaggttactgaatgcaatgtaccgtgggtggttatgggggatctcaacgctattcttgagggagaaagtttgccaggaaagaaggggcgttactaaatttttttttgtttaacactggtggtgtggaccttggatgcgaaggtggaatcaacacttggtagaattctaggaatgtctgcaatagaatcagtaagcgtctggacaaggcaattttcgatgccaactggtgcactgaatatcccaaggctcagatttttaattaccccattgcagggtcggatcatgcacctatatgtctcaatctccggggagaggtgacaaagctaaattacccattcagattcttggaggtttggacatcaaggtcgaactatgaaactgtaatcaagaactcttggatgagaagtataactgggagttcggctacaaagctcttgaaaaaactaaagtgtacgaaatatgatttgaagaaatggaatcaagaggtgtatggattctgtgacaaaaagcttatgggacttcgaagacaactgggtatcatacaaaaagaaccgatttctcagactaatgtggaaaaggaagtagaaatacagttggagattatagagatggaagggagaatggatagaattgggaaataaaaatccaaagaaaattggctccattttggtgatgataataaaaagtttttccacccctcgactattatccgcagaagatgcaatttcattgggggtgtggaggaggactctaggaactggctacgacaacgtgaagagattggggagtatttcctcaagcacttccgattgatcttcgagtctaatgggggagtattggctgtgagtttgaccctcattttgttgacaaggtcatcacaactgagaataaaagtatctgtaggatacccgatgattgtgagaatagaaatgtcgttttcaagatgcatcctttgaaggcacttggacccgatggtttcccatgtatttttttctgtaaatattggagcattgttggtaatcaagtctgtgaaatggtgaagagtttcttttactctgggatgatcaataaacaattgaattagatgtttttatgtctcattccgaagaaccccaatgcatcttggtttgaccaattttgctctttaagtctttgtaactatggatataagattatctctcgtatcctaacggataggttgaaaggagttattgatcggtttgaccagtttcttttacagttcataatgcttggtttctgaactacattgtggcggtctttcatcttgcttattcgtagcttcatgaaattttttgccctaactcgagaaaatttcaaacttcttgagtcctgaattttctttgaacattcttattctttaatctgttcagtactcctggt

SEQ ID NO: 113034 - DNA, 4981 bp, Cannabis sativa
  modified_base (26)..(34): a, c, t, g, unknown or other
tccgcactttgcggattggattggannnnnnnnnctattttatgaacacccctaaaaaaaaccatctgggacttaaaagctttattgtttctctgggacccggagaagaccaacttacttaagtgtgcaggtaggtgtcgaagagccacacgaagagtctaagacggatgcatattgcacagacaaaatcagaggactgccatgaggtgaaagtcgaatgactttattgacgattatccttttttgacacagaattagatcttgtcccctgtgttagaccatggtagtgtgcacaccccttctgaatactcttctttgtttgatggctcctctaggtattttgtccaccaagtacagacctttgctcgacacgtgccctgcaccaacaatagtccccaccgtacagatcattcaccacacgagaaagaaccatattaggggcctaatagtcatatgtttatgtattttaccccaatattgggtagactttttgcagaaatcctagacgggtcatgggtatgtccttgcctgtactttagcctataaatatccctttatttccacacgaaaagggggataaaaaaaagatatagccgaagctcctccaaaatctatctaaactttctttttcttcaagagaaacctagagagtagggttaggattttactataaacaccatttgtaatacatttactagccttcaaggccaatatactgacccatggactagggataattaatgtctgaaccacgtaaaaatttctgtctactttatttatcacttttattatttcttaaactcttattcaattagtttgcaaaatacctcaagacagaacaaactatgaataaaaactaaaaaatacttcatctccgtgatgaacatagagttagtactaatcaaacattatttaactcaaaacaaactgaaaaaaccaaaaaccacctagcaacaaaccaacaactctaactcccttgaaaccccaatggcgcaaagttggaccaatcggagattttgtggaggctccgatttgagtctatatgaacatcttgagaccaatcccaatgaggaattgacgataacaaccatggaagccatcgaatctagtggatcttagtgtagagaaccctccatcgatccttagacaacctataatcccttcgtcgacctccatttttggtgactatgccaagcaaggcgcgttgccaccgattgagaaaaaccaccttgttgtcgtcactagaaaggagcccaaaagtcgtgatgtgaaattatcatcagatgcctccccttggcgaggaacgctacagatagctccttagccgagaggagaagtgagagagttaaaaactagaaaaaaaaagagtaattattggcactttataattagttacttctcgtgaaaaatcgtctgtgattaacaataaactgttctactcaatttatcgtttaaaatatatcattaaatccttacttttttttaaaaaaaaaattcatgagtaatcactaggtcaaaaataaatccttatatttttttttatataaaattacttaaatataatattttttgatattattttatttatataaacaaagttaatattttgaagaagatttagtgcttcttaaatgactattttaaatgtgccccctctaataatagttttaattattaactttttatttattttttcagatgttaaatcggccattaatttctattaaaattggaagtctaatataacaatgggccattaaataatatagtggtacaaaatgtgcacccttcattaaataatattgattaaaccaatttatttaatgctaaaataaagcatggctataaagaaagttaagtggccactctattatcttttattttattatatatatataaatatatatttttggacttctttattcaaaagggaccactatattatctcttaggaaaataatgacgaattagtcatttactaccaaaacacaaacaccacattcatcccttctaatctaataaataaacaaatggggaacaaagaaaatctaatccacgtcacccccaaagtcgtgtttatccatatctctttccaataataaaactatgcaaaatatttaatttaatgccattgtagatatattgtcatttatttatttatttattttttcttcttgggagtgggtatagcaaatacacacaatccatcacattgaaaaaaaaaaaacaaaaaaaaaaacttttaatattttataattatgattctttgtgttcttgcagatctgcaagagagaaacaactccttatcttgaaactgttaagtcttctatcatgaagcttcgataacctcccatggcgaaaaccacatgattgaccatcgtcgtcttcgtcttcgtcatcatcgtcgtattcatcgtgactatcatcatgttctttatgcttgttgttctccatggatgatgattgtcctttgaactggtggtgttcttcatcatcttcttcatcttcgttcagagtcaaaagaggcatagattttgggttagaccaactgtagaatgacttccttgaccacttggatgctattaatatcctcctccttttgtttaatggattctctttcttcttaagatccgttactgcactcacctctgataaattcgtaaacgattttgattttccagaaaagtggttcgataatcctctcctgcaataatattaattcaattaatttcttaaaatctgcatcaaaacactcgtccctttccatggatctaactgtactcattacgaataagaaaaaataaataaagaaattacttgatcggaagagcctcttcaatcgagtccaaagtactaagcgatccgcctctaaacttgctctggacttcgtcggcgtcgccttgagatgaggcgtcatcatcgctgtcgtccggagctccgatcgaagaggaacaattagaggaatcatcctcatcctccgcagtctgatgagtcttgttcgggaggcagatctctgaaccagcgccgtacaagcaggaggcgaccgacgcgtgcttgtcctgcgccgactccataacgtacgccggtggtgaagagacatcgataccgaaggtgggtccaacaaagacctccatggacgccgtagtaatttttaagagagggagatatagagagagagagagagagaagaaaacaaaattacgatcctacccttctccgatccttcgtcgtcttctcttcaacttccagatcaggggggctgctgtcatcaatcggaggaaggcgtctggaaacaaaaatacgcagagttgggtgggtgggaggagggtgcgcaggataacaaggcggaagcgggtgaaggttaagtataagaagaaggctagggagtgttggtgggtgatgatggtattatccagtttctagtttgtagagagagaaaacaaaaaacaaataatgtgcttaactcgcccgcaaatagatacaactatatttatattgagatattatttggaaaatgaataggacacgtgtaaaatagtcggaggtgttactccggaaaaaggtttaaatgtgaaaaagacgaaaaagtcctttaccggcggcgttggggacagcaacgcgctttgacacgttcgtgatgaggtggcgtagacaatgaccagaaatatccacgtttagcttatcttgtttccctttttcagatcaaataatggccattggattggtccccacctcctcctactcttattgtcccttttatttatttatttatttattatctttctcatctaaattcagtttattcttttatcaacttcttaataattctacttaatattaggcaaattctaggtagttgccaaggtgagagtggacaaccctaggctaattaatagttcgaatcgccttgtgtaatgcttatccattcatttttctctccatattttcttcattatattttcctttattattttcagtttttatttttttttaaaaaatttaattttcatttaacaaaaaaaaattaaaaaattgaagaataaagttcattacaaagcttcacgacgataagtaaaaataaatcaaaagtaagtaaacaataataaggccaatagacctacaaattgagagcattttcaagtagcacattaaatttagtgttacactattattaaatttagtgcagaaaagtttaccactccaaccacaacactaaaaattacactaaaaaatgttttttttttattattttttaaataaaattaaaaaaattactatcatattaattaactaagtttgaccaagttcaggtacaaatttgaatagaagagtgtgatcgaatttttagtaggtatcaagtttaggagggattaattttaaaaactattatatatatatatatatacataaacaaaatatgtacacaatatagggtgttatggtgagatttttctcacctagaaactcgagatcagactcctatttaaaagacacatgtactcactttcctcgaggaaagccgagatgtcaatgagagacccctcgagtacgaacctcgcctgaaacagactcagcgagatgatgcgaacatgaccaaatctaatcacattcgtatgattcgcagtatgtaggaccaaggaacggccttagcccgcatatatcaagatatatgcgagtattcccacgatcctcctacaaaaacatagaggttgattctctatgttgcgagctggtcccgatgacccaacaaactcgataaaccgatatagactcgcatgtcttgtttctatcagctcgttatatgatgtccataaaagcgacttcacaaggacgtagatatcctagactcaactagtctcgaatgcttctcaagcctacgagcttatgcaagatattgtcgagtgaatttcgcaacaccaaattatattattttattaatatgaaagagaattttatgggtaatgacaagtgcgagtattca

SEQ ID NO: 113035 - DNA, 2013 bp, Cannabis sativa
  modified_base (1866)..(1869): a, c, t, g, unknown or other
  modified_base (1987)..(1988): a, c, t, g, unknown or other
attttttaatatttaattaatgattataaatatcaaccattagatatttgatccaatggtcaagaataaaatacccatacatgggtaatacccattaagagcatacccatatatatagttaaatataaaaaatggacccaaattaattttgtgttttttgattttttgtccaaaaattaaattttaaataatctgcattttctttcatttttcttttctagttttcaagttttttacgatattttgtaatgtatttataatgatagattaaatttgtggttagggatgaagtttagtgataattaacaatgttttgcgtaatgtttagcggtgatattagcgatgtatttgcgatatgagactaaaagacacaaaccacacatcgctaaatatcgtgaaaattggagtgtgattaatttagcgacattgcaaaaaattggaaaactaaaagaaaaaaatgcaaaaaacgagcgatgggttgagaacttcaacgactggtggggatttcaggggtttcgaattgattgagctcgtaaattttggggttttagagtggagagggcgagacttagagagagagagaaactatgagagacgacaagagcttgtgactgggatactaggtctggcttcaatggcaggggtttctgggtcgggatccaacattggagagtgagagagtgagcaagttagagggatttttttttaaaatgtaagaatatttctaattaggtgatatattaaagaccatacttttcatttaagtataataaatcaaatttcaagaatcatacgtggtgtacgtacaaatttgtggaaatttacatttttctttagaataagaccggagcttacttgtacacaataatatattatatatatatatgcatgaatttctctgttaattaatgaagactaattggaaatcttgatgagtatataggaaaagtcttgacatgtatcataaataatcaaaatttaatttccaactccaattccgtgtggattctgtgtgcgacggcttcatgcatgatcatcgtgtatcatgtcatcatatgatgtaagaaaccctatcgtcatatatttatgaatagagtattgtcatagagtactagtagtgcccaacactttttataggtgatactttacgattagttagtgatattttttaaaatattttcttaagttatatgagacccgctacttaattacatcaataacagtatgatactaaagatgatattaaacaccaataatacattttgacaatttttttttatatgtattgtcacttcaattaataattaactattgtttcatgtttggctttttttcacacgaagttgctgagaaaacactgctatacttttttgaaatattaattatttcaaacttgatagaggtcactacgtaatttatatatatatataaatatatatatatatatatcatgcatcgtagtcaatttgatgaatttttaatgatgagttattatatatacaacaacaaagtgcacatagagtgtatatatataggtgcaatcttgaataagtaatattagaaaatttttaatttttataattaattttttattttattagaaaattttctcatttttacattatatgagttaagattggtccatcagataaaaaaaataataaaaaaaaaaaattgacaaaaaagtgataaaaaaatttaaatttgacttaaatattttttcatataaacatatttttgatgtgtaaaaagaagtattttttgatattttccttaattaagtagttaaattaaacatagaaatttaaatttttcttttattatttgctatcggaccaaaatctaatggtttaatatttttaaaannnntatttatagttaaatttgtttattatccattaatgagtaataaccattaaaaagtattccatatctattctatataaagtgtgcctatataactgaattcttagtttatgagaaattnntgggtgactttttatttatatttaa

SEQ ID NO: 113036 - DNA, 5300 bp, Cannabis sativa
  modified_base (37)..(44): a, c, t, g, unknown or other
ataatttcataaataatcataattaactgataatttnnnnnnnnactaagcgggctttacagtgatagaattctacggtagatacatgcatatgataggtgggtgttaacctttgaaccttcccttttgaaaatatatttactttactagctgattagtggacgagatgtcttttaattgtctgttgttgatgtaaataatgatatatcttacacagatatcttcctggcatcattttggttctcatgattatgttcatttttggccatgaacatctgtctagttcaacgagaggttttagaaaatttagcccccataattctccttcgaagcgaccccacttctctctcacataggtgacctcttaattaagaacaatcccgcattgttccgttcggacttccgacgcataagggtcattaaaatcttagtgcttatcctttttccataatgggaatcactattttatcaacataatgggtagggttagtcccacacagtgatcttacaaggtttctataattaggttgtcccattgaacctagatcttgagatctccagtcaactaggttgggttttcctttatatcaaccttaatttcttctgggcttaagtcacattccttctgatgtcttttcaacttgctctctatttaaccctttggttagtgaatctacaatattatcttttgacttcacatagtcaattgagataactccaattgagatcaattgtctaacagtattatgtcatcgacatatgtgtcttgacttaccattctacaaaacattctttgctctgccaattgttgcttgattatcacaatatatacatattgcaagcacaagtttaggccaatctggaatatcctcaaggaaattacgtagccattctgcctcttcactacatttatctagagcaataaactcggattctattgtagacctagtgattacaatttgtttcaaagatttctatgaaactactgcaccacctatagtgaagacatatccaatagtaccttttgagttatgaatatcagatatctaacttgcatcagtgtatccttcaagcatagttggatctctagtatagtttagtccatagtcacgagtataccgtaagtacctaatgactcttgcaatcgccttctagtgttcaagacctggattacttgtgaatcgactcaaagtacttatagtatatgcaatgtttggtctattacaactcatcaagtgcattagacttcctattactctagcatattctacttgggacacactttcaccattattctaggacagatgctgacttgtatcgattggtgttctagaaatttcagaatcatttttactgaatgtgtcaagtatcttgtccacatagtatgacttactcaaactgagtccatctggcgtccttataatttaaatccctaaaattacatcagccagtcccatatccgtcatgtcaaaccttgagtttaacattattttggtggatttaaccattcgttggttgcttccaaaatgagtatatcatcaacatacaaacatagaatgacatccctcgtttgtggttttgatatacacacatttgtcacactcattgattttaaatccatttgtcattatgacaccatcaatttttttgtgccattgctttggtgcttgcttaagtccatacagtgacttaacaagtttgcaaactttcctttctttccctagaactgaaaaatctcgagttttttcatgtatatttcttcattaagatctccatttagaaagatagttcttacatctatttgatggacttctagattttgtaatgcaacgattgccaaaatcatcctaatagaattaattctcgtcatcgaagaataagtatcaaagtagtcatggccttcttgttgtttgtaaccttttattaccaatcgggccttgtacttatcaattgtttcatctgttttcattttccttttgaaaacatacttggaacctaaaggcttacatctaggaggaaggttaactagttcccaagtatgattttgtaggatggaatcaatttcactccttatggcttccttccaaaaaaggaccttcaatagagctcatagcttctttatatgttcgaggttctgtatctatcatataaattagaaaatttggtccaaaagaattttctatccttacctttctgcttcgccttggctctacttggacttcattagttttctcttcttattctcgatcatccattgtttcaaatgttcgcttagaagaacttggtccaaccccatcatctttgcaaggaaatacctgttcaaagatgatgcattctttgattccattatcgtattcttgtgaatgtctaggtttttagactcatgtacaagaaaatgatatgcattgttattttatgcatagccaatgaaaatacaatctactatttttggacctattttcattctctttggcaatggtgcaatcaccttagccagacacccccacacttttaagtatttgtatgaaggttgtctacctttccatactcatatggtgtcttttgatctttcttttagggaatcttatttaaaagatagctgacaaaatagcttcaccccacatgttcagcagtaatccagaacttaataacatggcattcatcatctcttttaaagtgcaattttttcgttctgtcactccattggatttaggagaatacggtggtgttacctcgtgaatgattccattttgtgcacaaagttcactaaatggttctacatattcaccaccacgatcacttcttatcatcttaattttcttattaagttgattttcaacctcttgcttatagagagtaaatttctctacagcctcatcttttttagcaagtacacataacaatactttgtactatcatcaatgaaagtaataaagtatttgttaccacctcttgtttgaacaacttttaaatcacaaatatcactgtgaattaaatcaaagggtttagtgtctctttcaactgctttgaacgatgacctggttttttgcttttacacaagtttcacacttatgttttgaatcaatattaaatgtgggtatgtgattcaagttaattaatctacgcaagaaattataattaacaagacctagtctaccatgccgtaaatttgaagacttaagaaggtaaacagaagaactactagctttattattattaataacattatttggcgtaactgccattacatttatctgccacatgccctcttttacatagcccttcccaattggaacacccgctttagtaagtacaattttttgagattcaaacaccatcttgaacccatgtatactcaacaaagttctagatttcagattcctacgaatgtcaggcacatacaatatattttacagcttgacattctttccagacatcatcttcaagaacacagttccttccccttttatctcagaggttgccgagttgcccatgtagagcttctctccattttccaatgtagtcagatcagagaatgctaacttgtttgcacatatatgacgagtagctctagtgttgagccaccattcctttggattcgcatccaccaggttgacttcagagaccatgatacataagtctaagtcaacaacttcttaggatatcgcgtccaccatataggtttcatttcctttcttcttgcgcgatttgtactcatatgattcatgtcccatcttcccacagttaaagcacttcccttggaactttggcttcttatcaattccacctttcgatcccaacttggacccttgcttgtgcttaggattcttctcctttgagcctcgatcaagctccatcaagtttgccttagcaacattaggattcaaggttcacttctccttaccttggttatccttttcagcgtaaagtctgagtatgagatcttcaacactcatttccttttgcttgtgcttcaaatagttcttgaagttttttcatgcaggggtagcttctcaataattgtagctacttggaatgattcactcaaaaccattccttcagcatggatcccgtggatgatcaattgaagctcttgcacttggcttattacattcttagagtctaccatcttgaagttcaagaattgaccaaccaagaatttcttggcgccagcatcttcaatcttatgtggtccaaagagttctacaattctttggctgttttcttcacactatacacaccatacagagtgttagataagccattcagaagataattaaggaaagcgtatttcacgtgcctcaactttctttaaagcagattttcccctctacttgaacggtgctagaggatcagcgagcaactactttccaggatacaacgactaacgagcagatgaatacaccactttcactactccagcaaactcgaattaataccttcacttcatcaccttaagacttacgaaaaagacaaagaagaagaagataagagagctattttagtgagtgactctttttgttggtgtatttagaatgaaaggtgaaacctccttttataggcttcatatggagtagaatactaagtgtgaacactagagaattaatgccaaaaattccacaaaattagtgatatgatcaatcacaatcttcaccataatttctgatatcaatcagaatatttaccattattatggtaattacatccttgaccaaatatgcatttattagcagctatcaataaaccatatttaaggcatcaatttctcattcacacattcgcttaaaatagctatttattatatgttaaatatactttttctaacatatataaaaataataatactaatataaattaattaaattaaaaacttgggtgaagaagatcatacaatttaaatcttaattaataaatttatataagaataatatttgggacacacaattacactaacactagctatcatgatatggtagaattttgattttaaaacataaagtgactacaaattaagtcatattaatattttatgggaatcttgttagataaatcaataaatcaaaaatatataatttttatataatctagaatacaataataatagataataattaagtatacgtatttgattgatttatagcaattacaacaatgtacaagtacaatactatctaagtcttcctccctagatctctaaatcaaaagcagttttatttttgtgattatcaaaaagtatacaattgtgatgagacaatatgtatttatagagttagggaggggacttagctacaaaaccctag

SEQ ID NO: 113037 - DNA, 1130 bp, Cannabis sativa
aaaaattttactttcattttgtaattaaaaaattagaaaacaaaagtgttaccaaatggcatctaagttaagttaaggggttaatatttttacttaggtataactttttttacttattaatacactacttaatattttacttagtcacactatattttactagtgctgcacaatggaacaacattaataggattttttaaagtttttttggaagatgatgtcctacaaggtcattaacaggcccattacacataatttcaggcccaatccaagcatctcatcaacttttttttttttagaaacttacaaaaatactaaaatttgagttaatttttacaaaaatactgccacacggaaattttttcaaaaatactgtatttttataaaacgacagtagaatacaaaacaaaacaactaaaaaacaacagtgaaacatctaaaaaataattgtaaaataacagtgaaaatttaacacaatacacagtacaaaacttacacagtatgtttaaaaaaattttgtctcacagtagaaaaagtaaaaaggctgaaaattcagtatgtggtataaatctttttttttaataccagcatctcaccttggaaacttttagtaaaagaaaattgagaaactttcatcaggcacctaaatttgaaaattatttacaaaaataactttgtttttgtaccaaaaagtcttatgctgaaggaaaatttgaacctgaattttcattttcttttcaaaaacaatacttttcttgttgggcctcttaattcctaccattaactgtaagccattgagcatcattcatgatagaataccattagtcttattgtgttttaatggaataaatattaattttttaacttaaaaattgaatgaaactaaaggtaattccattaaaaaaaaactgattaagaggaaaactcacaattaaactaacataataaaaccttataatggagagagatatttgcaggagaattatcctatctttcgattgttatgattagatgcacatatactatcattaaaaaaattgatgcacatattgtattgtattgtattagtattatttaatacaatacaatgtttggtattaacttgtattaattgattgtgtaaagttata

SEQ ID NO: 113038 - DNA, 1426 bp, Cannabis sativa
tccgtacattgtaaaaactaccatacaaaaacaggacatttctattgaaatactatatcaccaagtttgattatcatacagttttgttgccaacaacaatggttgttgttgaatcacagccgttggattttagatcgaacccgtttgaaaatcccttctgaacctcatcaagaaaaaaagctggagcttctccctatgacaaccacaacaaacccaatacagatcagaacacaacaaagaaacccttttgattcatttatcaagtgatcacactaaagatgaacgttattaactcaccattgatatggagaaatctattccttcaatctagatataggttgagttacctgttcaaataaagatctcaaacggtaagaaccaatccatattttctggatctacaagtttaaagatgaacatgacaaaaagtattgtcaagagaatgagaccataaatcacaacattccaacaagagaaaagtcaaaataggttccatgaatcaaaacccagatgctcatttcagctcctcaatgagaaaaaacacagaaacatacaaacaaaacccttctgaacccaacaccaaacacaatgtaaaagaaaaaaaaaatggatcaacaaactaaaggcagaaaattagcaaagagaataataataagacagacccatatacctttcaatacgtaaaaaacaaaaaagaaagctttttttattgagaagaagatatttaacaaaaccccaagtgaggatttaaagaccacttctttgttttcgaagcttttttcttttctgggtggttttttcttagttttctctttctcaacctgttttctcaggtcttaaggttaagaatcagagaagaacaaactcaggatgaaaaatcctagagaaaaagttaggagcaacgttgagaaacgttctcatatttgtagtaggagagagaaagagaaatagaagaaacaatgtcgaattcacgaaccaagaagaccggctttcgttttctcgtaagggccttgcttatgaagtttctaccctactttctattttttatttatttatttatttatttatttatttccttattaatatttattatttattttatttaaatatttatttagattttaaggggatggggatagagtaaggggaaatttttcttttatttttaaagtgtgaaggaaaagaaattaaattaatatttcttaaggggtgacacgtgtataatagtacgataattagttgacacgaaggaagattttattttattttatttatttttgctaggaaattaggaagaattttgttgaccacccaaaataataagaataaaaaattaattattgaaactacataaacaaactattttttattatctattctatataaagtgtgcctatataactaaaattcttggtttatgagaaat

SEQ ID NO: 113039 - DNA, 1485 bp, Cannabis sativa
gaccttagatattttcaccgccaatttttgaggttgaggactaatcggtatcaacctcaagtttttgggacttttgccgcaattatcccttttaaaaaatatatataggttaccatactaagctatagaataaaaaaaaaaaaattgtacaaaaagaattaaaagtaaaattgaaaattaatttggtcaaaatattagatactaagtatattaaatttttttataaaattaatttgtccgcaataagaattgggaaagtgtgcctacgcgcgcaagagcaaagggtggaagagagtgagagtgataacagctacagaaccaatgaaatggtggaactgtataaaatggctgtattgaaccaatggatatggaccgaagaaagtttcacagttcccacgaaaacaaatactacaattaacatccattcctaatagtttagtgactagtctatgttgaaaaataaagagattttagtggctatacttttttaattctgattttacttatatttaattttttaaaattaacagtaaaaaattttaaaataatttttatacattttaaatataatattaagtgtataaatataaatgtgacatatttataaaaatatatacataaatcgtttatattgacggttaaaaatagattaaattttaaaattactaacaatttaataatttgaagaattttattgttaaaatttaaatttagaagattaaatgtaagtgaactaatacttgaaaggattttactgcaaaatactaaaaattaaaatgaaaaattttaacagaattaattttgtaaaatattgatttgctatttttttttaatcataataccattactttacatgttataaaaatattgatggtttttaatttataattgtactaaatttctagaggttcttatactatctccaacaattgtattattttagttattgtttttaccatttagtacaaaaaaattataacttttggtacaaaaaaattataacttttggtacaataattctaattatttacctcatatatgacaccaaataaaaatacctttctcaactaatttatgtactatgatatgattatgtatgtcaataaatatttatgattatttcttaaataaattaaaaaaaaaaaaagagttagaacgaataaaaaaattacccacaaatttggtgaaattattcaccaatatggtactaataatagtctataattaggtgcatagtgatttggtgacatcttttgagtgtaattatatgaatatttcatactaattatttagtaaaatggtacacccttagaacatggggacaacagctaggggtgtttataaaatagtcgatctaattcaatttgcacgatccgattcaaggtaatccaataaacaaagtacgaatatctacacttgtgcgaattagattggtattgaaaaattcaaaatttgcacttgtgcggattgaatgttaattgacat

SEQ ID NO: 113040 - DNA, 1993 bp, Cannabis sativa
  modified_base (1388)..(1394): a, c, t, g, unknown or other
  modified_base (1488)..(1488): a, c, t, g, unknown or other
aaaaaatacgttaaaaatgtaagaaaccagtaaagtatataagttgtatttttccaaaacataatggtgtagaaagtagtagtcccacaactttttcatctttatttagcccaatgctttcccaggatacatggaggccttataatccagtttgaggcccatgactaaacctaagcagtaaaaagaaggcccatgaagcccataatagtactaagagacgaagcttcgagaaatagaaatagaagagaagagaagaggtagccgttagttacgcacttataaggtatggtgagaaagaagaggataaggcattagaagttgggttgtgaacttgggattctttaactcaacggtaaaggaacttgtctaccatccaacacccattttacactaccaactgaaagtgactctttgcctaagctaagcttcaatttttaccttgtttttttttcctctaactgctgttgttgctagctaccaaggttgtctctcatcccatctctttccctatcaattccactgtttacgacaaagtcatgaaatagagataaatttataacttaaatgacaattcattcatttatgttttgattatcattccatactaaaatttgttagtctataatttattgctacatattgtacacacctacaccagaaacataccattccttattcttcaaggaaacattcgatttgtcactcatattaatttctcttctcctttcctgctttctattgtacctacggacttaattatcctttaagttttctttctgttgtagtacaatcatttaagtattttgttttctttgtgaggctatgacaactaaactttgacatattacctaatggcttcttaaggtaataaaattcgtttgttgaattgagataaagaaaattgagttatgcattacgtgatcatcttccttaccttaattttgttatgctgaaaaaaataaatagttatgaataaacaaaataacaaatcaatgttttagctgagatgtgacgtatttttattaaatgtatcattactaagttttttagatgttagaaattactaaataaatttaagaattattatataaaaaatataaattgacattttatttataaaaatatttttataaggtgtggacaatatttgtattttttatgtgattttaattaccaaaatatctcttacactatcacttacataatcaaacgatatttgcagggtggttgctgcgtgattatgcgatagttacatcagatgaaggttttaatcatacgaaggttactgggtggttggccgaatgttgcatcagacaaaagtttcaatcagacgaagattacagggtggatggtcgaaggttgcattagacgaaataactgttagcaannnnnnnatgcaactgtaatgcaactgttatgaaacattaaaaattagaatagtttttccacgtacgtttctctacctacatgtctcttcatgatttaatntgaacaaattcaccattagaaattttaaaaacgatgaaaatacaccaggataaatattttactatagtattgaagtaatttttttaggattataggtgagttgaattatttgggaactccggttcaatatattgagatctgcatttcatagtttgaaaattaaagtccagacattagttttatgcaaattaaattgaatttccggttaaattttagtttcgtagtagtttttctacacttattttttcatgaattcgaaacaactcctgttttaattaattctagtcatcttcttaggtgaaatcgccgaaattaatggtgattctctttctgattgaattttcgtttcagttgtgttaggttgctgcgtggttgcacgatagttgcttaggaagcatgtatgcttggttgaaggtgtgtgtaagtggtatttgtgtaaaaaaaaattatttggactgtatatttatttatttggcaaatcgaaagtatttttgtaatattgtta

SEQ ID NO: 113041 - DNA, 2410 bp, Cannabis sativa
ttactttttaaccctaattacccagatcaatctcagccgtcagatcaaataacttcctcatctgacggctgtcgtacatcacggattacaatccatgatgatacaataacagaacaaaatcataccactatctctttgttcacatttatgcagctattagatatttaggggacatacactgcatgcggacccctcttctcaattggtggaaggaaggcttatatacaatgtgttttctataaagaaaatcatttaattgatagtagatttaacattttggaaacctactcattttcaactaaatatatatatttatgaatgatatacatgtatgattttccattaatattaggtattttttttttttaatttactgtatatttccaattgagaagcaggaaggttcattccttttttattgaagaccaagaatacaaaactaattaattaattcacgccatataaaatgaaactgatctgtcaatgtttgtcatattctacttaattactttttattcacatttcatattttataacatgaaatactatacatagcacctacagactgatgtaatttatttgtttgtttaatataataatgtcattattattagttgatcaaagctcttgaaaggtatactgtgtactatatatattagttatggtatttaccctattaattaccatgagaggtccatgacataattatacaataatagatattgtttttttttttgatgaataagatcaattgtattgctgaactaaacatttacaaacaccaattgtttctcactttgtatcattctatacatatatattatatagtcctcatactatgtccccccacattaattacaattcattacaatttcagcaaccaagtcttatccccaattgacattttgctaagaagtgctcccattagtctagtcaaagcatcttgttgtatcttcttgattgtgcgctttatttgccaaattttttggttccacagtgcttcattcctcacctgccacaagttataaaccaccgaagcaatgatggttaataagatactcttccttgccttgctaatcttagctttagagatttttccaagaagctcaagaatgttctcagtttgtactttccattctaaccattctttgattctttccaagcatttcgtactataagaacatgcaaaaaataagtgattaatgtcttcatcttcaactccacaaatcaaacattgaggatccaaacttggttcatacattcgaattcggtctttggtcctaagcctttgccacataacaagtcacataatgaacctatgtttaggagtaattaatctatcccaaacaaactttggccattcttttttctcttgaacatcaaatagaatagtgtgtcccgcttgaatactgtatttttgacccacaaacaccgcttggcttatcttttccttgaacagatttttgacagccaccaaagtcttccaataccagctgcaatctgtgtgggatgtgtgtaatcccaccaattgtaatttcccaaatatacagagttgatccacttaacaaacaagttgtcctttttcttagcgattgcccatacatactttcccatagccgcgacattccacttttgtatattcctgaatcccaagtcaccatttgatttcggcctacagattgcatcccatgctataagtcctgcatttgtgtttactgcatctcccatccatataaaggctctatagattgcttccacttttcggagcaatctctttggtaagatcataatttgtgcccaataagagtgtattgttaacaaaggttactctggccatataagataaatttcgagtgctccgaaccttgattctataatagatattgctagtgctgtcaatatttggaacccatataccttttcatttattatgactaagtaaaaaaattataaattattattcttattatgttatgatgaaaaagtccgtaattaaaagtattagtcataaaaattacaatttgttgtcactaaatatatttttagtcacaataattattgtaaatgaaattaaattagtgacaacttatatcgaaatattatgttttagtcataaataattttttattatgataaaaattcatatttagtaacaaaaatttatgttatgattaaaaaattgtcactaaaagtaaatttttttagtgtattaatggtggctatatatataaatatatatacacgtatatacatgaggctaggggtgttggaccacatccaatgttcttaagcatatctagttccgatccaattatatattggatgttagattttaccatccgatagtcatctaatcgatctaacatccaatggatcggttctatccattatatgtattgggaaatttaca

SEQ ID NO: 113042 - DNA, 5406 bp, Cannabis sativa
  modified_base (3440)..(3440): a, c, t, g, unknown or other
ttcataattaattctcaattaattgctaatttccaaattaattgaagcggtctttacatgtggcctgtgcattgataggggttatatcacagaagttgctagaattaggtggatccaaatatttgaagtgactaggctcacttctctagttgttgttttgcgtgtttccaccaattcctagacttaccaagttgaagattggcccttaggttacttattcctgaaggccccaagatgggagttcacccttcatgccagctaggggagtaccactaagggactagctggcgagaggctttccaagtgggggtgttgtagagcctaagatccctggctggtcccccagaccggtggttgccataatatggttgttcttgctacaagaccttcgtggcaaggcttgtcctcctttgggtaagggaaggtctatcctagttcttgaggaacctggttggatagtttgtcggtagactctccctaatctgtcaactagtttcccttagaggggatatctaatgagatcttgacctcttccaacagttctcttattgaattgccttattaggtcgctagcttctctattgtactagtccagctccgcctagtgagatcgaaggatgtactcttggtcatctatttatttcaaaaattcacatattttcatgcgaatacattgcaagcaatagcgcacggttccttaatttggccaacttcataaatggcttctataagtctggctaactcgagatcttctcccaagtctgcatggagctcaccaatggctggctcaccaattcttggccctgtctctctagcataatacaggggaccagatgcagttctggtgcctgggggctgctccacatgggtccttccttcaatggcaggcttcagtggagggctctccataggaggcatggatcgattgtccagatcaataggaatggttgtgtcaacctggccatctatggtggaaaaatttgtagtgcttgccgaggtggcaagagtggcgacatttgtcgagttcatgaaaattctaattgtgactggaacacaaacatcatgatctgcagtcatagggtcttgaggaagaccagatgaggcagatgtcgtagccggacatctccttgtgttaaccatgacatttaattagataaatgaacaacttgctctcaatggaagcaccaaactattcacctcaaatttggccaacggaaagcaaagtcaaattaatgctgatgcttgccatgtgttacataattagaacaggaagtaaatagacataggattttatagaggtttaatccccttagttagcgggtaactacctattccccttttagttgcattgataccagagataatacaacttagataactatagtaatgggatctgaaatggctctcttgagattacaatgtgagaaccagagttggcaaatctcaagtgatagtagagcaatgggcgcgtgagagagagaaagatgagatgagttatcgaacttagagcttaagggttagggttgtagacttagggttttagggcttgcctaatgctctttatataggaccgctcgcatccctaatatcctttaaaaataggtaaataaagctattatttggataataaattaataaaatgcaaatgactaaattgcccctcaaaaatagggaagttgttgatatttttcctctattcttatgggttgttaagtccctattcacagtttgacttgctatccacggatgaaagctacgcaccaaagcctcccagactaaaggttggttggccatgcacctgtagagtgcatgttggtcgcccatatgatgtctaaaggatggccgaccatataatgtctaaaagttggcaagcctatgctagccatagaaccggtcaagggtggctggctagcccctttcaggtggctggttcatcatttcatcgtccctcttaagtacttggacctttcgttggtttaagtcctatgtagatggcttggccttcttgttggcaagttttactccaacgtggtattgataatggccacatggacatgccacgttagttgggaaaaaagctggataacagggactattgttcaaaagacagcccaaggtgccctgaagaccatgaccatgtctaatcagatcttggatggttttgttttcccaaacaaggctaccatggctgctaagcaccccaaccctcttcctcactccaaaagagaggctaagaaagtaaggctggcatcaacaaggtagcagtctcctagaggagtgggagatctttaggcattttccacccctagcaaacaacatcctaaaaaaacaccatctcaactacaataacaacaagtcacacaacatcaacaccgacaagaataactttgccaacaccattaactccattaataacaacaactccaatagcaataacaaacacaccagcaacaacaaaaaactgattccagaccagcaccaccaaaacatccaaaactccttaaccatacttgtcaagagcaattcaactgtctcagccacaactgtagaaagggaaccaagctcagtctagccagcaccaagggcagctagcccatactttcttgcctagaatcccatcctcgaatttcattccacctttgaagcccacgactatcagcaccaacattttgaaaatggtggaagacattgagtgtttcttgaataggttgttgggattaatgctctaaaagcaagtaattaatagataatatattcgagaatatatgagatacaattataagataaataatgtattaattattaagtataactattaaaaattagaaaatttcctattcatatggagatggtataatcttgtaatggtgtacaagagaattaagattatacgatatgaataaaataagtcagtagtgtattaaagtaatagaaatcttttatatggaactactaagtatggtttactatacactatatttttagtgtgtgtgattttgattcagatcacatatgtagattgacatatagtaaaggtactgtgtataattaaattatgcatgacttgaccgatatgtaatagatatttttcatcaacttgtcgtttaccatgaaaagagtttgtcataatacaatgatgatcattagtagattagcctaaatcttgagtatacatgaactcttgtttgtgttcattgagtttattaattcacttgttaaagtttcttagagaagataattcttacaacttcttttttggaaacttaataacatgagtggctgggaacatgttatataatagtggaatccaagctttcctaatggactgaatattagttcctttatagttttaattcttagagtgctaatagttggatctaaatctataataagatatagaactgttcacattaaattaatggtacataaggaatcaaganataattagaagggtaaaatggtatcttgaccaaatctaattattcactaataattggagggaaactacttatacttattatatcaatggactacaagtaagaattatgtaaacataattctatattgacaaagagtgtaattccttatttatagtggaacaataattgaattactaaactagattaatctgttgatgagattgattgtaatcttgggtttataggaactttaaaatatatgtccatggtccccaagtcacctttatataacactgtacagggaaaggttttatttgatgaatggatttccagtgagaattaatttctatggaaaataaattcttaaggacaaaataataatttgtgaaattatttttcgattaattatgctaattatgaattgcataattaatagaatttaactgtttagttttattggataaaactacattaactagttaaatataatattattatttaataatattaaatagagaaatatattattttaaaaaaataatatttattttaatccttgtgaaataggagattaatgagaattaatctattatcatttattggcagaataaataataaattttatttatggaaaaattaagaaattaatttagaccttaaagtatggtccacacgtgtagccccattctatacatgtagggtgacatataaaggcctatgattaatatggtttaattatttttttaagttaaaataatttaaattaaactaaattgattatcttttaactaataattaaatatattataagataattatttaattaaatggataattattaaaataaaagatctactaatatttttatattcaattattagatatgtatatttgaattttgacaaatcaaattagatacttatcttttattttaaatacatgcataaataatttatttataaaactatatatataagatatatagcatcataaataaagagacttttagaagaccaataaacatattgaaaaggcataacaaaatagagagaaaataggattagtatttttttcactcctctctctctctctctctctctcttctcacgcttaatctctatctctctagtctcacatgccacacactattccaattgtatgtgagatctaaaccctaatctcattatagtgtctcatgagttgagtacacactgtaatacctaaatctgttcatcctataagatctaatagcccactctatttcagagtgttgagactggcttgaaagatcatggtgtggatttttcaattaagttcttgaattggatgttcgattgttatatctaaagaatcaaggataccctaataggcatgaagaggtaattgaatttctttcagtagattagatttaatatatacattatgttaagatccttgggcttatggttcatattagaaaaaagttattttatcaaaattttgcttccgtttttgttactctaatatggaccataaaaaccaataattagtatcaaagcaatcttcataatgatatatattaaataatttattggttgattatgtatttatacatatatgataatatattgtgaatggatggaattaaatttttatatgcgtgaattttaatcgttaattatatggtaaatttaggttaagaattttacagtattactacgaaaattataaaccatatttgggttgtaggttttgatgtaattttttattttaaatttatttgtaaattttggttaaaaattgtaacatcaaaaagtccacaatatttccattgatgagtgagcctgtttttaaggagtaaatcttgacctcattgagattatgagttttggacctcgaatgacaagccaccaaccccaaagggttgcgactgcaagccatgaggtcgaaatacgtgaaaatcaagaattgagaatgctaaaattggatagtctaggttttgatgtga

SEQ ID NO: 113043 - DNA, 6569 bp, Cannabis sativa
  modified_base (46)..(52): a, c, t, g, unknown or other
actatgttttagttacaagtaacattttgttgtgactaaaaatcannnnnnntcacaaaaaatttatgttgtaactaaaaagttatcactaaaattaactctttttttgtagtgaaacaaaatttaggtgaagcaattatatattttatattacgtggattttaaaatttcaataaaaattatagaattagatatataataaaatgtaaaatattgcataaatatgttaaattaagtgatattttaccttaatccctagttttatgttcaaaacccaacattaaaattttaattctttctcaaaaatatatatatgtataaagttttaaatttgtgacctctttatactataaacaacttttaccactgcaaatcttgtttatcattagtgaacccaaaaaactatttatacaaaggtccaaagtttttatttttggacttaggccctaaataacttagaattattaattgttcctaataatttcaagtgggatggttaccctatctcatctctacatagctttgcccttgatgatatatcaagaccttatcaaacactattacaaaataaatgttaagccaacttgcatggttaaaatggatttgaaaaaaatttattgtgacacaatagagtgagattttatagaagaaatgatggcaaaatgaagtttctatagaagttcatatatttggttttgacttgtataaggatattaagattcttgactgaatctttacacgagttctaaggtgatcttagtaactatttttgtttgtaattggaacgaaatatatatctctctcgaatcctcactaataaagtggctcaaaagattagggtttcaattccaaaagtacaagcctttgaaattataactcacttaaccaaaagtggaaatgataggattaccattgttgaccaagttattgattttatttcaatggtaaagaagcttgattgtattttaagtaagaagacgaactaagtttggtgcaatactgatttggaagtaatgaaagcttgctaacttaccccaataataataataataataataataaatattttaaagctatctattaattttgattactaaaatttctaattttattatttatcaaataaattattaacagctaatgaaaaatacgtttaactttacacatcaaaatctacatttaaaattgatattacaaatgaatttagggtttgtttagtgtgtcgtgttgtattgtatgtatagtaatgtattatattaatatcttttaatacatgtttgttaataacttgtattaatagcttctgtaaaattatattaacttattataaacttgatcccaactcggaccccgtttgggtctgggttcgggttcgatcgggtccaagtctgggtcagggtccgagtcgaggtccaggtttggggccgagtccagggcccgggttaaggtccagttccagggccaatttcgggatccgaggttaggtgggggttgagtcgacatctagggtcggggtttaggcttatgttagggtttgaggtccaagtccaaagtcgggttggggtttgagttcggggtttagtcgtcgtctaaggttgggctagggtttgagtctagggtccgggtcaggatctggttgggttcggggctggggacgggacgggtcggggtccatgtttgggtcggcgtccgggtcgaggtccgagttcggggtcctagtccgagtcgggtccaagtttaggttcaggattcaaggtccgagtctcggtccagggttggggctgcgtctgggtctgagtttggtccacgatctacgagcgtgttggggtccgggtccgagtttagggctgggttcggggtcaggggccaggtcgaggtcagggtttgggtttggggctaggttgaggtccgcggtttaggctaggtccgaggtccaaggccaggtcgaggtttgggttcgggtacgggatctaaggttggggtttcagtctgagtctagaattcgggactagggtcgagtctggggtagggtccccaatcccaaaccctttataaataatataatactagctaatacatatcatttgctatgtattaaataaatcgattcacattgtattaaaatttatggtcgtaataattaatacaatataatgttttatacagacataatgttacttgttatttaatacaatacgactcttatacgtcttaccaaacgaacactttatatctactaaggaagaacattttcgtgcgcttttttttttctaagattttttgaaataaataaattcttttacgtacataaaatattaaaaagaaaatgtatttatataaattgaaatttcaaaatattatttccaacggaagtatttaattaaacaaaggtatcaattaaatcttatactatatatttttgagttgaaagtactactctttgtattatactatttccattaataagatacaaagctttttgtctcttaatcaaacaaaggtcatttgttggctccctcaaaataaaaataaatatttattattgacttaagaccattatagaagattagatttcaaatttcagatctcagatctcaaattagatctcagatctcaaataatctagtggtgtttatttatttattatttgtaaagaatgtagtggtatttatatattcttattatttggaggaaataattaagaatggtttactaatgactaattatgagtacacatttttcagatcattgttgtgtctaaacaccacatggtatttaattaataatatgattcatatctaagatataaaatagtaaaaaattcattaaaatatgacttcctttctttttcttcttttgaaaaagactattcaatttcaagattgctataaatagagcttaattctccaaaccacaaaaacattcccataagataaaagaaaaaatgtgttcatcatttaagagcatgtctttattaatgatcttcttattccttctctcccttatcttctctagtgtccaagctcaagttccttccaatgccactttcaaattcattaaccaagatgaattcggtaatttcatcgtcgaatataatggaaactaccgtcctttagatgttttcaattcgccttttcaactttgtttctacaacactactcctaatgcctttacccttgcccttcgaatggctacaactcgatctgagtcgctatttcgttgggtttgggaagccaaccgtggaaaccctgtcggtgaaggcgctacacttacattcggaaccaatgggaatcttgtcctcgctgaagccaatggtaaagtagtttgggaaaccaacacaaccaacaaaggtgtagttggcttcaaattgttaccaaatggtaacatggtacttcatgactcaaaaggtaaattcatatggcaaagttttgattttccaacggataccatcttaataaggcaatcattactagccaagggccaaaagttagtgagtcgcctttctgagaaagaaaataaaaacgggccttacagtttgatagttaagcccaagggaatctcactctattacaagagtcagaactcagggaagtctttgccttattttacaacagcccaaaaatttagtccagttcaaggatccctccaaaatgtgactctaaaagcttccccaacttctgatgagggtttcgcatatgacttatcattagagctttccactggaggaaacttcattgttgggagaccgaaatataatgcaacattatcatttttgaggttgggaattgatggaaatgttaaagtctacacttacaacgataaggttgactggggtgcttgggaggagtcatttagcatttttgatagaaattcagcgtgggaagatgagtgtcacttacctgatcgatgtgggactttcggaatttgtgaggacaaccaatgtgtggggtgcccgtctgagaatggtgttttgggttggagtaaagagtgtggaactaaacaagtaagctcttcttgtaaacctagtgatttccactactacaaagttgaaggagttgaccatttctcaagtgggtataccaatggtgatagtgtcaaagaaagtgattgtggcaacaagtgtagtttggattgtaaatgtttggggtacttttacaaccaacaaacttttaagtgttggatcgcttatgatttgaagactttgattaaagttgccaactctacccatgtggggtacattaagacacctaataaacaagcaaccaatgtcttttgagtatttttccttatataatgtagccatgtactttgctacaataaaagaaattgataatattgatttagtttataaaatcattacattattgccatttctcctcaattaaacattttagccatgtatcttattcaaaatgggccagccatataacccaaatgggcctaaggtgagattaaataatgtggtctttttcaataaaagtataaaaagtgctatttaaaagaatctttatttaatgcaattatggagtagggtgaattagcttggattgggtggatttgatcaattgatccgatctttaccttatttatttcaatttaatacaaactttttgtaccttaattctatagtttccaatactttatttaattatatcattttcttgtcaacttttacctactacaaaaaaaatcagattataaatttagtatatgatatggatcaaatcttattaaagaaaaagggtcaacataaggtcttgacttgacattaatagttggacagatctgaaataatgtaatggtgccttattttatgtttcttttggggggaaatatttagaagaaattacattgtatactcactttattttatttgtaatgaatctatagttttcctcaaagtattgtctagaaagcttaaaaagatatttaattgggatagataaattgaggaatatctcttttttgtatcttttaatcgaaaatactctcatattatatttcattaaaatatactcacttttgtgagtgggttgtctaatataccatcacttgccacttaaatctagcacataatttatattaacttaaggggtataatgggggcatcatctataaaagtagatatatcttaaataatatagaaacaaagataaaaatcaaaagaggtgaagtaaagtgagcatgtaatttcttctatttaattattcaatgcatacatccatatccaatataatatagttaaaaagcaaacatatcaccataattgacttgccctttttcttttgaaaataaccaaaatacccttttaagattgctataaatagagcttctccaaactcacaaacaaattgtcattaaagaataacaaagatgtctttatcatttacaaagaataacaaattgtctccaaactcctaatgctttcacccttgccctacgaatggctacaactcgatttaaattgctatttcgttgggtttgggaagccaactttggtgaaaacgccacactcacattcaaaaccaatagtaaccttgtccttgatgaagccaacgataaaattgcttgacaaaccaacacgactaacaaaggtgtcattggcttcaaattgttaccaaatggtaacatggtacttgtcaaaattttgctttcccaacagatactatcttggtgggacaatcattatgagttcgggccagaaagttagtgaatcatctttttgagaaagaaaacaaaaatgggccttacagcttggtaattgtctcactatattacaagagcaaaaactctagaaagccattgccttacttcacaataactcaaagatttaacccaatcgtccctacaaaatttgaccctaaaagctttcccaaatactgacaatgattttgcatatgacttatcattagagttctcaacaggaggaagcttcattgtcaagcccaaatataatgcaacattatccttttttaaggtctacacatatcccgaatataaagttgattggggtgtttggaaagtgtcattttggtgtttttgataggaattcagcgtggggagatgagtgtcaattacccaatcgatgtggaacttttgagatttttcatagcaatttagtgtgggaaaatgagtgtcaattacccatcaaggcgttttgggttgttggaacaaagattgtggaaccaaacgagcgagttcttgaaaacctagtgatttccattactacaaagttgaaggagtggaccatttctcaagtaggtataccaagggtgatagtgtcaaagaaagtgattgtggcaacaagtgtagtttggattgtaagtgtttaaggtacttttataatcaacaaacttcaaagtgttggattgcttatgattttaagactctttagattatttttttagtactttttagtacaatatatggtcattatgtaagttttggatatttttctattgagtaatttgcggcaaaaccccctcaactatcaatttacttgcaaaaaaccatccaacctcatattttggtgggaaaaccctccaaagtactgtttcgtttacattttt

SEQ ID NO: 113044 - DNA, 1296 bp, Cannabis sativa
atgagtaacagggatggacccactactatgaatgaccctcactaataaaaatattgtcttttacaaattaaatgtaatttttttaatttgataattatagattaaaataataaaaaatctctcataaaattaaataaatttagtaaaagttgttataatataagtataaatattttttaataataaataagctccacaaagtaaaaatttaaggtccgtcagtgaagagtaatacccattaagatattatactatgattatgtagtacacacagtttaaacatagattttttatatattttatttttctatttcctctttcattattatcacccgaaaacaaaaccttaagtccaagtgtaagtgaggtcgctataattatttaatcaaataaattatacggtatatattgattgtcttatttctacacacgtatgcgtcatcgtatcttcttctcatatatataaattgaacttaattacttaacatccaagtgtatgtgtggtcgctataattttcgaataaaaaggttgaacctcaacacttgacttgtgaattgggtggggtcaatatatattaattatatagtagtagctagctagttggattatttctcttccatatgaaatttctctgaagctgcaacggccttgaagatcttattttgccaaaaaaattacaagatttgctataaagtctcgtacgttgatttatcaacttttttctagcacttattattcatattattactttctctctgcaataattaatgatgaagaaatgtatgaatgatgttgttgggattatggtattcgttgtttgtgtaataattatcttgtcatcaaatttggcgatgtcggaaaactcaaataataaggttgttgtgagagtaaaagtgggggtggttgtggacggtaagagaagggcgggaaggatggggctgaaatgcatcaaaatagctctctctgacttgtaccaaactcaaactcaaactcatcatcatcctcattataccaccaggctggtgcttcatactacagactccaattccgatgtcgttgctgccgctgctgcaggtgcatacatacaatatatatattctcattagtttaattattaattattctagaattaattaatcaaaagcattacagcaaatgaaaatctttgacgtctagtaagtactgaaacaaaatgaaaattccgagctctttccaaaatccaaacaaagaatatagttgatggaaaagtcctgtatgtatttgctgcattcaattaattaaggtggcgtttggta

SEQ ID NO: 113045 - DNA, 3347 bp, Cannabis sativa
ggcttgtgtgggcgtaacttgaaaactaatatttacgtgccttggcacgtaacttctaactagtatatatataatatatgtatattgtattattttttagtgaaaatttaatataatgatttgatcattaccatatatattataatattaaaattttattagattgatttttgaattttcatttataatgtttgataataatgatagtataaactgcttatattgtactgtactacactgtatttgtgcggtgtagtttttacgattttaagatctcgcagtgcgattgcggtttaagaaattacaaaaatcgtacatgcgatttggtttgaaaaaaaaaagttaaaacctacactacccgtaccgcaaatattccattcttgtactcttaaaatattatactttgttttacatgtctgttttgtgggattttaaacgacatgtcgtgctatgaacaattgacttgcagtcttgtagtttgttttacttacaaatgtgtttttaggcttgtacacgaacgacatgccttgctagttgctacaaataattaaatccctttgtttttatgtcgttttactatgactacatgtcgttttatgttggtaaacaacatgtcttgttatataaaatacaattgatttgtagtttgttttacgttgtgggattctttttctttctcaatgtcatttagctattttactattatgataatgtgtagaaattagaattaaacatcacaattatcattacttgtgatcatagatttaaataaaaactaaagaattcaatgaatgaaattatgtcaaatattatatttgacatacaagacattcatgccttaccaaatatttctccatttctccaaaaagacttatcaaaatcaattgataattattattaaggtataatatatattaatgttgaatttaaggtaacaaagtataatgcaaaacaaaatgtatatatacatgatatgttatatgaagttgattgatgatcatatacataaatatatagatatagtagttagtatatgttagctaagttgtcaccctaataaagaactgtcttaagcttgaaacaacagtatatcattcctcccatctcacaataaccaaaccaaacacattaaagttttgaagtaaaagctaagactacaaaaaacatatccaaaaatttcccaactcccaaaccaataaaatcatctcatatctaatctatatgtagctataaatatatagagctcatttttaaaggcatcacctatgtttatactatacatatacctatacttataaatacatggaagaaaccctagctaatgataatactcatgattctcgccaccactcctccaccgtggacacctctcgtccctttcgctctgtcaaagaagccgtcgcaatctttggagaacgtattcttgcgggtgaaatatactctttaactccttcaccaaatttctctaataacagctatcatttgccacaacaaaatgaataccaagaacaatacgtaaaaaatgaggtgattagtacaagtaatgtgcagtactctcctaattcaccattattatcatcatcagatgataataatagtaatgataataggaattcgatgataatggaggcggtgaagagattagagagggagttggaggtaacaaaggccgagttgaaggtgttgagggagagagaacaggagactgaggtggcggtggcttcactcaatgccgagctccataagaacatgtcaaagatggcggcggttgaggcagcaaaagcagctgcggcggggacaagtgcagaggaagagagaataagaagagagttggtaaggagaatggagaagaatcctactttggctcaaatattaagcttagggcatgatcatgatcaatatggaaaaagaaaaagaagtagtaccaataagaagaaaatcaagcctattgttcctcttgttggagatttattttcaaagaaaaaatattaatttatttttatatacattgttcatagtttttctcactcattttttgtttttattatttgttgtgtatctttcatattaatttgttttgtgttctattccatatttcaaacactttcaagtgatgtaaaatcttgtttgtgaatgtatatgtgtaattctttattcacggtgagcttaccttcttttctttgttcacttttgagttttgagtgtaactttgttgaattaatatgtaaagtttctatacttatttattgatgttaatcttaccttggttactatacatattgatggaagttttagtcaaaaaaatctcgatcattttttttattttatttattctgtaatatattacgtgactcgaaaatattacatactaattagtttcgacatttctaacatacaaagtttcagagttagaaaatatgtaaataattattaaacatactaataggtgactcgaatgtgttacttaccacaacacacaagtctctattcatcgagatacacaatatttttgttaaacaagtattgctcattttaaaatcaactttaagaatatgtttggtaaaagggagaagtaaatggattgagagaaaagtttttatttggcaagaaggaatgaaagagagagaatggagaggtgagaagatatagatccactcaaacttctaatttagaatcctctctctctttaaatattttaaattataaaaatacttttaacaaatattattagaaaataattataagaataaagtaataattttataaattaataattatcgactcttctatcagtactccattttttctacaaaacaacataacatgattattacttcccctcccttatatttcattattcattaactctccatcaaggccgactctgagttgaaatgagtcataaacaaaaaaaaatagaattttagcttactataaaagataaatggtatttttaaatattattaagaaatatatatatatatatatatatttaaaagatattttctttatttgagcccctaaaatgagtgagccctaaatgtggacctagactgcttatgtctaaggccgaccctgctctccatcaattctactctttttctttcttaccaaacataccttttatggagcgtttggtatgaggtttagacttgatgataatgaaaatgtaaaatttatattaaatttgaatgagatttgtgtttttaagtaggtctcactttttaaatcaaaatggtagtaatgttaatcccctcaaacatatgggttttatatttcatccaactcttactctctccaactcaaacttacataacaaacaccctatttattcaaaaaaaaaaaaa

SEQ ID NO: 113046 - DNA, 1768 bp, Cannabis sativa
  modified_base (1241)..(1243): a, c, t, g, unknown or other
ttaaattaaatagaaaatattttaatttctatattcaaatattataaataatcatttaatactttatatattttcttaagataaagtgtacaaataacatttagcttgacaaataaatttttaaaataggatgaaaaagaagcttagtaaggaaatcaaaaagattgtatttggtattgatgtgaaggatgttcaattaatcactttgtacatattaacgaataatatgacaatcaatattgatatgtttcgtgaaagattgggttctcaaaaataattacttaatacttaatattaataatgtgagataagagtaaaataatcattgctaagagataaagtatataatgaagattaattatcattcaattcagcatatttgttgaattatttatttatttatttatttttgcttaatgcatgtttgttgaatttgcttttcctacttatggtttgaagaacgtgagactaaatcatttcttatatatctatctatattttttttttacggtataccattttttatatttaagttataatttgtatgtattttatgttttattaaatatttttatataatataaagtgttaattttttaaaaaaaattaaatttaaattataaatatttcgattatcttttatctcttatattaattatattttttttaatattgtattttaaatttaaatttattgcacatatctaaaaaaaaatctttctactatcaatttttttaacttaatctacatatctaaaaagtatatatttctattgttgtttttttaacaataaaatacaaaaaaaaatgtttatgttttttaaaaaatcactgttgtaacattgttactttttgcggttaccaaaaaaatatcttattattattataaaaaaataaaaaaagtgtataatagtttttaaaataataaaaagaattataaaattaaaaatattataactaaagtaaaattataattaacaataaattttgatattattatgttttttttatataagtatgacttaaattacatatttttaattaaaaatgatgttgtttattaaataacattcttaaaaaaactaaatatacaactaagaatatacaccatcaaaataaaaactaaatacacatgcattgcatgtaatattaatctaatatatatatatatatatatatatatagaatacttctcaatgggcattacttattgataggtactaaataaatttaactataannnttaattttaaaaatattaagccattagattttgattcgatgacgaataataaaagagaaatttaaatttctatgcttaaattagctacttaattaaaaaaaatatcaaaaaaaaatatttatttttacactatatcaaaaataaatttatctgaaaaatatttgagtcaaactcaatatttttttatcatttttttgatgaatttcttttattattttcttttcaaccgatggaacaacctaacccgtaaaaatgagagatttttctaattaaatagaaaatttaaacataaaaactcaaatttttctaatattatactcattcatgggtaatacttattaaaagtacacccatatatatactgcggtatagttccatcaaatgaaaaggtctccgcaaacgtcatatttgaaaagttgttcactcacagatgtcagtcctggaaggagtcttatggaatgataatcgagtttggaatggtgttgccggatgactattgtgacagtcagtagtcccgtgatctgt

SEQ ID NO: 113047 - DNA, 1762 bp, Cannabis sativa
aaaaacatagttcataaaatactaggttgctcttgtcttgaaattccaaaaaaatacataatcataactatttaataaaataagttccattgtctacaacaaaggtaagagaaattgaagtattagaagagaaattgaagtattagaatttgggataagatattagaatttgggataagatgagaatttgggataagatgaatgaatttgggataagatgaatgaggttccatctcaaaaccaattaacaatgagagaagtaactcattcattttatatatgacaatctccaataacaatgtgagactaactctaatgctaaattaaagcacaacataaccctaatatagttcattcatcaatcatacaagaattataaagtacaaagagccggtgaatttatcggccctagcaatttcttagtaaacgccaagacataaggcactctcattccaatacatgaaaaatcatgctaatgcaaacttattttaccgattccatttttgtatgagcttccaagctcgtctttccacaaacctatccatttcaaaaccatgcaaacttacattctctaaccaattccccatgcatttcccaaactatcattatctaatcttaacccatgattccaccaaaaagaatacgatcattacatgactgattttctgtaactaataaagtaaattattaaagtttcggatacctttacctatgtcattttctggcctagttcgagagttgtgaccaatttcccatattagaagtttcctatatggacagtaactcataactacctcgcatatcataattgaagtagtatctcgtaactactcattgatttaataatgtatagcaatttatttatagtattacaacccttaagttttctaccacaacaatacatcccttaataagctttttataacaatcccttataagttttctatcactcacaacaatacacccttaagtttctatcacaacaaacacatcacacatgatagtatgtttcttgttctaggggtaagattaacttattttggattccttagtgtgttgttgaatcccatcttctgaccctcgtcacctttctctaataaacttatgtgatacttttaggtatatagtgcactaagattaatctacaattaatattttatatttttaggtttcttactaatgtttcggtacaagtttttaaatttctcaagaatcattaaggaaacaaatcctttactatgatgtttttttattatttcttgttaattatgtaatacatatatcccaaccctgggaatctttccctcaaagtacctaaagaaaaatcttacttataaaggcccattatcatgttcttattctttattattcttctagaaaaatactaattttttatttttagttgaattgctgtgcttattattttttaataaaaataattctcttttgatattttgaaaagctcaaaagtaattaataaactctacatctcaatctaagacttatatccattttccaataaataagtaaaattccaaactttgaaacttttgttgtatttttgaaaagttgagctttggacccaaaagtattttatttcgggataggttaaaaaatactttattcattaataaaaattaccctaatattatattttattaaaatatacccacttttttagtggtttgcccaatatactgtatattatatacactcactctctacttaagtctagcatatattttacattaacctaaggggt

SEQ ID NO: 113048 - DNA, 3762 bp, Cannabis sativa
tgtatcttttaatgataactatttatcaggtgcctagcaccttctcgacatgtcgcgttgcaattggttagtcatactctctaaaagctattatattaaattatatgggatccgatacttagttggatcaatagcaatattgacacataggaagatgctagacaccactagtaccttttagcatttccctatatatatgtcacaccttttttttagtaaaacttacgtactcatttaattgaattttatacaattattttcccttttcacttaccaaacatacaatatttgaccaaaaacattatacataaattatatattaactcctcaactctacttaagaattaaaatcctcaatctacatagctagggaaaaaaagttgaacacttccaaattaatatttaatgagataatttaggacacatagtttgaaaaccaagaactacaaatttaattatttatacataattgattaataataagtttattggaataaaagatgacatctctaagtacgtatctttatattctttcaattaatccaatctatataatatgcctacgtgcggtatggtgagacagtttggaataaatcgaaatctaaaattaaaaaataattacaccataaaagaacatggtttgtagttttcattacgtttctttaattattaaatttaaatgattcaatgaatgattatatatataattaattaactataaaagttgatgatttggatatattccactaccttcctctcataaaatattatttaatttctttgatcaaaatatgtatcacatttctctacagaattaaaagatcttttaacttattttattttaatttaaattaattttctcactattttttaaaggaacctggccaagtctttattttttaaaataataaaatatatagtggggcctttttgtaaatatgaacaggaatataatagaatggctttaaagcaattcgaactaaaattgggcacgttttccttatttataataacaagagactagaaactgttctatcaactaattaaaaaaagtgacatttggaaataaataaaatctgaccaaaaataaataattattttattgtgtgaaacatatatgagaagcaataagttatgaagagaggaataaagaattaagaacagtattggtttattattctgttcaaatacttggatttattagttttgaacgtggaatgtgatcgaatatatatataactacttttcattgagaaaaaaaaagttatattcatttgaggaaatgaactataaataatttatttaatgtacaaagttatatttgttattttcatggcacacaaatattttacgtgttaattaataaaaataatatcaataatatatcaatcaagtagtgttatatatatatactacacaaaaaaatcattagttttaacatgttaagaaagattttttataatttgtcacaattgttttacatttaattataaattttattgtaactaaaaataaaatttttgtaataaaattttaatttatatatattaaaaataattttatattattaaagtatgaaaagattaaaccatatatagataacacgaataacttattttattgtcaattgataattttgagacgagaagcaggaaccacatgcactttctcatacacttgcttattgtttttacaaagattaattttcttcattgtgttttatttgtgctaatattttaggtacatttaaattgcatgtaataaaagatcactttcaagtgtatatgtatggcgctccatttgttacactcaaattatatttattaaatcgtaattcatgacaaatattatggtaagcattaatatgcgatgctaaaatttgaacaattatgaaatggtctaaaacctcaaataaagttgtgtacacatttcattacaatctttgttagggttctattgtaaacttaagctaattaatttagggtttgttgtattttttttttattctcatcggttggggtgctttgactatattatatgtgaattttaatattactttaatcaaattaccggtgaactgctatttagtattatgagtattattttttattttattattaattaactatatcttaatatatttttttttccaaaatagaggcttgagcggtgggaagcctaagacaactgcctccttcgtttcacctcaggtcagccatgtatgtgaatgatatgctttaactgagagaaagttggtgttaattaaatacaacatgactcgatcgaatatggtggaccttttactgtgacctatttcacacagtgggattcttcttcaatggtcttagcaatactatggtgagtttgagagctttaggttttatggagattgagcatcattaaggtcaattattgatcataaaaacttaatacctaaatgaaaaaaaaatagtttttaataaaatctagaataaaaaaatattctcccccttgaactttgtaacgtatatgattgtgccccttgtaatattagcattgtcgaaaattttccttaactttgtccgttaataaaaattaaaaattttattaaaaaattataattattttgcctcttgacacgtactacaaaaaaacttttacttttggtaataattttttagccacaatataaattttttgtgattaaatgtgatttttagtcacagcaaaaatttacttgtgactaaaacatattatttagatgtaaattgtcactaatttaattttagtcacaacaaattgtaatttttatgactaatacctttagtcgggaactttttagtcacaacatagaaatgctgatttataattagtcacaaattttgttatgaccaaaaataaaattttttctagtgtaaattttatcacttttataattatgccccttgtaatatcagcgtttttaaaaattcacctttaattttatcaattagtaaaaattaagacttcttaagcttttcataaattgggctgacaatgtacaacataacatagtgaataataaattgaatgtctattcatgtaattgcttatgtggttgaaaaataaaaaggtaattgaattttaaaagtaagcttaatgaaaaatacaataaaactaatatataataaaaaccccatttaatgtaaaaattagatttgtaaactaaattttctaaaaacaaaagagagaaactttaaactaatttcattactaaagaaaaaaacaacttaaaaacataaaatatattataaattaaaaataaaataagtaaatgagatataatttttagtgacaaaattcaagaagctgcaaaataattttttattctaaaatctaataaggcaaattaatatgaaatttcaatctgaattgtattagtatttttagtaagtgtttaagttaaaattaactacttgttagtattttaacactaagtaaataaattactgatttgccttactaggaatcttgatcaaaaaatttatatataagctaaccatgaaattttaatctgaattgttttactatttttactttttagtaagtgtttaagataaaattaactatttgttagtattttaacacactaaataaataaattattgatttgtgttattagaaacctagaacctctatttaagaatacatttggaactaaataaattatattctaattgagatattataattaaatagagtttcactagaaaaaaaaattaaaataccaaaaaatatcaatgt

SEQ ID NO: 113049 - DNA, 2767 bp, Cannabis sativa
ttataaaattgacactattattttatgaacacataaaataataaattttagaaaaataccaatttgcatataatattaattttgcttcttaaagtgtgttggttagaacaaataatttccaacagactccctaaaaaaattatagaatgctaactagttggtatcataagtaaccaaactgttttttaaattttggaaatagaaaaaaaaaaaaaaaaacatatgcttaatacatcttgaaatattcatattgaaaagtacattacaatatttttttttttagattcaatggagtaacgacgtgaccaaaaattattttttaaatttagagagaagagagagaaaaaagaaagagagaccaaagtaaagaaaaaaaaaagaaaaaaaataaatattgctatgtgatattaaagtatctagcacctctgtgtaataatattaaattaaaaaggtataatttaattttaaattgcattaataataaaaaatatttgtaaacgcttttaacatttataaatacaaaaaattcagccgtcggtgttaaaaacaaaccactctttttttccacaatgctctttgattggactcaaaaatagtaatcatcgtatttcaagatggcaaaataaaacatattttgatcacttattaaaatttagtatacaaactaaattgactacaagttactatttttttattattattatttatacacagattattgtacctatcacataattaattgttttttttaaaaccaagatcatatagttaattaatgaattgttaaaccccacaacacaagcattgtgtgtcacaaatataatttaataagtaaaatgaaaagagactttgcattatcatcaatataaaggagaggacttggtaagttggtagtatacactcatcttaaaccaatggacatcctaagtatcatcttgactttcatcgcagtttcatttcttactattattctatgtttctctttgcttctgctaaaaatttacacaggcaagtccataaaggacccttcatatccaccagtaaacggcaccgttttaaacgaactcatctactttaacaaactctacgattaccaaacccaagtggccactaagtggtcaaccttccggctacttgccccgagccacagcgaagtctacaccaccgacccgagaaacatcgagcatgttctcaaaaccaactttgataaatattcaaaaggtcaaaccaaccaactcatagtaaccgatctccttggccatggcatatttgcagttgatggagacaaatggaagcagcagaggaagcttgccagctttgagttttccacaagagttcttagagattttagctgctctgtttttagggaaaatgccaataaactcgtcggagccgtttccgggctttcgggtcgggttttcgatatgcaagtgagtagctagcatgaaatagtgagtcttatctggttaacatgtctaaattttgtttttggcagctactataattaggaccttgggttattattgatcgatgaaaccaatgaagtcttttaataattacacttggagtttctatttagctcatctagctctttaatatttattggctttgtcacccttataaaattgtatatacaagaaaattacatacatataacatataacaagacgagcaagaaaaaatcaaaattaaaatattaaaattttctttcatagtgccttcttataaaaaataatttaaaaaagtctttagtacgtcttggatctggagatgagttatgagttatgacaaactttctcttatatgcttttgtttttggtaggatttgtttatgagatgtactttggattctatattcaaagttggatttggggtagaattgaattgcttggagggatcaaataaagaagggagtgctttcatgaaagcatttgatgagtcaaatgctttgacctttgggcgcttcgtagatccaatatgggaattaaaaagatattttagcatcggttctgaagctgcccttaagaagaatattaaagtcattgatgattttgtgaatcaacttatcaagaacaagaggaatttgttagcgcagaaccaagattgtgtgagttcaattagccataacatttactttttgtgcttaattttattattatctactcaattatttattttagttttttcatcttggatttaattttcatagcatgtcaaggaggacatactttcaaggtttttaatggagagccagaaggatccagaacaaatgaatgataagtatttgagagatataattttgaattttatgattgctggtaaagataccagtgcaaatacactctcgtggtttttctacatgctatgcaagaaccctctaatacaagaaaaaatagcacaagaagttagagatttcgttggtgataaaaatatcaaatacactgtgaatgatttcatagagaacataactgatgctgctctagaccaaatgcattatcttcatgcagcattaacagagaccttaaggctataccctgtagtccctatagtaagccctttaacaaatattattgtagttggataaaatacatagaaagaaaacaaaactaatatcaactaaatattttatatattggtttttaagaattattttactaactgtgatatgcatgacatcccttatgatcctcgagaatgggagatgtgcagatatagatgatactcttcctgatggctttaaagtaaaaaagggagatggagtttacta

SEQ ID NO: 113050 - DNA, 1983 bp, Cannabis sativa
  modified_base (1230)..(1256): a, c, t, g, unknown or other
  modified_base (1901)..(1917): a, c, t, g, unknown or other
aaatgtaaatttttgttatttttaggtgttaaccaaataatcccattattcttattattctacatgtaagtttatatgtatgaaggatatatgcaatgatttttgaggatgtcattttcattatatagctttcggttaaagctttcattctcaaactttcggtaaaggttgagaatgcataaaaatatcatctaaattataaaattataatgagacaaattcccgtatcatgatcttgcgttgggttgctgtttttctaatacaaaaatttgatattatgtgtggtctatttttatttatttttcttcttcttttaattcaatattgggcaatatattataatctttgtttagtcgctttaattaacacaaagcaaaaaagaccaaaagaactatacacttttactaaattttatggaaaccgacaaatttcacattgtcttttaattgttgtgatagagcacttgagtaattcaacataaattattagattactgttgttttgggggcttcacttttctaaatgagtttaaaaatcaatttcaaccttcgactttcaaaaaagttttttatatttccaaccttgatgaatagattttctatcaatttctacattatttttacttgttttgactatgttctatttatttattcttaactatatttggtcaattttgaaagggatgtatatcgctgattttaaaccttttattgttggagaaaagacattactaattattctttttaatcaatgcatagaaaatatgttttagtttaatcaaaacatgcaaaagtgaaaaaacaagaaaaagaaaaagaaaaagaaaaatgtgttcatgtctttagttttgagtatatatcatatcctatagaatcaataccatatccctactaaacaagaaagcaatttttttttcttcttaaacttctgaaattcaattggaatcctttaaattccaacaaatgaccaattgatgataacaaagttatattatcaaatctccatacctaaagagatattcccatcagagatattaagatcttcccaaatactataccataccaatacattttgaccattcattcttcttactattttggacataagtcaaaattcatattgtcattaaaggtagcagtcaaaatattaaatattcaatcccacacatatattttactaaaaaagaattagattttacataagaaatatgaaaataataataataataannnnnnnnnnnnnnnnnnnnnnnnnnntaataataataataataatcagaatctggaaaagtaggaaacccatgtcatatctcataatttcacttacctttttcaccttgcaaagatagggatgccatcttgagaaaattaaaaataaaaatggacaaaataaaatgggccatgctcatgtttggttgtctcatacttcctttcttatctaattaaatgaaatgccttttatgtctactgtaatatagtcaattggatttggctctatgattcaattttctactaattattaatgttttcattttgttttggctcaatagatactattttgtcctatttaattcagttgggtgatgtgaccaatgtaatatttttcattgagagtactcagatatcttatcttaatggaaaagcaagatattaatactccacttataatctatttgaaaaaattattcatataaatcccaagttgtagaatctaggtcaaaattattcataaagcaagatacttgaaactgtctttcaacaaacccattgaactgagtaaacagtaagagtgcttcaaattaatttgactttcataggaaaaatcctaaaacttggtaaagtcatcaacaaaattacaaaacttaggtaataactatagtaccgtttggtaacacttttgtnnnnnnnnnnnnnnnnnacaaaataaaagtaaaatttttgaaaaacaaaaatgcgttctgtaactacttttgtttttcaattt

SEQ ID NO: 113051 - DNA, 3268 bp, Cannabis sativa
gcgtgtaggagtattttggtaataaattgtgcaaaagtgatttttcatgtaaaaatttctatatattatctcttttaatatttttttaaaggagggcaagttagcttgctgctcaccctcgtctctatataaatccgcctctgataataaccaatcaaaatttaaatttaaaacatgcatgtctaagacaaagttcacctaaagaatcccaccaaaacaaataaataagctaggaaatattgctgaacaatttctttattctttatcatttttttcttatggaataaatgtattaaattgaaaaaggaaaaaagtacgtagcaaaaaagtaaagataaaattcttatgatatagttcttttaaataaaaaagttttcaaaaattatttatttatggagatttagatatcataccgaaaagcgtttttggaagttaatcttgtctatccaagagtctccatggaaagtttttctccgaaaaagagttctagatagttaattgttcccttctagaagggagtctcaaatagtcgacttcagttaccgctattcctatttgggaagtcctttcagcatactctttggtctatcttccagtaagcgtacgactcatctataagcgctttaacttgagctgatgtggagatattttatgcgagaagtttgttaagttcgttaagttgtaactaacttaacaacttatcatttgtagtcactgcatcactaatctataaataccaccgacacttgttattttgagaatgacgaatttttgataggcgacttcaaagttgaagattaagattgaagagagagattgaaaggtagagagaaatgtacaaagaaaagagggagaaagtttaaaatttgtatgaagaatctttcgtagatgaagaagattcttagataatagtgtgagagataaacactttgagagaattcaaacaaagaatcgatctcgactgtatttgtactatgttcttgctcaatcaataaagacgatttcagtggtaaccagaacttgagtagagccatagatcacatcgatctagaggacttgaaatagtatatatcttggtattgattttattgttttattgctttaattatttcttgttgtaattactctgttcttccctgttttatctctaattcttgtttgtgaactgttaatcttatcattgctaattgtttgttgattaagttttggttgatttaattttgtatataatagttgtaattttcccacaattctttttatcaaaacaaagttaattgtctaatccaaaaacaaaatatacttacactatgtttggtaggaagtaaggatgggtagatgtataggggctaaagttgaaaggagatgaataattccttgtaaaaaaaccgtgtttttacatatgccaataaattttattaataatagtaaaaaaaatacaactgtaaagatctgcaataacagattggtttgttactgtaaaacgcatgttgtaacaaaaaagaaacaaaaataaatgttgcaaaatttaaaacttgacacaagagaattgtacgtagtatcagtgttctttcaaacactactattctacagggtcacgtccagagaaatgaaatcaattagtaaattatcaaacaattataaatacaattgacttaaataagattagactctctctaaagctttaccgcaatcctttataatttactttgctaatcagatttttgaacaccaccaaatagcgaactcccttcgttaaacaaaaaaaattatttttgaaaaaagaaagtaataatttgatattttctattttttatttttttaaaattcagttttaaaaaaataattttaaaaatttttgccaaacgatcccttttagtttaaaaactgttttctattttaaaaaattaaaaataatttttaagttattaagccaaacagcccctagaagtttctcttagcttgtttctctttcgatcatgtaaaaaagagttgtaatattgttgcccatgttgtttggctaaattgacttttgttattgtaactaaattatggaatagaaactttactaagtgtgcatctgctcaaattagtccagattttcttccccttgtttagttttgagtaataaaagtgtctttaagaaaataacaaaaatatcaattaacaataaaatcttcttaataattattgttctaaaaatatttatgtaaaattgtaatctccctctctctctatttttttttttttttgcaaagatttatgttaaattattggaaatattaattcaattttcagagttcttaaaagatttttttttttatatatatagttttttaaataataataatgtgatacagatatagaccaatataaatataccacgtatacataaagtgcgcactcaaaatttaagttaaagggagcatgcttttatatatatatataagtgagggatgtattttttttcctacatgatataacatgtttaaaattgatacaaatttgtatttttataatattagatatggttttaaaataaagaaaataacaatagaaagattagtttaaatgattacgatcttgattgtaaagattaaaaacaaaacttacaatactagaaagtaaacatacttttgttgaaatttgaactcataatttctatggtgaattctcaccctcaaaacaggttgttacagcagtaacaatgtctaagaaacacaatttaaaactaaaaccaatcacaaaatcaaaactcgaacttaattgaaaatagataaagaaaacttatcttgataatgaatgaatgatggatctttattgaataagaataatcagtagtacacaattgaaggagcccaagattacaactcaacacagtataaagtattataaaaaaatatctcacattgagggaaatcacttcaagagtgatactcccttttacatccatccacacacactcactatgatcttggactctctctccctctctcaattgaatctaaagtatgagctttggagattagagatcagaactctctccactcagaactctctttagaatagaggaacccctatttatagttgttggtggggtcctctttaagttagtattaaagccaactgttataactagcaacatctttctcaaattcatctaatgagaaaatacatggacaaactgacttgacaggttaagtgagtttaatcccaataattctacatgattagactcacttaaacactaatccaaaagaaatgagtgagg

SEQ ID NO: 113052 - DNA, 2748 bp, Cannabis sativa
  modified_base (26)..(36): a, c, t, g, unknown or other
  modified_base (2680)..(2686): a, c, t, g, unknown or other
agggtccaatctgtaacttttgcaannnnnnnnnnntaaaatagtatttacccttaataatttaacaaaaaatcaagccttttttttttaattaccattgttccaataacaaaaagttagttcctttcaaccaaataataataataataataataataatagtttgacttcgtaattcaaaaattgtttttactttttagaaaaaacttcttagctcacaatagtataattattaaaattatttttttttttttggagaatatagttatttataaatttataagtgttcttttagttggcagtataagatcgtattgtattaaataataaataatattatgtttggataaaataatatattaacgatcaaaaatcttaatacaatgtaagttatattatttaatacataacaaatggtatgtattaacttgcattgtattatttacaaaagattttggatcaaccccaaactcttaactggatctagggacctggacttgggacccggatttggacccagacctagacacggactcgaactcgactcaggaccccaacccagacacgagatcccgactcgcacccaggttcttgacccaaacccggacccaagaccccaacctggacttgggactcagacttgaacccgaaaccaaacctgggactcgaacccgagacccaagcccagacctgagacccgggacccgaacttgaactcgagacccggacccaaaattagacctagacctgagacccaagacccgaactcaagactcaagaccagacttagacttgagacctgggacccggagctagacctggcctccagagctatacccgaaattcgaacccagacccagacctgaggcccggactcggacctgacccatagtcggtgttggggtcgaatttattgaaaatatagtataaccttacacaatctattaatactagttaatgccaatatagtattacattaaataatacaaatacaatacaatacaatcgaacacaatataatacagcgtaccaaataaaatttgtttaattatgcatgagaacgagaattttatatattaggagaatcacctcacataacatttttttaattttatttttacggtttaagttgctctcgtggttactatgtaaatttctgtaaaaatacaaaataaaaaaattgtttagaatgtaaaaataaatatatatatattattttataaaaataactatttattatatcatcataatctagctatattattattattagtagtaatagtagtagtaaaatttgtttatgtacatagacatatgcatttatctgttattatttttatttatacatactggtatctaaaaaaaaaacaataccaaaccaaagagaaatatatgatttttttataatcctaatattttattttattttatttaaatttattatttaaataaattttagttaccttaatataactaaccgaaatatttgagtttcacctttttttttaaggaattaacattacacatttttaatgtagttagaatattatagtaaaaatatgggtcgggtcgggtcagatctagggtgcgagtctaaagttcgaggttcgggtacaagtctcgggtcctggagccaagtccgattttgagttcaggtctgtggtccgagtttgagttcgagtctgggtccaggggccatggtttaggttaggaccaaggttcgtggtctgggtttgggtctgtggtcaaggtttgggtccaaggtctagagtcctaggtccatggttcgggtttaggtttgggattcgagtctaggtcttgagtctacagtccaaggtttgggtccaaggacgaggtcagggctagggttgggaccgagtctgggtctagttccgaagttcgtgctgagatagggtgggggtcgcattcgtgtcgtgatttggtgtggtgtggactattgaatatttttttaataaaaacatctaaaaataaattttaaaaaataatagtcaaacattattatatttttaaattgagaaaaaattatttctcgttctcaattttaaaaattgaaaatacgacataacaacctctaagctttttaatttatggcgtatttggaaaatcgtgatgtaattaatttaatatgtttgtctgaccatacaattacactataaatagaggtaattgacaggttataatttcactctctaattcttacggttcccatgcgaaatgaatgtaattagactgtataataaccaaaagctttcaattttaaatattaactactgaaagagatattatttttcattaatagttattttgttaaacataatattgtgaattcatatgtaattatcacctcatattccaacacacctttataattacactatctagtaactatacagttataattatcacctcatattccaacacaccttataattacactatctaataattacacagttacttctaatcacattattagtaaataaaaataagaaagactttatctcttataagagttcatttagcaaaaaaaaaagttcaaatgttgtgttaaagatgcgaattggtgcataacaaatattgtatttgccttaaatacaaagtttacatcactctaaatgtattatttttatttactttcgggtaaatactattttggacnnnnnnntttgcaaaagttatcaattgaactgtctgttttgttaaatgacaaaatggaccatgtatttt

SEQ ID NO: 113053 - DNA, 1083 bp, Cannabis sativa
taatcacgatttccgtaaacctcgttgattagcaacgagctccacagtacgtttaaaaatcacgtaacatgcctaggctagttagggtgttacagtggtcataagctttagacatgtcaagcttaagaccaacaaacccgtaggctcctcttttgttttggagagaatccatcatttcgtgagctaaaatattgttcactgcaatctaatggtttggtacaaaggtagattggaatggtgaggtaatcttcgagagagtagtatgaattctgttagtattaatcttggcaatgatcttataaacaaagttccaaagtaggtcagaaataatcacacttagaagcaccccaacctcttagggataagcactaaaaaagtctggtttagctccttcgtaaattccactatgtgaaagaattctgtaaccgtaaccaccacatctggtcccacaatattccagtgtgcctggtaagatctgcctggcataccatcaagtcctagtgatttcaactgtcccatagaccaaacaacccttctaatctcttcacttgaggggattttcagaagatcttcattcagggtagccaaaatagagggagagaccaactcaaagagttgcttccccaagctgttaggggtggatcgatagatatccttaaatttttccaaaaaataaaccttaacattgggatgaccagaaatccaatgtaaccccatatctgagacaacatcaatgaaatttttctttggacgaataactattgaggcatggaataattttgtattccagtctccatcgcaaagccaagtttcacgcaatttctgatgctaaataatatcttgacgagtctcaatctcttccatctcaaggaggatatccgcttccaattgggcattttccgaagagataggtcgcatttaaatttcaagaaaaaacttatcaagcaacttcactttttccttgtgaaatccaaaatgttttttattccaaaccgccaactgcttcctggtgtgagcaagacaagacatgaacagaaaacttctagccctagagacaacaagtgtaacaccctaactaactta

SEQ ID NO: 113054 - DNA, 2557 bp, Cannabis sativa
ccaacaactgaattcaaattcaaaataagaaataatatttgattaaaatttgttctttttttaatggcaaaatatcttataacaattctagaaataatattttaatttaaatcttacagataatttacaattgatttactgcacataatttatgtagaagtgagaaagcatagttctcaataataacactcttcttccccattagggtgatctcaaatccttatctgcgtgtataagctcatttttcacatgcctttcaatactcaaaacttcattagtttctgcactacattggcacgcctaaataaatactgacagtacctttttctcataattaagccgaacaggtgaaaactgaagaaaaactaagcttgaattgactacaatgtgacttttttcctccagaaatcaacatttcattaagcagaataattccgaacaaaagaaattaagcatgaattgaccaaaacatgactaattattcctccagaagtcagcatttcattaaacataaccacaaagcagaaagaactattaattcatcaacagcgcaattaccttggggttgccgcgggtgcagaggtcagcaagaattcgactaagcgcatcagagctggttccagtaggtcctccagcggaggcggaggcaccataacggagggattgagccgaggatgccatgtggcttcctcaaaaccctaaacccccaatctctcgctcggctctgtctaggagagagagaggctgtgtcgatgataaataaaaaagaaaaaataaatatatatatttcagatctctactgcaatggcgtcgcagtagttatggtaaaccctagaagtggagggaggtagggtggtgaaggatgtggatgatggtgcgtcagaattacgctgggtaatgtttttgtctactgtctagtaatcatattgtagtgatgatatgatacccaccaacattgacaccaacggtacggtactcatggcacatgtgcttttctgtctctctctctctctcttctttttgactcgtttccttttcttaagtaaacgctccgatgcgctgcgtcacaaagtattgaatgcctatagagcattaacaagggtgattgactgattgggaatttgggaattaggagatgttatattgtcgtttcttacctgttttcgtcgttaaggcctgttataatttacaaatatttgcagcataacaaattgtaacatgtagaaacttgatcatttttagcagcaactactaaaattactaaaaaatacatgattatgttagcatttattagtatggagagtgactttaagctaatggtcaattctatcactaggtggaccctagttgtaatagagtcatgtcctcttttgttagttgtttatttcgtagtatttctagaatttataattttatgacccataacataattaagtgggtgtttacctacaaccggtttggtcaactttctacctccgccatttttaaaaacagattatgtaatgaccgagaggtctaaattttctatataatgaacattttcctttcaaaaaaaaatgttagcatttaaggtagtaaaggtagtaagtaggataagttgggtgtcacctcctaattgtgtcacatcataataactaatggttcaaacttaaaagagatataagtataattctatagtgactttcaatagttttgccgttaaaaacaaaattactctcctttccaaacaaacaaaaacttttgatagatatacagtaaataaccatatagtttttactccccgtgacttggagtcatgctcatctattcgtgttgtttaattgtgaacttttaaatctttgaacaaaagttttgccaaagttgaggaagcaaatgttgctagagctaaagctttttctttgaatggcaattggaagaagaagtatcgtcgtggaaagagcaagaaaagggacgaagaagaatgccaacaagctctctaagaagaacaaagctgcaaagaacttcaaaaagaaggcattaaaaggaacttgctttcattatggagtggatggtcattggaaaagaaattatcctaagtatttggccgaattgaaagacaaaaagaaaggtaaatttgatttactagttttagaatcttgtttagtgaaagatgattgttcatcttgaataatatattctgaagccactgattgtgtttggttttcattgcaatctcttagtaatccaagggagttggctcctggagaagtactcatgggagtcggaagtgagcatgaagtctgagtgcaaactgttatacaaccactgtaacgtccccgcttcaagcctccattgagcccttacacccacagaatgatggctcttatacatgagtatgtcacgttagttgcttcttggaatgacgactgaccctacaaaccaacacgactgtttctagcgtgctttgtcttcacttgcacacttcttgggaagacttcccaagaggtcacccatcttgaaattaccccaagtcaagctcacttaattgtggagttctttctgttgggaattattttac

SEQ ID NO: 113055 - DNA, 2274 bp, Cannabis sativa
  modified_base (1412)..(1416): a, c, t, g, unknown or other
aaagttcaaggacatgatttagtaaatgtcaaagttcaggagcaaaaatcttaatttagccaaaaaaaaaaaaaaaaattaatataaaaaaaatttcttcgcttgtggaatcttcgatggccccatttggtcccaccagaatatatattttcttttatccatttttttagtttcaaccctttccagcgaagggtgatggtttaattttgtactaaagctttgttctatattctttttctctgccactctttcataaccaaattattgaatcaacttttggattcatatcatgtctggtactgaaaaaaaagcccaaaatcaacattaattagaatatttttttaaaaaaataattaataataatattgtcaagctgctaaaatagtgattatgttatccacatgtacggttggtgaagctattcagaaattagtaggtcatgtaattatacctaaaaaagtggttaaaaaaattaaaaaaaaatggaagaaaacaaattgcaaaggcaaaattccttgtagaaaactaatttgtggccccttttttaagtatttattacctgaacacgcgtattacacgcggagaagcagaattttggattttgatttcattttttttaatttaaatttatttcgtgtgttaaattacatacgtgtgtatcttctagaaagtttgatagggatggacattgctataatatttgtagttattattgttttttcacttagtgaaaatatgatgcataaatcacaccttataggctcacattaaatatataatataatttttctgaatttttttttttatggatatgtgattgttagatcattggtaagtcatgcaacctgtgagggacatggtttggcctatttataattcttttaatgtgtaatcacatcatctctcatcttgttccttattttataaaatataaattaaaagtttggtaatttttttttttttcataatttcccttttacgctggaaaaataatgtttggtgatataataaaattcatgatagaattgtcatgtagtagtatatcttgatataatttaaggaagggggtggttggatatttgtcacttttgaatgagagtttccaaaattttcaatgtggtgggggtaaaatggaagaaaattaatgttcacgtaccaatttttcttgtgccaataacacaatataataattatttcttattgtttatttatgatatatagatttatgactcattatttgtaattatatggttttattgatcaggttgcgatatttaattatattatatcctgacctatacatgcattattgcctcaagcttttcttattctacatcatgtcaacctttaataaaataaactactaaagtgggtaaaatgcctccacaataacaatatatatatatatatannnnnatatatatattttttttttgattatggttgaaaaattatatgattttccttcaatatatatttaaattgtatagagtaacaaaagtaaaaacttgcaacgaaaactgtctttcttaattttcaaattttcttgccctttttttctaacattctagaacaattattagcccatggtcacactccaatattaatgttttaataacttttattttacatatttgcttaatttcattttggtaagtagtatctattttttatgtttgatgatattgtttcaatcaataatactattatatgttggttaccactactaaggagcagcagctcaaaatggaaacaccttgatgctcaattgggaagaaaatgagcaaggagtttctagttaaaaacatagaaaaaagttgctgcaagcttccactaatccagaatctatttctcttgaataacattgcaaagaagtatgtacgagacaatgtaacattcttggtcatagaaaatggtaaacttaattaggccattaaacttgttaaggatttagggtccagttccaccacctctaaaattgaccccttcatttatgagatttcattgacttccaaaccaaaatggccttggtggtaattaatacaagcaataagcaacaatttgattgaggaccactaaggaaacttgaagccaccttccatagacgatatggaaatgcatcatgattatattttttcaaattttattctagataggaaaggggaagggaaatttacaaaaatactgtaatttgggttaatttttacaaaaatactgtcatatggaaaaaatttcaaaaatactgtgtttttataaaacaccattaaaacacaa

SEQ ID NO: 113056 - DNA, 2250 bp, Cannabis sativa
aaaaaaaaaaaaaaaaaggtataggtagtataaatgtaaaaaacctaccatagtataaatgtaagatttaaaaaatatagaatattttgcgtaaaaatcctaaattataaatagttctatgagtaatttagaaaaaaatatactaaataaaagttatgcaactcttagatatttttgtgtgtttaaaactaaacttagtgagaaatatttataacagttaattaaagtaaaaaaaaaaaaactctttaaaagcaatgtgggactagatttcattcacaaattttatttctacatcaataaaaatgacatacatagaaagaccaatgaatgattttgatcaagggtattttcatttgagccttctttgtgtaaaaatttttaacgtatcaactaatcaataaacgcacgcgatacatttgaattattttgtcactcatgctaacaatgatatactgcacttaaaattcttttctgatatgtcttacttttcacattatactttatatttgtcataaatatctttatggttttacaaaagcttttctaagaattgagcttcattcaattcttatagaagtggctcatcttttctttcacatatttaatttttttaattagaagcaacaagtaataatttgcacaaattcatgatgcacaagaaattatcaaaaataacttaacatttttgttatgagcatcactatttgatcatataaatggatgaggatgagacgtaaacccctcatgataacctaacacggtttttatagtttagttgtccactttgaacttatattttgaaatcgctagtacattagattttgtatccattgtgttgatttattcatacataagtcttattcttattcctcttaattattttttaatcaactctcaattttaactatttagtgaatagagataacttcaactaagagtacgtaagaattttctaatgaatatatgaaacatatatgtgaatgattatatgaatgcagaataaaatatagatcgaatatacattttattttaactctcttccacattatgtagttttcttaattgtagatgaaaaaatcaattacaattgatacattctttaaaagaaaaaatgttgaagtttcaacatctgatgtctcatcaaatccatcagtgaatataaatcatgaaaattcgaaaaattgcccaacaaagtctttaagacttgacattaaagaagggtttgatattaatttattagaacgtgatccaagaatactcctgctaatataagagtatctacctgagaatcgtgaggaaatttgtagagcttatattaaagttggtccatatcggattatactttctagctataaaaaatcagaaaaagctcattcgcgttctttttcatcatcttggtttaagctatttccatcttggttggaatattctcctaaagtacatgttgcattttgtctaccatgctttttatttcacactaaagatgcacatcttagattagatgtatttactattaatggatttcaatcatggaaaaaggtgaggaaaaattgtgtatttttagcacatattggaaacgatataacttcacctcatagaaatactaagaaagcagttgtagatcacaccacaagaaattgctgacaatagacttcgtttgaaaatatcaattgaggggattaggtggctcacatttcaagcatgcccttctagaggtcacaataaatctaacacatcaattaattggggaattttttttaaaagttattgagtttcataacttcctataatgataaggtagcaaaagttttgggtaaagctctacgaaatgccacatatacatcaccaacaacgtaaaaacaagttttgcatgtcttgagaaataaagtgaggaacacgattcgtgaagaaattggtgatgcaaaatttttagtaatagttgatgaagcacgagatgaatctaagaaagagcaaatgacaattgttttgatagttgttgataaagatggttgtgtgcaagaacatttttttcggacttattcatgtcaaagacactgctgctttaacattgatggaatgtattttctctatactctttaattatagtcttgatgttcaatctatttgtgggcaatgtcatgatggtgctagtaacatgcatgtgttagactttttatttgggcttacattaacttttattggttttattaaaacttaggttgattggatagttctttgctgtgttagccc

SEQ ID NO: 113057 - DNA, 4355 bp, Cannabis sativa
  modified_base (4270)..(4278): a, c, t, g, unknown or other
aagcaatacaatgcatttcttctaatctcttcttttctgttttaccttcctatatgttcacttttaacttcaatttattttatattgtctaagctgactaagtttattgcagatctctgaaataaaagttgctgacattgctgatgtagatctgtcttctcttggggttactaagtttggagactttgcagttgaagtgatagacccagtttcggattacttggagcttatggaggtgtgaagcaaaatacatgcatctttagaattttgacttatgttacctgaaaattataatttgatcaagtatcttatgtgattttctgcaggatgtatttgatttccagcttattaaaagtcttgtatcaaggtctgattacaggtattacttataactcatcatgcagaaattttttaggcctttatgtttgcgtgtttgaatttagctgtgttgcttgagtcaatgtgtaagattgggtgttgctcttaggtgtcattgtttaatactgcctcattttcaggtttatatttgatgccatgcatgctgttaccggtgcatatgcacagcccatttttgttgataagctcggagctagactggtcagtaattggtttggtggattaaattaactttttatgagctagctagctggaatttgagttcctgatgttagatgttaggtatgtcttgtaggattcaattttgaatggagtgcctttggaggactttggacatggtcatccagaccctaatctgacgtaagccttgaattgtgaaatttctagtttgttatttagatgacattagttaatttttactgttaatcgtcaaacagctatgctaaggatttagtcaacattatgtatggtgataatggacctgattttggagcagcaagtgatggtatgtaaaatttcataaatatatattagaaattgcaataaactgatctcattcgtactctttattgaacttgttttggcaatctagaacatgggtttttaatttttatttatgaaacctgacacttccgtctttaatcaggtgatggtgatagaaacatgattctgggcaaaggtttttttatcacaccctcggattctgtcgcaattattgcagccaatgcacaaaaggcaattccatatttccaaaatggcccaaaggtatgaaatcgtgccctctttacattatgtattcactcatctaacattttattcatagaactagaagaaagtgattttcttttctgttttccaattttcctagggtttggcccgatctatgccgacgagcggagcacttgatcgagttgctgaaaaattgggtcttccattttttgaggtttgtgataggatctagatctggaattagtgtgaagaaggttgctgaatctttattgctattcaagaatgacaagttcagtgaaaacccaaactattcgagtcagtgtggacagtccgcaaagtattttcactttcttacactatacgaaaaatcagaccccctctaagaagatagtactggtctttaaacaacctctaattaaaagtaataaatgcactcaagttaactagtaatacagccagccctaaagtaacataagttatacagttcaacaataactctctaactaacttgctacctattcttggagctggatatgtttggcatgtaacatatttgactatttgaggcccagcagtttggctatctttaacatttttataacattctaaaagtagtaatggaaatatatgtatcctccattggagtgggagtaatcaaaatatatgtatgctcaactggactaggagtaatgaaaatagaagaatgaaaaggaaaaggaatatatactaaccaaacaaagaaataaaatcttttccattccatcatttccttcgcctatgggtttcattacttacacagttctttttcaaaccaaaaactgtattgggccaggttcccactggttggaagttcttcgggaatcttatggatgcagggaaattatcgatttgtggagaggagagttttggaacaggttctgaccacattcgtgagaaggatggaatttggtaattatctttattttttacacttgtctcttgaattttactttggaattattgtatcttgctttttctccatttagctacggatgattttgtgatcttcctccctttgctttaattacttcaatttacgagtgatttcatggagtaccggataataattaacctttaacatttgtatagttagctgctccagcataatgactaacatcttcaaacaatttggtattttgatttgttcttacaacagttttcattggttttgccaaaaattgaaacatgaaatagagggggaaaaatccccttttaccgttctttctgataaagcaattttccattttccttctttaacataaatattttgaattgcagggcagtgttagcttggctatcaattattgcttatcaaaacaaagacaaaaaatctggggaaaagttggtctctgtcgctgatgttgcaaaggaacactgggcaatctatggaagaaatttcttttctcgatatgactatgaagtaattatgtccatgacttgaataagttgactatttttctacactagtacaaactcctagtttttgatttacaacttactgtgttgtgagccacattaaattgtgcttttggagccgaagtaaagaatttttctcattttgaatctttttccaggaatgtgaatcagagggtgctaacaaaatggtagactacctcagagatttgatctctaaaagcaaggctggtgacaagtacggtaagttttactatgtttctttgatacgggcacagcctccagacccaattcgggtactaattaagaatttattgtctcaggaaactacacgctccaatttgctgatgactttacgtacactgatcccgtaagtttaaagtgatgctgcatgcttgccatctttacctactagcaagttaaacccaaaagagacttttgggactttttgcatgctatgtttcttttaactgatatatttattaataattatcaggttgatggtagtgtagcatcaaagcaaggtgttcgatttgtttttactgatggatcaagaatcatatatcgtttatcagtatgtgtcgatcctttcccttcctaattacactccctttcacaatgtttccatgttcattagtttcatggcttatttgtacaggggactggttcagctggtgcaactgtccgagtttacatcgaacagtttgagcctgatgcctctaagcatgacgtggatgcccaaatagctttgaaaccgttgataggttagttcattgtcacttctacagtaaatatctcatgtaaattgcttgtattattcttcatattttctttgtttatggtctatagatttggctctgtctgtatcaaagctgaaggacttcacaggaagggagaagccaacggtcatcacatgaagcaaaaaagcaaaaagtagccgagggtgatcaaatatcaccccgagttttatgctgaggcataattggccagccaccctttgttttttttgtttcctttgtctcgggttattattattatttatattggtccagttcaattttgtttgcattttaggtaatgaaattaataatgtggttgagaaatgagaatcccatctgcgtaaaacatgtgaatattacataaataaaataaaatgctaattttccccctaaaaaagatgatgcctttcttgctttgctgatcttcattgtctttcaagaatcgaaatggtcataaatgacagcaaaacatgaagtagctgctttaataaaaagatgaaattaacaagttttaagaccctatgtggattttcgaagaaaattaataattttggctaaatagtctgaagatattagctatttaattacagcagtcatgatgtggtgttgtttggcactgtcttagtgtaatcatcaatatttttccttaatttttaaaatatattatcaaattttactttttaaaatactttactattttttttttatatattttttcgtagatgagctctactatttttttctcaatatcattcaaacaatatatttttaatatctataaaaaaatatgagcaaaatagaaataaaaaattttcaaagcatgaatagcaatatagcattatctaaggggagttctacgtgtacctcataaaatgataattacacctcattataaaaaaaataaatttaaatannnnnnnnnaattactcttaatattttttttaagaaaatattttcacattattttatgttgatttcaatatttattttgattttat

SEQ ID NO: 113058 - DNA, 2175 bp, Cannabis sativa
  modified_base (245)..(247): a, c, t, g, unknown or other
  modified_base (715)..(717): a, c, t, g, unknown or other
aactaaagaaaagagaagaaaatagagaagaaaagaatgctgagaaccctatgaagaatgcctccagtattgcagttgatctttgaaattcatactccgtcttattctctttatttcctcccaaattgcttgacaaaatcaactgaagttcactccttatatagccattgaggtactaaaatgatagaaaaacgtacgtgctaaaaatcctattctgcttaggattagaaaacctattctgcttnnnattagaaggggcagtgagttttctgctgcatcgactgatattattttggcgagtggtgatggacacctgttgttgtatttttgtacaaggacaacatgcattggcacaataggtattgagtcattgacagtaacacaggatagaccagaggtaaattgagtattagagaatgtgtcatgctaagtgggaaataatgaagaaaaagagaattgaggggcggtagaaaaggatacttgattgtgtgctgctgaggaagagactgtggcagctttatgaggataaaagtctttattgaacaccacattaggggtggacaacatccaatccaatccaattgaaccaaaccgatccaatccaatctaattacaaaaaattggatatccaattacaattgaattggattgggttctaaaagttggattctaattggattggattggttattggaggtcaatctcaaaatccaannnaaaactgatccaatctaattacatttatatatgttaaaaaattatttatatttaataacaatatattaaaaaatataatatatattaattatatttttattggattttcttttgtgtttaatttgtaatatttgattgttttgtgtatttattttcatgatattttgttctattttttttatcaagaatgaacaatcttcattaatcatattttgttctattttattacttagaaatttattgttttaattatttgaaacctttagttgcattacattgtaacgatggaatgtttatggagtattaaacttatgtaatgggtgatatttaatttttacgtattttcatcattttttatgttaatattaaaatttaggtgtgtaattggatatccaattaaaaaaccgatccaatccaattagtaattggattggattttgaggtcttattggattggatcgaatgatgattttccaaatctaattacaaattggattggatcgaatgaggagaaaaaaattggattggatcagacgcccacccctacaccacattgcatgcaatatatatattctaccttcagaattttcacataggtatcctttatgatgaggagaataacctagaaaaatgtattgctgtgttttgaagtctagtttgtgcttgttgtatggtctgaggtgtggaaatcaagcatatccgaatggattaaggatgttgtattcaggcttgctgtgaaacagtacttcatagggagtggaaaagttaagaacccttggaggaattctattaatagtaaagacaacacaacaaaatgcatgccaccagtaggacaagtcaagaccagaattagccaatagggttaggccattttcattgatgtggcaatatttttgttaagcactgccatttttctcatgagcctgaggacaagggctttaaaagtgaataccttgatcaagtaagaaccttttaaatggcctatactcaccaccccaatctgcctggacaaccttaatgggaagattaaattgtttgtcaactaaagctttccatttgataaaaacttcaaagtcttgacccttaagagtttgtgggaaaatccatgtatacctactataatcatccaaaaaatgtacataatacttatatccttcttttgaaagagcatgagatggtccccacaaatcaatatggatcaaagcaagtggttgagatgcacgggtattggacaagggaaaaggaagagaatgactctttccttgttggcaagcattacaaaaatggatatcttttaaagtgctaatgtggggaaggtgtggtagtaattcactcatgatttgatcattgagatgaccaagtttgtgttaggctttatgccctaaataaaactctatttcaatctaatctctatcatttaaatatcaataaagagacagaagtattttcatcacttat

SEQ ID NO: 113059 - DNA, 2591 bp, Cannabis sativa
tctgatcacattttgataaagtttattgtcactaacttaatttatttttttaatgattcacatttagtatattaattaaacaatggtttactttgtcctgctttagtttcaaactactgcaccaaaatgttgttacatgcgtccaccaggtggggttctagctccgggagaaagccttgttgcaactggtaaatattacttgggtttagctcttcttccaagtctttcacggcctcgatgttgtctaactctggttgtttattatgaatcttgattgatagtgtttaggtttgtggaacatcctgagaacagccaaaagcattttgatcataacgccaaggtgaagttcaaaatcatgagtttgaaagtgaaagaagatatagactatgtccctgagctggtaagaatatgttcaaaatgctcatatgatgtttcgtttttgggtgcatgtacccaatattactgagcttattgtgtttgattttcatttattaaatgtgtgcagtttgatgaacaaaaggacgaagttgtagttgagcgaattttaagagttgtgttcttagatgcacaccgttctactcctgtaagtatgatgttctgaatataccaaagcaaatgttggctgccactaagaatagattctgaatgaaacattggcatgttgttttttaggcgctagaaaagctgaatcggcagttagctgaagctgaggctgcagttgaagcgcggaagaagcctcctgcagatgcaaggcctcgagttgtcggtgaaggtcttgtcattgatgaatgggtacatagaacttccggttcccatacaattcttgaatcatactttgaattggttatcgatgttgaactgactttgttttgttttgttctttcttctttcattatcatgttttacagaaagagcgaagggagaaatacttggctcggcagcagattgaagcagtagattccttgtaaaatgcagttttctcgtgcttttgttaaaggttttcgcaagctttgaagcgcttctatctgtcggccttcaaaaatgatagattggggaagtagtgaaatggcttttgttagtctagtaaagcataacagtattgtatagaggcgaagaagaagaagaagaagaagaattgaaatgttttactgccaatatttttgtgaaaacgagtcatgtgaggccatgtaacctaacccagggctgagccttgtgcctgttgtagatagtaaattttgctgatgaaaatggaaataaaggaatctggttttgtaaatactttgttcattaaagtatctgcttataacacattaagcctgctccctcgctagtttgcaaaacataataaaacagagcactctttctcattgaatgcctatgtcaccttccacaagagaggacgaaatattctacacagaatagaaagaatacaaacaaaatagcaaacagttattaaaatcttcacagagcctcactaccatattcttatccagtttctgaccaaaggaaggacattctatatttactaatttacacaagtattaatattatagcctcactccagtctctgcagattgaccgtaggaacattctgtaaatcttgttagctgatctcaacttcaaccaagtacgttgaaatcgaattctttagagtgacaatcactcttcaaacgttgattcacaaaaattgacaagatacgatcacctcctgcccaataattaaaagtgagaacacttaaaaaatgaagtagattttgaccttcaatccaagttccaactacattagcaacataaataatacaaagttttgagtttataatgttgttatacttagccctaattaaatcctaagaaataaaataataaataattaaagattaggggaagtgtagagagtccatagaatagattttacaatgattatgatctttcaataaaataattcagctaaatattaactcacatctgtgtcaattaataaatatatgaattacatacatacaattatttgaatattttaattaaattaatttacacaaaagtaatcactttagtattattttatttcaattaatctaactaaaatattagatatccttaataaacatgttgacgcagaaatcaggccaacaccgtctctctaaattggcaagatatgttatactagttcactttccatgtcgcgatggtaatgaagttacgtctacttcgagtttttattatgaaaaatgagctagtggaattctctttttataggcaaggagatccattaaaatatggaaaatttgcgacataaattgtgtttgttgctaataagttcttaaatttaaaaatagtggcataaatatctagattctcaaaattaacaaatccattaatacccaatttaacaactatgttaattgctcataaggatgggacatgtcaatgttctattggtcagaactaattttttttttttttaaaaaaaaaacctattttaataattaaaaaaataaattaaaactaattacatatgaaattaaaaagggtaaatactattttggatcctgtgttttgcaaaagttaccgattggaccctctattttgtt

SEQ ID NO: 113060 - DNA, 2428 bp, Cannabis sativa
  modified_base (2009)..(2020): a, c, t, g, unknown or other
atgtgtaataccttgttcaagtcatggtgatcctcactagtctatactcaaggttgtgagtgagtgtattcatgtatttttatatatatatctttttctacttttcttatatataatatattatatattatgtgttataacatttatttaatctctttgttggtctttgtaatagaatctctaacattaatgtaacataagaagaaatttaataatttttttatacattttaaattttattcaattttatttctatttttattactattcttattcttattcttatacttatatttttatttcttcaaaataaactaaactaaagtagtatccaacactaattttatatatgatatctattaatgttactaaattactaaaatcaataagacagtgttggtacgtacactggtactgtatatatatagcaatggtctagttaattaaaatggcttttatgacaatattaagataaaatattcaacacgaacaaggccctcaaaaaactggcttaaacgatgattcacgcggttcgccggcgcaggacctcctatacacggtttgcatgcttaccctcgtacgtacgtatatatataaagaatatcaacatcgttaatttcaatagtgaccaagacaaataaaaaaaagtccaaattacagttatacaagatattttttagccaaaaaaatatatattatatataaatctattttgtgttgtccttcgtctaaaattttgcctatatatacacaaaaattgttgttactaacctgatatataatgcagccgtaaattggtgagaacttagaattattaggccacaaatattggttattattactctttattaatattattatagagatcaagatcataattaactaaatggggcgtaacaataaatccacaactattcatttggctcccttgattcttgccttgaggattgttgcactcttattatttgttggttcgattgttgtgcttcttctcgacacctacaaactcagtgatggagataaaaccactttcaaggatgttaactcgtacaggtacgtacctgaaaattaactataaatacacactcacatatatatatatataaatatatatgtgtgtgtgtaatactattaaacatgaatattatagggaaaatggggtcattttgtgctgtacgcagggaaatcacatgcatattttattcgaaagcacaattcaaataagatgttaaatcattcaaaaaaatttgatatacatataaatatatataacttaattatgacttatgtaacaaagttcaataagtagatcctccccaacagcctttcccctgtgaatacatatacgaccatttatggaatatatatttttatatatttatatacagatatgtgattgggacagcagccattggagcagcgtacctgatagtgcagcttccatttgcaatatattatgggtggaaggggaagaggttgataccggggaaagtgttggcggagttggatttctacggagacaagttggtgagtttgttggcggcgtcgggggtgggagccggcttcgctaccacttttgagcttaaggatttcgttcctgatgctatggacactcttatattgtttggggaatcagctggcattggtgctgattttattggtttattacaagaagaaagaaataagataactggttttcttaataagggctacattgcctctggaatactcctcgccgcttgtgttttcatcatcattgtttctgtgctttcttcaatcaaccgaaccaattaattaaaatgtgtatatagcttatacatatgtaatgagatttaatttatcagtgtaataatattgtcatcacgtgatgatttatttcagtattatgggttctttaattatttttacattttatttttatggacaataataaagaagtaatttacgtatgtctctgctagatataggcacaccaagtacactacatattggttttttttttttttttnnnnnnnnnnnntttatttatttttttttaaatattactattgagttacggggcatcaatgcgtagtctgaaatgacaccctataatgcgaacaattttctataatttttattgatgtagaataaattggagtaatagcgatataattactggtcacaatgatagtcgagaaactaaatcacaatatgttgtgttctctactaaagacatgtgtcaccaccaaccaaagccctaaccaaatttgtgcttaagtatttaacatctaaacacaaacatactatgtatagcatttatgttgtatttgtattccattgtgtctaataataaaatagcaaaccaacaatataatgtcactacaagaatgattagttttacaggcgctttataattgatgcccttgcaaaagattagcaataaagg

SEQ ID NO: 113061 - DNA, 4259 bp, Cannabis sativa
  modified_base (4098)..(4099): a, c, t, g, unknown or other
tattttaggaatctttttaaattagtggaatcaatttgtacaaaaaataaaggagtctaaattttgatatggggtattttattaggggaaaaatatgaaatttccctactaaaaaaagaattaatagagagcataaatcattatagaaagaaattttttaaaagaaggcagggatcaaggctaaacaatcagactcaaaataattgagaggaaattaaattccaacaaccaattcaaagcaaccatagagcgacaacttctgcctgaataactatgagatttccttgagcccatcttaatccaaccaaaacaataagaaatgcttgaaaagttgatacctaaaccgaaaaataccaaataaataaatttagtaacttcataaataaataaataaatttcaaaaagggctaaaataagtaattttaaaattatgtcatataaattaataacatagtaaattttttaaaataaaattgtaataaaacttaggggaattaccccatatgctatttttttaaccttttttttttccaaatttacggtttggatttctaaagtagttgcagcgctagttgcaataggggtttctatactattttttgttgtaatttaggttgcagtgctagttgcaataggagtttctatgtaaaatttcgtaaaaatgaaaaaaaaaaccgttttgaagtgtaaaaataaaaaagctcctaaaacttatttttaaaagtccttatatcttaagatgtccaaatgagttaaatagaaatacacctatatagaagatataaaatttaaataacacactagttggtaatattaaattaaatgaaactttttatttaaatgttaacaaaatattattttatgaagaaaaatttatctttgttatctgtagaacagatagtttgtcaactgctaccttgtgtcattcttagtataaatctaaaataactatcatatatggtaaactatcatatatggtaccaaacaagataaattaagcacataaacatactactacacaagatacaaaacaaatcacaatttacacaaacaaactatgaaacttatggtaaaaaataatcttcaatagatattataaagtaaaacttaaataaccagtaaagcttctttaagaaaaaaatatataaattagagtgaaaatagagagtcatcttatcgaaattagtttctgatttatagagctatctataagtttatataattaaataaaattatttaaaaagttaagaaataaataaccgaataaatggtaattaatgagaatttttaatgtaattaattagattttaaaataaaagataattaacataaatgatgaaataatgtttccaagattaattggaaatgcatataaaatttaaatatgggcatcaaaaatatttaaacaaaattaaataagatagataaaattataattgttgaccacctaaagtctaattaaaattaaaaaaaacttttctaattttaatataaaaaggttttataataaaataaaataaataaaatctactaaatttaaaatttcagtaattgaaggtaattttggaaaaaaaaaattgatcattaatactaatttaattatataaaaaattcaattaattttatatattctatatattaaatgaaaaaattaaaacttaggataatataatatataagactttttgaacaataatatataagaaaataatctatcaaaatcttctctttttttaatgtctattgttatcccgatttttatccacatgacaaggtatgtctatgtggacaagatcaatgtcacgtggagtacaacttgttaacaagaagaccaagtcatctagacaacacttcagctgacggaaagtttgagtacctaagagggacgaagagaagacgaactagccaccctaagagagttggggtggccaacataggcaggccacccttcagctattgtagggccagtcagcctgcacctagcaggtacttggccagctagcctgcacctggcaggtacttggccggccagcctacagttggcaggcacttgacgtgcatccttcatctgggatagcaagctaagttgcgatttgggcttcaacaacccataaaaataggggagaaatatcagctactcccctattcttggggaataattaaccctttaaccaattattatttaattacataaataatactttataattcctattttttaggaattttaggttgttatcttcatgtaagagcattagcataaccctagttctctaagtcctaagcctctaagctcactaaagtttgaaaccctaactctctcttccctttccctctcacacacccaaggcttcattctcacttgagatttaccaacttgattctcatattataatcttacgagagccacttcagattccacaacccttgtgatctaattggtattatctctggtaccaaaagaggagaggtcattacccgctagctaagggagccgaacctctatacaaatattgtgtttattctactattctgctcttatagtgtacacgtgttaagcatctgtaataaatatgactctactgtcggttgaccaaatctgagatcaacagtttggtgctttgagagcgatttatcaatttattttatcaaacaccatggttagcataaggagaactccggctacaacttctgcctcatcgggtcttccacaagaccctatggcagctgatcctgatgtccgtgttccagacacaactgtaatctccatgaagctgatagactagtcaggtggacactaccaaccctgttggtcttaatggccaacctttgctgccccgggaggactctccgctggtgcctcgtactgaaggaatggccaatgtggagcaacccccaagcaccacgactggatctggtccccggtattatgttggagagatggggtcaggaattggcaagccagccattggcgagccccatgtagacttgggagaagatcttgagtcagccagacttagaaaggtcgtctgtcaagtcagccaaattgaagaaccacgcgttgttggctacgatgtattcgtagaatagagatgcaaatttttgagatggatggatgatcaagagtacatcctctgatctcaataggcggagctagactacggaacagagaagctaacgacttgataaggtagttcaatgaaagaactaccagaagaggtcaagatctcatcaaagatcctatccaagggagactagttgacagatcgggactgtccaaccaagttcctctggaaccaagatagaccttcccctgcgcgaaggaggacaagtcttaccacgaagatctagtggcgagaatagctaaaccctgacaaccagtggtttgagggccagttagggatctctgactcaacaacacccatgattggccaaccttcggccgaccagcccttagtggtgcacctctggccgaccaaaaaggtgaactctcgactcggaacatctaggagcgagtaacccaaagactagtctttaaccgactaggtccaggaacgggtggaaacacccaagataacaacaacatgagaagtgagtccaaccacttcagatacttatatccacctaactccagcaattgttgtgatctacccctatcacagttggaacttattttactaagatctagatttactaacatgtatgttgactaacaccctaaatatgaatttttaatacaatgaaattaaacacataagagtttataaaccttacattaacggcagtggaataatatgactcattccgctccgatctctaacccttgttcctttttatcgtagagtaataacaagatctgagcttggttctcattctttccttcaggttggttaacaaccgtcttgcacactacttgacttgctatgtgtgggcatggtactctatcgctatggctcaaattggtgaagaacaatgaataaggtgcaaaatcactatagaaaatgagtctctcatctactagttgacagagaatgaaaactaagcttgatttggttgaagtgagttgttggataagaatgagagcatcatgttcctttnntagtatttcaactagggtttagaatttaattatatggattaaaaataataaaataatgggcaaaaatcgcactagtggccgaccactctaatgggcctcctagttacaattttgccactttatttcaactatttattcttctttcaatagtaccatattt

SEQ ID NO: 113062 - DNA, 3906 bp, Cannabis sativa
gacggtggtaaccaaacccgaaggagagaaagagatccaggttctgatcttgataatgctctgagacagaaacgaatcaaggggttgagatcttgaacaaaaggagtcattatattacactacaatcaatgtaaggttttcttaaactcttatttgtttatttcatttttatagagatattcatatttaggatgttaatcaagatatttcttagtaaatctagatcctgataaaatattctcaacaattgtagtcactctggggaaagttggtccacaatggatttgcaacgacaatttgaagcaaagtatgagaagtataagagcgagagggcatggccatatgaagaaatcatttgcgtgacaaattgagaaggtgtgacctcccaaaaagtgacaccaagaggctggaagagcacattgctgccctgacaaagttggtaaacaagcatagcagagaattatcggattccaaagatgaggatctgaaaccttctgtcaaaagaatcgcggaaacccctcttcccaaaaactttaagatgccacacatcgagttatatgagggaagaactgattagtgaacgcgcttagccaaatacaacaagatgatgcaagtcgctcgagttagtgatgatgctaagtttctatgcttttccttgactttaactaagtacgcggaagactggtgtaagggactgactctgggatcattcgacagctggaaggatttacagtccacgttccgcaagcaatttactaccgcatgcgagaaagacatggagtcagttccttgaccaatgtcaaacagcaacccacttagagcttaaaagcgttctttcaaaagatgatggaggcgattgccaagactagggttagcgatgatttgaagttaatggctctccaatcaggattggttgtgggttccttgtgtggggagagatgcaaagaaaaagagctgaaacactatgtgagttcatttgcaaagcacagggcataattaaccttgaggatgcctacatccaagcattcggagtacctctagtaccaacacctacaacaactactctgagttttacctctcagactccttccccatgtttgtctcttcttgaatctcaatacagggcctcatagctccctaagcacagtttgatgtgccaccaacacaaacaatctctgtcaattttccaataatgagattggtggaggcaagcgcaacaatgatggatttgaccaacacaatggcaaaagaggaaaattcaacgattcccttatgccattaagtctaatggagaagaggagaagtgcacatgcttcattctcctagcaaaactcccaaatcaaagcatgcccagacagacctagcaggacaagtcagcaataggcagtcacaaggctggcctccatctccaaaggctgacctcctcttgccaaagctggtaggaacatgacctaccagatccggtaggaacatgtttgacaagacctcacacatgcaagcattatatggccggccagccggcatcctacatccttatgacttgcaaggtgcacagacaagtgccaacaactctgcccaaaccatcggtgataggacacttaggggtcgtcgtttgtagaccccatattacaggagagactagcaaagttagggatcactatgctcagacacttcgtcatgagcttaaaagaatatcctggcaggcaaagaacagactctaaacaaccaaagcttggagagcccacgagctgtttctcagaaggagatcctacccaagtcaatttcccgcacgacgaccccctagtcgttactacacaaattaggaatatgactgtagcaagatacatggtggagaatggaccctccttcaacagtcttttcaaatcaacatatgaaaaaatggggctccaatttgctgacttggcaccttacaaccaagtgatgtgtggcttcttttgtcaaggcatcgcactaggaaaatacaaccaccaaaactctgatggtgcagttcatcataatcgacgctccctaacctttcaatgacatgatagaatgatcagccctatacgacttgaagacggtaacaatccatctaccacctctgcctgaaattcctaacaaggttgggggtaggatgttgaaaggagaccaacaatctacccctcaaagttacaaccttagccttgttcaaagccaaaaaatagaagatccaactgccagatcaggaacgtacaagcttcatgacagacttaggccttcactgctacaaagtcatgccctttagagctgaagaatgtaggggccacatatcagaggcttgagaacaaaatattcaatgatcttatcgactgaaacatgaaggtgtatgtggacaacatgcttgtgaggtccaaaaaggctagggggcatgttgagtactaacaccaatgcttcaaaatcacccgaaatgctacaacatgaagatcaacccctttaaatgttctttcagagaaaatatacacaagatccaagcccttttggacttaaagtcgcccataaccatcaatgaagtacaaagccaaacaagacgcattgctgcactaagcagatttgtgtccaaggctaaagataaatgcatacccttcttcaacaatcttagaagcaacaaaaaatccgagtggacaaaggaatatgaaaccgcattcccagaggtgaagaaacaataggctcaaccacctgtgttgtctaaacccctagacaatgaagagataggcatgtacctagaagtcacagatgatgctgtgagtgacgtcctcacaagagaagaaggcaaaatacaacaccctgtgtactacattagcaagataactcaacccaagaggagcattgaccacatgcacgatgctggcatggcccccaggacacatcggggcaattgatgcacgacgaaacaaggtcagtttcaaagctttcaacaatgaggctgatcatgaagcttcagatgctggcctcacgctagcacacaaagcccaggctgaacaactagacatatcccacaactctcaactagtcgtaggttaatataatactcaatacaagaaggtgatggcctacttgagctaatatcaagacttgtaaagttagctcaaaggttgtactaaaagtcaagagcccaaagacgacacaacagctgacgcactcgcttgactagctagctgcacctttacaaccaaggcaaacatggtttctactcaattcttcaaagaactaagcctccctatttcaaaagaagtatacttgctagacaaccaacatgagtacacctacaatgacatatctccaaacaaaagccttgctagagagcaatgactaaggggatggctgtagggtgtccaatcctacagagcataacacactgacgtggtatcccaacaccacctctaagaagtgttactaagaaagaagctgaatagctattgatagaagtgcacaaaggctctacagcaattacgcaaggggcaaagccacccaagtgtaattgggatcaaactacaacatcaactaggcctctataaggctagtcgaccatgacctcaataggctagctgaccatagaatccacatcctggctgcccatagcctcattcaactggccaagcaatgctccctcaatgtggctgggcacgtggtcttaccctggccaggtttatccactagcaatcttctctgatacttctggtctatagttaccgagaggtaaaccacatcttgctagcgggatttcttgacaaaagggaaaaagaagagaccaagccaacttaaagcatcatgtctgtccacaaagagttaccaagtgttgggttttatggcctaaataaaactcatttcaatataatcagattgacttattaatatagatcagaaata

SEQ ID NO: 113063 - DNA, 4473 bp, Cannabis sativa
  modified_base (44)..(54): a, c, t, g, unknown or other
atagtattatataaaaatataatgtataatccaattcaatatannnnnnnnnnntacaatacgacctaatacggcatttcaaacgagccctaaaacaatagcgcttaaaaaatgaatagtatattcaaagaaggcaatatcaattaattatagaatatttagcatactgaaaaaagttcaaaagtaaaagtactatacacggataataatttagaaaaaagaaaaagctatttatccttccaaaaaagtactgtataaacttcgaaatctaatttttactagggggggttgctttctctaatctaatttagagaaagtggaggttcgtcatactgttttgatttttttctcaaagacaagatattggaaacttctggcgtgcattgcttggcaactaagtaataaccatatatataaatccctgcgttgtaactaaattatatactttattatattaattaatgtaactttgaaatctataaaaagatgcatatataatatacaacgtttgcctgcggtgaaaggatgaccaaagggtacattttagtattgcagtatataatatattttgataatgaagaaagtcaaaagttgaacattttccaattttttgttctgttccttagaccatggtacgtactagcccggccaatctgaagataaatcatcatatttttttaagacaaagtttgtttagtgggaccctactttttgacaaatagctcacctactactactcgtcattgacaaatggttttacaccacacagtcacattgtacgcagacacatttatttaacacaaaaaataaaataatgtgcttctccaaacaaaatcactttattactcttttaattaataattagctgttaagtaaacacaccaatcaaaagtttttgctacagaaagttcaattaacatatgcagtatgtaccaattatacaaagctacgtagctctctcactaattcttgtttagttatattgttttttattcttttttttctctctctgtttttttttttttttttatgatcatcgtgtgtgaattctactaaagccatgcatattttgtctacgtgttaggtgacctgccgaccctaattaccttgagaaggtcctctatataaacctcacttagtcctccgattaattcatcagctcatcatcacaaaataatattttgctagctagttaatacaccacctatcttaactaactagtatactataataacatggcttcttcttctttatttatgaccctattgagtttgggtctcctcatgctcgtcatggggaatgccaatgctcaactttcaactaatttttactcaaaaacttgcccaaaactcttgcccacagtcaaatccaaggtgcagtccgctatttccaaagagagccgaatgggtgcctctctcctccgcttgttcttccacgattgctttgtcaatgtacgtaatatgactatatagtacttctctctagctactagttcttctaattttataatacttagcttgtcctaagttgtcaaaaatcccaagctcatcacttaggctagtcgtacgtaagtctaaataagtaataaggatatgtatcgctaataatattttatatatttatcatctacttaatagacatatcttaatctttgcaaagaaaaagaaaaatagacatgttttaattaattttctagctatgtttgctatatgtgcaatttacaatatcatatgcgccctgatagtactatttaatatgtaataatattaatatttagagcgcataacacgattaactaacaagtgtacaatttttgtgtatctctaactttgttcatgtgataattctaaatttctttttaatcaccatatgatattagcggaaaaacacgtaactaggtagtgttttatacacatatcattgctacttatatatttatagaatattgatattaggcatgagtatgttatctagctaggatgacctattaaattaaaagtatatgtaaaacttaattttaacataaccaatatcgacatgaaatttttaaattggtgttatatattgttgggccattttacaatctcctctcatatttatattgaacacgtttctttctgaggaaagttaaataaataaataaaggtgctttttcttgtgggtatatggacatgtctcaaagtaaatggaccgacaaaatgtaaatagtgacatatatataatatcgtctgatgacaatattgttttatattatatataatcaacgtcgttttctgttaattaaaactaattgatcgatctctgatatagggatgtgatggatcagtgcttctggatgacacatctaacttcgtgggggagaaaactgctaatgctaatcgaaactcagctcgaggtttcgatgtcgttgacgatatcaagtctgccgtggagagtgtgtgtcctggtgtcgtttcatgtgctgacatattggctattactgcaagagactctgttaccattgtgagttcattttattacttaattaattattatttcaagtaataacacaatatttctttattatatacataattaattaatatgtttcaaaatgttgctgatccagcttgggggtccaaattgggatgtaaaattgggaagaagggatgccagaactactagcaaagctgccgcaaacaatggtattcctcagccaagctctaacttaaacaggctcagctctagattcagtgctcttggcctctccaacactgacttggttgctctatcaggttacctcttatccctttcttctttccttaaagataaacgtccccacattgatgaaaaaaaaaaaatgagacattaataacacagacccattgtttacttacttcatatatattatggttagtaaaaggaaatattggaattattgaagtgtcttttttcttccttcatgagtacgtatcaaatgaatatgtatttatcataactaattgaaatggtaaaatgatatgaaaattacaaacaaacaggagctcatacaatcggacaagctagatgcacatcgttcagggcccacatatacaacgatagcaacattgacagttcgtttgcccaaacaaggaaatccaagtgtcctaagtcgagtgggtcaggagataacaatttggcaccacttgatatccaaagccccacagcttttgacaacggttacttcaaaaaccttatccagaagaagggactactccactccgaccaagaactattcaacggtggatcaactgattccactgtcaagtcttacagcaacgcccagaacactttcttttctgactttgcctctgccatggtcaagatgggagatatcagccctctcactggttccaagggagagattagaaagaattgcagaagagccaattaataattacaattaattgatatatatatatatgagcttataattgatggcatgtgtgctctatattttgtgtgtgtgttttttttttttttttgctttaaacccaataaactatattaattatgatgttttttttttgaaaaaaagaacatattttctttctttctgaattattattaattatatgtttgtaggttctgtattcacaatttcacatatgacacatgacatgtagtgtgtgtaatattgatttatgaagctatcatcttttgttatatttttgttgaatcactttctttttatataaatattcttcgaggtttattgaagttatcgactgaaaagaaatatatgtttaacttgagtagtggaaggttacttctagtattgtgcaacgtgcactccaactattttatgtaaaacgaattagtcatcttcaggtttaatatacactatattataagcacatgcacacacagagatatatctgattcgttaaattcaacacgtctttaaaataagcatattttatttgattcttttgttcatttcaagagccaaaaaacgagtataatattactgattaatgctaatgcaatgtttattgaaaaataatcatttataatattttcggcaataacctttctattttgcagaattattaattatatacgtaatattgtaattataaataaatataccgttaattatttaattgatgcaattaccgttacttctgtacggaatatacatacaaatgcaagcaattcttttttatagtcaattatcactgttagcttcatcttttgagttttcttcttctctttatgcatgattttgttgaatttttaattattaatttcttttttccctatttgtttttctttttactacaatttgaaaagaaaatatcaactacacttagctattttattttagaaagtagtatttttatatatatatatatatatataaagtactatttattttttaagttgattatatagaaaatatatatttctacactgttactaagatgttgaagtcaaaaataataatctttt

SEQ ID NO: 113064 - DNA, 4305 bp, Cannabis sativa
  modified_base (3047)..(3050): a, c, t, g, unknown or other
attcaaatttgtgatttcattattcgttattagatcaaaattcgatggtttgatatttttaaaattaatatttatatatagtataatttgattagtaaccattcatagtattatatatatatattgcaatgttataatcattcataaatatatagagcatttataattatttgcacctgcaagctttcataagataaataattaagaccttatttgatgtcaaataatttaggctatgcttggttgaaatgaaagagggtagaatgaagggagagtttataagaaatgatgtgaagtaggaatgacagaaatgatagtagttattattgatatttagtattagtaataaattagaatgatggagaggaaataaatattccaattaccattttatcatgttttaatactttataatatatataattttgaaaggaaaagtgtttaatttttttttcttttttcttggattccctatttttgggggaatagaaatttggtaatttggagggactccctccatttcttttgtctttttatctctcttttttgccatgcaaatgatttaaccaatctctatattcctctccctccacccctcttcctctccttctgcctcctctagcaaacatagtgttagagaaaagaatgtgttgaatgatttgatttttttattttttttttaaaaaaaaaattatcttaaaggagctaactaatactatgatatccaaacaacagtatttttatttgtttaactaaattgtagtagaaaatgttgaaaggtaccagtttatatctcactactataaaaaaaagcctatttctattatttttgaagaccatcacaaataaagttatgcgatcacgattttaaacagtcatttattagaattcccgaacagtcacattttaaaatataaaaaagagttaaaatggtctcctcaacgattttaaaccattatataaaaactaaaaaaaaatcattttgttattgaaacatttagatctctctacgtatcgctctccctcactctcactcgaacacaaaaaagaaaaaaaaattaatctatcgacaccagccagcaaactccggccgaccctagccgtcgtcgtaaactctgtgaactcccaacattctcacttgaaatgttgattcggtgctccattggatggccagaggaggcacgcacggtcttgtcgctgcttaggattcgttcatcattggacgaagagagttgcctaggattcgaggcttcgttggacggagaaggttgcttgggattcgaatcgttggacggagagggcagggtcgaaatcattggaccagttctgtaatagtgtttccatgaataaaattaaataattagcattaattttgcaaaaattaaattaggattaaaatgtcaagtaccttttaacttgtaagtacaacatttcactaaaaataaggaaaaaaaaagtactggagttagaaaaaattatatatgttaaggaaaaaaggatacttatgatttcaaaaattaaaattaaaataaaataaaatggtgagtttgaaattttgaattcaacttatggttgaaaatttgatatcttggacagtcatatatgagtcctatttgcttaaggtaattaattaattaatttggagaaatctataggctaatctatatctataaaaatataaagctacaagctatatatatataaaaagaaaaacttataaagcttatacctacaagctgaattgtcagttgttaaaaatcaaaataaaagctaagttttataagtgatgatgtcattctaaacttgctccattttataatatctatttatatatctttcatttcaaagtatttatgtatatgatgagtattatggttactttagaaagaaagaaagacaaaaaccttacatggttggcttgtattatatgatattagtattaatgttgtgtcacgataaaaaatgaaattgttatatttatagttattaaatatataaatcagtaaagttattgaaaaaataataattaatatatgagacaattttttaagtaattatacatctgtatgcattcatataaattgaggtgaatttacatgatttacaaaatatataaaaatttctcatccaatttatatgtattgaaaaaactataactaattaaataaatacgacaattttttttttttaaaaaaaaaaaaccgtgctaaacacggatatattttttattagtttataaaatatataatttcttcgtgtgtaatttttttttttttttttaatggaagcccttcatttaacttcaaaaattacatatatatatataaatatatatattttgaaatggatattatatatgtatttataaataattaaatacaagttgttgattgattggtatgttggacacggtttcgactcgttaattattacacttatttttaacaataaaaaatgatagtgggattatcaatggaactctttgccgctaatttgtttattaaaattaaccataaatatatacaaaagtcacatctttatatctctattttctaacgtacgtgccaataatgttgaaagagatacaatttatttatatataaataaatgtaatattcttctttgaactattgtttcattaagaagaatttgagatagagaattttatcattaaacttggacattaaaccattcaacttaaacccactttctatattagtattcgtttttttttaacaaatataataaattttcattccaaaggttaaagctcaaattctttttattatatattatagtagtgtagtccctcaagtcaagtcttgcaaaaaaaaaaaaaaaaaattaagtaaacaaaagcaagcttcatacatgctataaatatataaatatatatatatatatatatatttattttggataagggttcatacatatttatttgtgttgaattggcaaattttaccaaaaaaaaaaaaaaaatctcgatcgattttgtggtcgtacttagctagcttaataattataatactaataataataataannnnaataataataataattataatatcgatcaaattaatttaaatatgtattattataagatgtagttgctcatagtgatactgatatgaatgaataaaacaatataattgataatgatcttagctttggttgatgcgattgattttgcttaatgccacacattaataaatcaactcataaaaccaaccttattaatatccaaacagttacttctgtggccaactatcttataattgataatgatcttagcggtttttacgggaaaccttagtcaatttccatttttatatgtatagatacttagttgactcagatttttatatcatcgctagcaatataataaatttattaaattatttaaaattttacacatttatgtcccttatttcttatattaaaagattaaaagaaatatgcatggaacatagaatgatttgtgtagtttttacattattttaaggtgatatttagttgagaggaataaaaatataagaataagaatagtaatagaatggaataattagtcaaatgtataaaaaaaaaaattgataaaaaattattaaattttttctcattatggattggaatggtctttcttcaaaatggaatagtcattctattagaatgacattccaaacaaatgaataaaatgaagattgtttcttttttattttattctattttattacatctaaccaaacgtcaccttaaagcttatttgatacatcttattgtattgtacagtattgtgatggattgtagtattagtattatttatagtatgtttagtatttaattatatatattaataaattgtgtacaattatattatttttatcataaattcggcctcaactccgatttggaccttggccctagaccaagacctttagggtctaaggtttggggtctctagggttccggttccggtataggatcgtccaaggttgagaccgaattcgatattcgaggccagtccgagtcagggtctgaatctaagatctagggtctaggttcgggtccaaggatgcccggatcttgatccagggtgtccgtgtttgggctaagattccgatctaaactctttgtaaatattataatacaagtaaatataaattatttattatttattaaataatatgatttacactgtatattaacattgtttatggtcgtaataattaatataaatagaaaattttatcatataaacatttatagtttgtaatacccggtaaaaatatacatatattttaa

SEQ ID NO: 113065 - DNA, 4303 bp, Cannabis sativa
  modified_base (4242)..(4243): a, c, t, g, unknown or other
tatgtaaaactaacacccagcccaacccagctcacaaccaaattcacatatacattctattctccaatataaagatgtactaaattatatttttaaaattattctaattattaaatttttttctaaattattgagattgttagatttaagatttttgtttaattttattcatttttattatttgtgtactaaataatcatgctctctagattttaatatctaccaaaacatgtttctcgaactttgaccaaaatgccccctgaacttttaactgttttataattttttttattgaaattagacagaaatttttaaatctaacaactttaatagcttacgaaaaatttttaatgactttaaaaatttaaaagatataatttaaaacatattaaaattttaaatagtgaaaattttaattaacctttaattaatagtggagcaccaatattatgaatgtgtgtaatatatatagtaatgtaaacgacgtgtataatgtatatgaatataaggtcaaagctgaaaagagtgaattaaatattaaatgaatttatgaaagtgcgaacaacgtgagtagtactgttgtagttactctactttaaccaccacctacattctccaatcatacatccaattccaaacaacaataacaatagcatatagggatacgattttgtcctgtgatgtattttcacgaaatgtattccgtggtacattagatgagtcttagggtacattaaatgagtgtcagggtacgtttctactttttaacactaattacccctagatcaatctcagctgtcagatcaaataactcccttatctgacggctgtcgtaatccgtgaaaatacaataacgatatccatatatatatatatatctaagcattcattgaatacaacttgacaaaatacattgtattattatataaattcatttcactgttccctgttcccttcaccaaaaaaaaaaaaagaaaaagatattcatttcagtgctattaattatttatgagttggatctatgaaaaaaatatattaatgacttttttaagtaccaacgcaaccataatgttatccataacgttttaatagcagctgccataattgagtttcaacccaatggtaatataaaactattttctcttattaattcacacatttaacttcattaatattgtttattttatacaacatgcattgcattgcattgattaattaattatttaattacatgatttttaggtgagataatatcaaagctttgaattaattaacgtgagtagaagtagtatatggattaatagcagtgagcaatttagtatttgcatacaatatatatattattatagtcagacgttgtacagttattttaaccaatataaatgaatgattttcttgacttatgaataaaattaggccaaattattaattcttttctaagaatggagagcaattctaaaatatattttaattttataaggctgtgcataattggtgatggccattggccaggccagccaaccatttatatacatgaattaaagaagatatatgtttttttttttggtaaaaaaaatgcttttgaacccatattataagtaaatataacaacttggaaagagcttatattcaaggaaatataatttaagaaatcaattctcacccctaaaaatattttttatttcaccaccaaagccctctcaagcatgtataaggctttaggcaaattttaaacaagacattaggtaaaagttaaattagaccttgaccaaattattaattttattaaaattttatttttcaaacatattaatttttaattcttttgatattagggtaggggatttaaacttgggactttctctttgtgagaaaaagtgtagaattactaaactatgtttatgaccatactaatttaaaattcttattattaaaatttttatttttttatattgatttgatatcattcttcatatgttgttttattaatcatcatactatcattattttttttttcttcatagatgaactttaattcatttataaaaaaattcataaaaataaatcaatagttataaaaatgatcacaataaaataaatttaattataattatatatatataaattcttattaaaaaatcattagttattaattaatagtttcgaaattttaaattttaaattaattaaaagaactgtaatattgacaattaatagtaaatattaatgttcaaaataattgaatgatttattttttatgaaaataaatatttttttttaatgtatatcacctatattatataaaaaatatatatatatattacccttaaaatatacgccttaaattttgtgaggccttaatggattgtctaaattgtcttatggttaagccagacaatttctttatatatttataacattttagaagaatgcaattggcaagttgttcttgtctttttgtgttttttttttaagtttgtttttttacttttttttttttaattctatttttttcaattttgtttttaatttttattttttagtaaataagtttttcatttttttttgtacttgttattagtattcttaatgtgcttaatgatatatcgctatagtactatttttttttaaatttattttaattttattttttagtaaataattttttgtactgttattgctatgtgatatcataaggtgctcaatactatactgatctggtacttaataattagttaataattttttaaattatttattaaattaaaatttatgggagttgatattaaaatgtaccaataatggtatgctacttattatttttgttattaatatgtacatatttttattaattttaatttttttaatctaatctactaatttaattagatattttatctgttattttttaaatataattgataaaaataaaaaaatatgattaatttattgattttgataggaggtgctatatatatcacatttcatcaatgtgattcatgcatcacctactaaataagctgtagatatttattacaaaaccttttttttttttttttttttttaaattattggaatatttattgcaaaatttatgataaagagagacgaattttgagattggaactttttgcctttgaatcagcgtgtcaaacatgacaatatcaagaggataatgctttggattcaatccacaaggcctggatactattcagactaaatataaactatatatatatatattataatattataactattttaagtttgatcataatatttattatttaacaaattaatagtgttataattttttacaagttaagatgcaatgtatattgatgtatatatataagatcagcggtagttatagtgtactacaacaatatatatgacataaacatatttatgaattcaattaaaaaaataaggataccttaattttttattttatttttttttttaaaaaaacttatgtatccattgataaaaagttgttaaaggtgttttcctttgtccacataccttccttgtctaaacctaaaacattgccactcgaggtatgtagttaatagtagcttgaggaaataaatacaataagctattaatttgagatacaaaactatgtagataaaagtttttttttttttcaaagaaaaatacaattcatcaagataaatctactgttacaaaagaactcaaaaattgtagacaagcattcgtctatacatacacaactctcctaaattagtaacagagattgtactgtcaatgtgtgggcaacaccattcacgtaagttgtgaaatagtactgcaagaaccaccaccaacaacaactaataaagaattaatatctaataaaatagactgaaaactaaaatttgattgaatccaaccaaatccaaccaattgtaaccaattgtcaaattgtcacagtagaatcactattaataatggagatactgaaaccaaattggtgcgcaagagtcatgccgagtttaattacaagcagctctgccacattaacagaaaattcacctaacacactagatgaccaagctagccacaccacaccctcagcatctcgtatcactccacccaatccaataaaactcctcccaagaatcactgaagtatcagttgcaagagcaaaggaatcaggaggaggcatccaccgagtaggtcgcttttcaattaggtttgaatatagcaatcccaaattaggggtgaaaatcggtcggnnatggtcggtttttacaattttataaccgaccggtcggttacggtttttattttacgaaaa

SEQ ID NO: 113066 - DNA, 2998 bp, Cannabis sativa
  modified_base (2922)..(2927): a, c, t, g, unknown or other
tttatgtaattattccttgttttatagctttccttttcactctttgttttaatagttaattaactatgaactttgtctaaaagtatgtgcataattcaatagaaaaataaggctagtttcattgagtgtttttgcttgttgtcaatgacatttgatgaaagataataagaaaagttctttaatgctttaacatagctgtgggtgtgagaggtttaggttcttgaataatgtatggaaggaatagtagccattttcacactcttttcatattcaaaagaaaaacaacataatggaagaagaagaagaagaaatagaaatagaaatagtgtgaatggaatttgagaggtacaagagttggattaagagtcccttattttcgtttggggccatcattgagtcaatgaaagaagttgaattgtttttcagtcatagctcaaattatgtttctagagagtgagacacatggggtttggccccaaaagactaaagcaagaatcttcttattgaatttgatgtaatagtaacttgaacattgataaaaaaaaaaaaaacttcaaaaccaatttcatacatatttgtttttcttatattattcaaatgaaaaatgctaaaggacacttatattggtgcttaatactcttgtgatgtgcaatatcgctatattggtgcaactaaatatcgaattccacttattttactttaataaatattataaaaaattgttatctaattataggatgacacttcatcatggtgttaagcatcataagtgtctcatagtaatattttattcaaattatgtttatggggagagggaaacatgaaaggttggtcctaaatactaacaatatgtttggtatagaggaaggaaaattagaaggaaagaaaatatggagagatagaaaggaaagtatatttccttcctaattacaaaattgttaggtatgtaagaaggaaagaatgtttagttattttaaaatttctattttaccctttagtgattaatataatataaatttttgtaaaggaaataataatttaataatttgacatttttatacaattataaaacttttctcttcttttttcttgctattttggagtggaaaaaattttgtgggcccacttaaaattttgagtattgctataggatactaaattacctaacatttctatgacatgacgtcttataattaattagcagttctttataatttttattaaattaaaataagtatggcctgatattaaatttctctaacaatgatattacattataagggtgatgggtacttgggtgccctttagcatttctccaaaaaaaatatattcttaattttctcttttcttaatttctttcctaccaaacatctcattttttgtgttcttttcctttatttcctcccacttttcttccataccaatcataggataaacgggtgtttgttatgggagttataggtttggaggatttagaaaatgtgaaagcattagaggagtttaagattaacttaaaagtgaaacctacttgaaaatacaaatcccgagcctttaaaaattaatttaccaattatgagttgaattttacattcctaatcctgcaaaatccaatcctcgtcccaaatgtctcataaagaaataagagaagcttcaaattaaccattcaaaaattaatggcaccctagctacaagtgtaaagtaacataacaattttaaattataagactcacgtgttttaatttagtcgtagcaccacaatagatgtgatttcactataattaataatattttcgcttagtattgttaggcatataactaaaatctggtatataaggatggacattggagtcttttgagaaagtgttcaaaaataaaacttagtctcgaaacgaatgacccaacaatcaaattcatatggattttctttgtattttgttttaagtttcaactcaacaatgtagggaaatagttggatgatgagaagtgtagttggggttgggagtgagagaagggtaaagtcttaagggctctcttggttggtacaaatccaatttgattgcataggaatatgaatttgaaaacattcttttgtctaaattttcttccttttgcggctgagtatcattattattataataatcattaaaccaactaccaaataatgctaaaaaaagaagctgattgtgggtttagtctctgattggactatatgaaattaagattgagttacatatgttatgattatccatttataaagacatatatatgtgtcgattttatgtggtttggttttctattccaaaatatatttagtatacttagttccctaattagttttagtttacaacaccctcatttatatttattgaatatacatagaaaataactccacactataatttacattaatttttcttaaagactttattagaaaaatacatttagactataataataaaaacacttagcataaaactaagtataagtattttacacgtagtttttttagtttatatataaaatgtaggtatttaacaatttttgttggtttaataaaaaattttaaaaatataagaatatcctgttaaatttaacgatattagtaagattagttttataaatattaatattatttattttatattaatattcttaaactttatatttattttcctcaaatttttaaaatctaaataattttttaaaaaaataaaaaaaaattaataagtagtttcctttaatttataaaattttaaaaatatacataacaaaaataaaaattaaaatcataatatacgtaataacaacttaatatatattgataaatcaaggatcatattgctcaatccattaaattcaaaagacaaccataactacaaaaaactgttatttttaacgataactttttagtcacaacataannnnnnttgtgactaaatgtgacttttgttacaacaaaatactacttgtgactaaaacatagtctttggatacaagt

SEQ ID NO: 113067 - DNA, 4820 bp, Cannabis sativa
  modified_base (26)..(33): a, c, t, g, unknown or other
attaaataataaaatatttttgtcannnnnnnntgccaaaaatggaattaacaacatgtattaatagttttatatccttgtctcgcttaagactatacagtaacgagttatgaatatactctattaattctatatttaatgagttattcctctttgcattaaatgatataactttattataccaagtggttcatattccactaactaacacgtgtcatcctctgaagtgtagccgaatttcaggtataacattgcattaaataaaaaaaactttttaaatgattacaagagtatttttgtcttaacccaattttgaaaacttgtatgcttttgagttatggtagttcatggtttcgaggcacatcattagcattaattacctatcttttccaattctctcttgttcttagccattagatctttacttttctaatctaacggtgatcatctttaaagtataaaactcaagagaaaatcatcatttcaccatttttgccctttgaaactttcaagctttttctgcaaaaatcatttttgatcattcgaacccttgtatgccctctttatccttgacctatttcttgggagtttcttcagatctaatcttcaacctcaggagttcccagagtacacttagccattcgtctcaacttcagctacaaagttctcctttatgcgaaaacccatctctgaacagtaagtggttcattcctttctttttggtatttctttttcctgagttggtattcttattttgtaattaatcacattattgttcacttcgtttggttttagtgattttgagttaattttttgggtaatttctagggttttaatcaaagagaaacttaggtttatcgtattaataagtttttggtttaaataaatttcttccaagaattaggattgttctttttgtaaaaatatctcaatcttttgcgagatgcaatctggcctaaacctcaatctttatcttctattccattagcaagaccaatatttttacctcaagtcactattgctttttcattaggtgaccttgattttgaaattatgtctactaagccttgtaaatcaaagaccccacaggaccctaatgtcacctttgaggctgaactcatcgaatccaaggtcagaaccattggagagtatgttggtggtgtcttaaagtcctgcagcatagaacaaaggcgaggatattgtataagatatgttgctccagggtaatttagctgcttccccccagaaagagttattcgcgaggagtgcggtggtacaagtactagtggctcgtctgggattggcgcttggagcctagagcacatcaaggttggagcagttctccccttgagagagtactacaacgagttctgtaactaccttggaatctccccttttcagttggttccaatttcttacagaattcttgcaagtctaaaggttttgtaccacattttaggatgggagtgtcccactcctcttaaaatagtttatttttactccgttaaagcagtccccgcgaggaagcaatgtgcaatgtggagcgggtttctattatctcggcacccacacaaacgaccataggatcgtcgtgaggttgccaaataagactgagttcaaggagaattttttctggaaaccggcctttctcctatcaacacaactgcattccgcatcatatgtaagtaagttttgtctcaaaaacttggttttgagttgttttatgatttatatttttgaggtcatttacttgttatgcttgttgtgttgacagcggtttctaagagacttatccccacccctcagatggccgagcgtcataaaatcctattgggtctcccattcggactacgatcagctaactttctcttaagtgaagccaatttaagaactgttggccttcttggctcgaatgagtacacttgtgactacaagtttccaaagtactcttcgtgggagaaggtcccagttccagctgatgaagagagccaggactatgtggtttgtgtacactatctccagagaataatccatcgggcagttgaagaaggagcatcccgaggtaatcaatgtggatggtcacctactatgcttagggcaaagcgtacttcgttagtaacattctgagatagttgatataatttctatacttggaacagtttttgcatataccgtataacgcattggttcgatagttggtatcctaggttccatgtccagcttagttgtactagttcatattatgggattgccgagcagtatgggaccatcttggatagggcaagccacccagattcaaattgggatttagatccaattaacccttacgatatattcatgatcacaggatctagggagtttagtaattgttatagttcttcctcgtcatcttttgatgattgtggtaacttccttttaagtgggagtttattctccattttccttttatttgtttttgagccagtgtttgatgtatctcttttgtctcgcagatatggatcttgacttggaaattatgtttaatagtcccccgctcgttgataaaagagccaagaaatgagctgcccaggcaaatgaagcctcaggttctattaaagaacccaaaagaacaaaaacaactgccaacaagaagtccttgagccaactcactatcgagccagcaaagtctccagagaaggttgcgcctactgtggcgagcgctagtgaacaacccactgggtctatacaccaagtgaaattctctgggtaaggcataaatatgttggactcagtaactaaaactaagataaactctattaagaccttatgtataaaagagacgtgtgagcgtaacatgtaggtctatgttatatagatattagatgcaatggcatcattgcatatgagataatgtgatatacagtacggtggcacaattatatacgcagatgtgtaatgtatgaaatgtgattattagaaatgttcatataccgtcttattattttgtcttactgggtcttggctcacgggtgctctattatgtaagcaagggtaaaacattatcgagtcagccatgagttcgagggttttaaagataaattgtacatattctggccaagctagaccatgagagttgggtccaacaagaaattgtataaaagaagaagaagaaaattaaatacctcctacaaattatttatagtatcaattaaacatataataattttgtgattaggatataaataacaatgtcatactaatataaaataaattaaataattaagttttaaataagaaattattttaataactgatgaaaggctatcaatggagagtgggggatgggaatgtggtgagggtgatagaggatgccaagaccacacactttcaaggtctacgataagcctttattacctgaacaaatgagggtggtggacctatttcttcctgatggttcctaggacatagacttcattcatgccctatttactaaaggtgatgctgatattattttaagcatgttgagtggtgaatggggccttgaggataaaattatgtggtattttagtaaaaatagagaatattcggtctgtagtggatataaattggttgttgcaatgcgagaggaatcactttcaatctgactcatcttgaattgaagcatggtggaacttattatgaaagcgaaaaattcctctgaaaataagcattttgtttggaaaattttgtcatttatggcttccaactaattatgctttatctaagcggggcattcaagtggcacctatttgcactcactgtcctaaaggaaaacgatatgacataattcatgcttttttgggctatagatatagtgttatggtgtggaaaaaatgtggcctttggaaaatgcttcgtgtcaataggattctagacatcaccactttcttaagcactatggcaaaggtttgtgcttctaatacctttgattttttttttctagttgttgcctagaacatatggaatgtaagaactagtacgaaacatgggagcatctatctgagagcaggtgacatggttgactggtgtgagagatttttaaaggaattccaagatgctaatggtggcaaaaagcgtactagttcgactagggaggaggggaagtggtgtcgaccgggggtgggatgtattaaaattaatgtggatgctagattgaggacaaaagaaggccatgctacacttagttgtgtggtgtgaggaaatgatggtgcagttgcttttgcggctgcgaaagtgttacagcagcaactaacacctctaatggcagggctgctaaccattaaagaggggctactagttgggatacaataggattttcatataacatcattgtggaatcagactatctacgaacaatccacttcgtttcttgagaagccaattaagtggctcacattttagccaattaactttattatccaaaactagtgttatgtggattggggttgcatctcttagtgtttgttaaacccttcagctaaaatgtgataacaaagtttgaatgaatgcattctattttaaaataaaacaacaaataatttatttaaaacttgcaaaataggcgacggttaaaaaccatcgctgatgtggatttcccgacagttgaaaaccctcacctttaccctgttataggtgacgattttaaaccgtcgggaatgtaaaaaaaaaagagaaaaaatacagatttttttgccatttctccccatttttatccagcattagttttataatttacctaaattaaaataaaacaactaattaattttattacaataacaactaactttaaaacacattaaatt

SEQ ID NO: 113068 - DNA, 3273 bp, Cannabis sativa
tggctttccaaacgcacccttattaattaaagtaaattaattgtttcaagagaactaataaagcatggataaatatctatctaaataaattctcttaaagaactagtaataaaagtagccagtatacgggcaacatcattcgcagagcataaaatagccttgcaagaaccatcaccaacaattattaataaagaaataacataaaaaataattggctgacatacgttattgggattaggactattaatccagcctctgacaattgtcaaatcactttctataatggaaatagaaaagccaaactgtcaagtaatatgcaatcccaatctaaccgcaagcaacttcgccacattcacagcaaactcccctaccaaccccactgcccaacatgcccaaaccaccccctcactatcccgaatcacacctcctaaccccacaaaccccctgcccgactttactgaagcatcaatagttaaagagaagtgccccgttggtggaggacaccgccttgacgtggctctgccaacactactagttgttgtcgtcctcataccaagtcgtcaatgctctcgaaattcccacaaggcctgttgagctagttcgagaagaattttgactcttgattttgtcttaccgaacaaaataaaattctatcataccaaatccaccacagtaacatcaccatcaattcgaactcatcccaagaatattcataaaatagaacattaagaatgttcgatatcagaccattaacatatctatgaaaagaagatagtaatcttgcttgttcccaaaccaaaataagaatatgtcaaagaaaaataaaacatgggatctcaaaatcctcaccacatcgagaacggcatagaataactataaattattgaaaaaattacagtattattcttgtgttatatcctatacatgtaagaaaaattcacaaattaatatatcccgatatttattgtatttgtagctataacacacgttctctaattttatttttaaaaaatggaataatttatagtaccaaaataattagagtatagatagtttataatttatactttttcatgtgttaaaaataaatgcgtctctataggtataactgacacttttatagtaagactattattattagatattagtagtgcctaacactatcatgaggtaacaccttttaaatagttagaaattttttatgttgtaaacacacaacacaatcaaagtgtggtagattctattttattggagtttgactaaaattattttatttttatatttataaagttgtaattttcttgggataattataaattgtttgaaaaagaaagtcttggagttggtgaccaagtttcggtgagtcttgatggctaagttttagagtgtcttggtgcccaagtttagttttcctatatgtgtgtgtgttttgtgtgtgaagaaaaagagtgagttataaaaagagaagtgagtgtgagtttgttgtgtggtgagagtgacacgaagaagcaaatgtgtattgagatttgagtgaagagattgggatagagagtatatataattttaaagtgataagtgaaatatatctctctttgtgggcttggaaattttaccaaattgagtcaattttctttgccttcgttcctttattatttcactgcgtttaaagttgatcatttttcctgacaagaggtatcaaaagcaaaggtttagatctacatcaaaaatgtcaaagatggtgtcttccacaaaatttaagattgaacttgttgacgggaagaacaattgcagtttatgacagagcatgatgaaagatgtattagtagaataagggctcctaaaagtattgtattgaaagaagcctgagagtatgactgataaagattgggaggagttgtcgagttctcaactatagttcattaacccccacttggaaatcctacgacccagatgaatttgaaggatcaatggtgaggatcgggggtgtcacatctgggtctaaccttgatcaaatttgaagtagaatgttaaggatcttagtcgcgatgtaggacattcaccaagaaaagccttggaggttttttctttctcttaaaaaaaatttgatttcagaagttaaaatggaaaaaaaaaatagtaattggtttattttctctacattcacactaaaggtggagattcgtgtgcttctgaatctaatggtccagatcaagtcttaaaaaacacaggaccccaggactggctgagaaatcttggccaggggtcctcttgtgcgagcgcggggttctgggagcaagcaccaaagtgtgcttttggtcaatttatgatccaaagtcaatcttgattttttttttttttttttcatgcaatttttcaaccattaacaattcctaagttattttaaagtgtaacaaaaatatttttcaaagaagcatacataaaatttacaaaaaaatcatcaaattgtaagcaactaacgtaaacacatccaaaatacatgcaaattattttaaacatattaactttaccaaaggctctaaacccaattgttggaatatatttcaccgtaattttttttactaacatatatgttcattattaattctaattatcaaacaacctaaattatgtttttctaaaatgatgaaataaatacgtaaagctagaattattttacattggaaacgcaacgaaatatatatactctttctgtttagtactctaattctggaatcctttctatagtagagtatcacaaagtactgaacctaattaaatattcttttctccgaatatgtgactaatgttctacatagtcttccttagtgccctaggtatcacaaatgaaaagtgtgagctatctctcaacttactaggactggtgtttgtggctgacatctttgacgagagatatagaattcgaaatacatggtgaaagagaaaggagacttaactctcttattttctcacaactagagaaataatgaaatcgttaaccttattctagcagcatctctttctttacataggtattcaataggtttaatttaaatatttatttaattaaaataataagataaataaatatgagtggttgagcttaaatctcactaaaatcctaattaaaatgaaattagattagaattgtattcctattagagatggaaatttataccgcggggatgggtaaccgcgggtacccgcccttaatggggtggggattccccgtcttggtggttaatgggacggtggggggagacaatttcaataccc

SEQ ID NO: 113069 - DNA, 1590 bp, Cannabis sativa
gtaaaataaattccaacaacttcctcactacaaacttccttgacagtcaccatggtaattcgggacaagaaggaaacaaaaaaaaaaccaatacagaactccagaaaacaacaggaaaaaagaaatccagaaagtctacaaatagagactagacccaacatagaagtcgaaagggttttgagcagctcctttcagagaagaaaacaaaaaccctatacacccggagaaatagagaccaaatttttaatcagatgaaagctttgaaactttgaaaatgagacacagcaacttagacgtgtagaatgacaaggctgattaatcttagtagtgtcgtaaaaggagaaaggaaagcctcagagagcgagagcgagagagccatattgagagacttttcaatgttgtatagctattattcaactagcgatttcttagctataagttcaagaaaaaagaaaatttatgtttggtattacttggattagggatcataacactttcttgtggcttagcacttattcatttctatataacaagagtcttctttcgtagaaattgaatcttctcccctttagtttagttgtgaatatattagatagataatagatataatatgtaatgatgtgagttgtttatgagacaattattttgttcatgggagagtagacgacgaagaagattcttaaacaggtaacttatttgcagaacacaacaatataataatggggtgaatactataaattatcttaaagtcttttatgagaaaaacaactaatataataaaatcatttctttgtatacaaaatccttcccacatcagaaattgcaatagatgatgtagatgatgtcgtaagtaccttagacatcatagatgtgacaaattatgtcgatgttagagatgccatagattacaacaaccactgtagatcctaggagtacaacctacaacttcacaacagactcgaggaaatgaaaatagttgtgatgataatgagtccatatcttagatgtttaatttattatttttgttagtatgagcatttatgaactcttttagtataaattattttaaatataaaaaataatgttttgtattaaatatgaaaacgatgtatgaactctttcagtttaaatagaaaaattttaatttttaaaaaaattgcttaatagacaaaaaatgtgatatttaaaaagaatttaatattttatttaacttaaataaatttaattattcttacaaaatgactttaaaaatgacagtttcgtttctgataacaaaatattcattccttataatgtgtgaaaattaagctaccgatttaatattctaaaacgactttcacttttcaggaacaactcattttcgttttaaatattttaacatcaagcacgtcgctatattttgtttctgatatcgattttcaggcatgagttattaggaataaaacaacaggaatgactagtcgtgccaaataatctcctggaacgaaagaagtcactgttgggttttatgccctaaataaaactcacttcaatataatcagatttacttattaatatagatcagatttaacatttaatgttgcatggttc

SEQ ID NO: 113070 - DNA, 3929 bp, Cannabis sativa
tttttttaagtaactagtttttatctagttattctgtatatttaatttttgtgttttagcttttattttaattgttttatgtaattcatttctctataatagatttttaattaactaacaaagataattggtttttatgatacaagatatatatgtgtcatttttttaagtaactcgtttttgtattttaattatcgatattttattttacctatattattatacctttatttcagttttttagttgattgtatttgataattggtctctatatttaattattaattgtgttgttttacgttgaatcctagtgtcgcggcccgcccctcttatgcttccagctcttcctctttgcccaaaaaggctattttaatgcatcaacactaatttttagtgtcagggcactccataaatttgtattgttgactagttttcacgatttccatgatttttttcttaaaataacaaaaaaactaaacaaaaatctaaaaactaagcataagtttctcaacaaaaataaaatactaaaataaaaactaaaacttgggttacctctcaagagtgttgtcgttaacgtcatttagccagacttagaattcttcttttatagcagttccaagagaatgacagatttggcttgatcgtactgaccacccaaatagagctttaatcgctaaccattgactttaaaagtatccaatttctcacctttaatctccactgctccatacggaaacacctttactactataaaaggaattgaccaccttgattttaacttgctcgggaagagtttcaaccttgaatttaagagtagcacttgttttctaggttaaaattccttcctgagaaggttcttgtcatgccacttcttagtcctttctttataaattttggcgttctcataaactttgtttcagaattattccatctcgttgagttgtaacagccttttctctctagcagccattaaatttatgttcagagttttcattgtccaataagcaagatgctctaattccactagtaaatggcatgccttcctaaaaaataaccgatatggcgacatgccaataggagtcttaaaggctgttctataagcctataatgcatcatccaacttcttggaccaatccttccttgaacgttgaactgtcttctctacaatcaactttacttcccggtttgaaatttctgcttcccattactttatggatgataaggcaaagcagttttatgtctcacctcatacagagcacgtaaagcttcaaactatttattgcagaagtgacttccctcatcacgaataatagctcgtggagtcacgaaccgagtaaagatattcttttacaaaaagttgagaaccattttgccatcattcaccagagttgtggctgcttccacccatttcgatacatagtccacaacaagcaatatgtaaagattgttgaaagaaagaggaaacggtcccatgaaatctattccaaatacatcgaatagttttacctcaagaattccattcattgacatctcatttcttcttaaaatatttttcattctttgacatcgatcacatgctttgacaaatgaacagacatccttaaacaaagttggccaaaagaagccacattgaagaaccttagccgttgttcttgtcccactaaaatgacatccacattaaagactatgacaatgatttaggatagagtatatctcctcttcaggcacacatcttctaattatctgatcgtcacaatgctataaaggataggctcttcccaataatagtgattcacatccgaaaagaatttcttcaattgttgtcttgacatgtcaggaggtgtgacattagcagcgagaaaaattacataatcagcaaaccatggagtcatcacagtttcttttgacaaaaatagtttctcatccagaaactcattattgatatgcaattcattcatatttgagctctcttgcaattctagtcttgacaattgatcaaccactaggttttcagtccccttcttgtctttaatctctaagtcgaattcttagaggaggatgaggacccaacggattagtcttggcttagcatccttcttcgtcataagatatttatgactggaggacctgtggacataatcaccttattcccaatcaagtatggcctaaacttgtcacaagcaaaaactatggcgaacatctccttctcgatattggaataatttagttgagcataattcaaggtcctactagcataatagatggttcgaaacaccgtgtcaactctttgttctaatacagctccaactgcatagtcacttgcatcacacattaacttaagcggtaagtcccaatttagtgtaatgactatggtgcaaaaatcagcttctccctaagagttttaaaggcttccataaactcttttccaaacttaagagatactccattaacaagtaaattcgacaaaggcttggaaatctttgagaagtctttaatgaaccttcaatagaaaccagcatgacccaaaaaactctgaatccccttaactgacacatgatggggtaggttctcaatagttgacaccttggctttctccacctcaattcccatctttaaaattttaggtcccaatgcaatcccttctttaaccatgaaatggcacttctccaaattaagcatcaaattggattcctcacatctagttaaaactaattccaaattagtcaaataatggtcaaacgatgaaccgaacacgaaaaagtcatccaaaaaaacctcaattgatttttcattcaaatctaaaaagatagccatcatacattgttggaaagttattggtgcaatacataatccagattgcattattcgaaatgtaaaagtaccatgagggcatgcaaacatcgttttctcctagtcttctagtgcaatagctatttgatgatatcccaaatatctagaaagcaatagtactcctaaactgctaatacatctaatatttgatcaatgaacgaaagtgggaagtgatcttttctagtggccttgttgagcttacggtaatcgatacaattttccaaccagtaacagttcttgtcggaatcaattcattcttctcatcattaccaccatcatcccccctttcttgggcacaacttgaactaggcttacccatttactactagaaattggataagccactcccgccatctaaccatattaatacgcctttcctcactacttccttcgttaacggattgagtcttcgttgttcaacaatagtcgatttgaccccatcttccattaagattctatgcataactattgaagggctgatccgcttgatgtcggctaaagtccacccaatgaccttcatatgcttttttaagactctcaacaatttctccctctccacatcagacagtgaagctgaaataataactggaaatgtcttgtcttctcccaagaattcacaccgcatttgatcaggaagcatttctaactcttactctggtggcttctcgctagagggcaatgacttcgttggaattatcccaagctcttcaaagtattttctattcaaatgcccataagaatcaagccactttacatactccatgacctccttcccatcctggtttaccactatctattgcaccaaactcaaggtaagaggatctttaatgggttccctcgatcccactaaaatctccaccacatcaacgaaaaatgttatcatttgctttaggattgttcatagcctttagcacattaaatacaacttcttctccttgtactcatagctttaactcactcttttgtacatcaattagggcttggcctatcgccaagaatggtcttctaagaatgaggggtgttagaaaaattaataataaacccaaaatctatttgtatataacatagaacacaatagt

SEQ ID NO: 113071 - DNA, 4645 bp, Cannabis sativa
  modified_base (4486)..(4498): a, c, t, g, unknown or other
  modified_base (4561)..(4571): a, c, t, g, unknown or other
ttcatattaggatgttaaacaacatatattgtagtaaatatagatcctggtaaaacatattccaacattaacttcctctactaatcatatagactgtataattacttttgctaatgatatgaaatggcatattacttgttattatggctctccttatcccattcataagcatgattcttggcttttacttagtagaatctttgatgtttccccctctatgccttggatggtttttggtgattttaatgactatctatctataaattatacaaatactccatcccagccccctgcctatgccattacgcatttcagctcttttctgcacaaattcaacatgctgttgttgccacccattgggcacaaattcacttggaagcatggtcgtctttatgagcggttagattggtgcattgtcaattcatattggaaagacctcttcccaagtgcatcccatttttacctccctttccatggatctaatcatagacctcttaagttaacccttcaagagcttcacttaaacccatcgcgttcaaataattttttctttgaaaatcattgactcaccgaggcaaacttttataatgttgtgaactcctcttcgtaaattcggttcctgctctttcaactgatagcctccaaaatttcttggccaaacaacaatcctgtactaatgatcttgtccattggtctcagcaatctaaccccctcaggaaatgaatcaaatcccttcagattgaaattgataaaatccatagtgccacggtcactgatgaacatgatattcagtgtgtaaagatgaaatatattggaaacagagatatagggtggcttggctcaaatctggtgataaaaataccaagtattttcatcataaagccactaccaggaatagaaacaatctcactcgatccataactcttgaggatggatctgtggtcaacaggcttgttgatattgaagcgcagtttgttagtttctattcctctctgtttacctcccagggaagagataatgatgcgataaacattgttctttcaggtatttacaacacccttgcccctgatcaggttttactgctagataaaccttactctgaggatgaaatcaagaatgcgcttttctctattttgggtgagaaagcccctggttctgatgggttcaatgctttcttttatcagaagaattggtccactctcagaactgagttcacctctgccattctggccattcttaatcatgattcaaacatatctctcatcattgactctgtcattgtccttatccctaaaaagaaaaatgcgtgcaaagtccgtgatttccgacccatcagtctctgcactaccatgtacaaagtggttgcaaaagtcctagctaataggatcaaacctgttcttgactctctcatttctaaaaatcaaagtgctctcctgtctgactgtttaatttttgataacatcttccttgataatgaagttgttaatgccatcactaatagaaagcgaggtcgtataggttgggccactcttaagttagacatggaaaaagcctttgatagagtggaatggagttttgttgatgctattctcaaatgtgttggttttccaaattgttttgtcaatctcatccttagatgtatttcttcggtcacttttagactcttgattaatggtaaactttctgaaagcttccccttcttcagaggcattagaaagggtgatcctttatccccttacctttttttgatgatcgctgaaggtctctctgctgctatccgcgtctatgaggaacaaagaacgtttactggttttgccatttgtagaaatgctcctattgtttccaaccttctctttgcggatgacagcctccttttcactactgttaacgacacctcttgcagggccatccaagacatcctttccatccacaatcatgccactggccaaatcctctatccttttctcacccaataccagccctatggaaaaaacaaagttctgcaataagttgagactcagtaatgaaagcttcatcagtaaataccttgggatccctcactgctctggcagaattgaccattctgtgtttcattacctagtccaaaatgtttcttccaaaatgagtgtgtggaactctaaatatttttccagagcgggaaaagaaactctcataaaagaagtggtccaagcagttccgtcttatgtcatgtcttgtttcaaacttccccttcgcacaactaagcagctgcaaagcctcattgccaacttctggtggagttcctcaaaccacaagaaaaaaatacattggaaaaattgaaacagtctttgtgtctctaaatttactgtgggtcttagttttcgatccatcacattgcaaaatcaagcattactgcccaaacaagcctggagagtcttgtccaacccttcttcccttctttcctccctactcaaagccaaatactttaaacggaatgacttcctttctgcccatgttggtcacaaccactctagtacctggaaatgtctactttgggggagagaccttcttctcaaaggccttatctggagagttggaaaaggtacaaccatccctatcactgacaatcgatgggctcctggacttcatagccaaatctttatgaacattgaccatcttagtgacaaaactgtctctttcttcattgacatggatcatacttggaattgtaatagactaaagctttaccttcctgactaccaagtagaatctactctccaagttcacatttattcaactagagaggatagtctcatttggggtcaccataattcaggtttgtttactgtcaactcggcttaccaccttgcacactctcttaccctaactcactcctcctccacttcgaatcaggctagcttaacttcatggtggaagcatttatggtcctcaaatgttccccctaaaataaaacactttgtttggaaagccttccaccacattctctcttgtgcttataatctcttaaaaaaaagtatcccttcacccctttgttttggttgcaaatcttatggggaaactgtctctcatgccctcatagactgtcgtagagccaatgattcgtgggagagaacttctttcaaacagttttacaaacaaaataagcattgtgacattagagagttttttcttcggggatatgatttttttaacaaaacaggaatttagtacttttgtgtgtgttatttggcttatatggacacaaagaaatgaacttcttttctagaaaaaaccacattatattcatgattttgagacctatgctaacacttatttgcaagaataattaatggctcaacattctcaaagtcctgtttctttaacaacaggaaaactaaatcctcaagtttctattgtaactgacagtgacctcctagcatttctccccagcaagttgttggtgaatacatcctaaatgtggatgcgacattagatttaaaaagcaatcgtactgggttgggtgtgctgtcatccgaaattggaatggcaaactcgtggctactttctcttctccatggatgggcgctcactcagccaccctagctgaagcacaagctcttcttgctggcctcacttggtgtaagttagacatccctctaaagtgcattgcatcggactaccttcagctagtaaagaaagtgaataatttcaaagaaggccagccagcactttcggggatcatcacttgtatcatcaactccttatctgcttttcctagtaactcccttaatcatgtttcaagagtgctaaacacattggcacacaatgaagcaagggattctttacgctatgatagggatcgtataaagagagtttgatgactctcttgttttcaagattgtaattgtatcttagtcctttccttcttgtgggttgttgcaattacatcttcaaaaaaaaaaaaaaaaacaatcgattacataatcatcaagttggcaatgacagagtaatgatgtttttataaatataaattataatattattcttagatattaaattagaattaataattaagttgattttattggaaatacttaattatttgtttctattttaataaatttaattaaacagaaaattatatttacgttaatttttttttgaatttcatatcaacttaaattagaataattttctgattttatttaattttattttaataattattttaatgcaatttttgaaatacatttctttaaaagtagatattttgaaattttttgaaaaaatagattaaagttgaaaattaatttatcaattaattttagatcaacttaaatcaaatatttttttttcattaatgattaattaaaataaatagactaaaatatattatattttaattaaaaaatatatagttagtttatgaaatatctagatagttgttttctaagtaaactttttggtatttttttagatatatatataattaaataaaaaattaatnnnnnnnnnnnnnttattcaagatacttaaatattggttatttttcttaagcgaatccaacgttgtcccggtaggnnnnnnnnnnngttattcttattttatgagcttcgaccattgtttcatgttttgtaaattaatctctaagtagtcaccgtagggg

SEQ ID NO: 113072 - DNA, 986 bp, Cannabis sativa
aagtaaacataagatagttttaccaccaaaaaataacataagggggttaagtgtctacaaatataaacataaaggggtttggccgcaaatttctctataaatatatatatgtatattacgtaggtgatgagccatagcttcactgcacttaattttataagcaaacgtacaaaattccccttcacacacacacactgtaaattcccagacgaccttccaaaagctaatcagctttttctcctatcctttccaattctatacatatccatccatgttctttttttttttctttaaaataataataataataaaacccaaatgattatcagatcaagatctaaattttgccactaccagacatatgaaacaacccatagatttgcaccattaataattaattattaggttatattaatattatgtcagcaagcaagacttatgatctatatatatgaaaggattaacaaaattagatcatgattattctatatatataaaatgatgatgagattctggacatatctctggaaatatctcagtaatagttatggttagtccgaatatagttttttagtactatagttaaagttggggttcaatctaatttaacatttttctcttcatatcatctgattcaatccaatttgtaattgaatttggaaaattattatccagtctaatctccgattaaatctcaaaattcaatctaatctaattcaattactaatttaatttatttttaaattgaatatccaattacacacttaaattttaatattaatataaaaatatgataaaaattacataaaaactaaatatcatcttttatttaagtttaataatactacataaacatattatcgttacacataaaagtttaaaatatttaaaataacaataaaataaaataaaatatcatgaaaataaatacacaaaacaaccaaagattacaaatttaacacaaaaaaattcaataaaaatataat

SEQ ID NO: 113073 - DNA, 3398 bp, Cannabis sativa
aaaaaaaaaattgtaattaaaaatttagaaaacaaaaattaccaaacgacactaagaaatgagataaaataaaaatgagctcataaaaagagtgccacgtctaagtccctgctttatatatatagagagaagatagatcgatagatataaacaaataaattgaatggacatttactatttttttgaaaaactgaacagatcatcatgaatggcacaactttgttttcttgtatttgttcaaaaaaaaaaaaaaatgtgtccgtgcgccggagtcccaatcgtgattataccatatagatccccaagtgaatagcatctgtgatatcccctcccactgcaaaaaggtttttttgccttgaaacctttcaactaccaaatactctgttcttcatgattctatctacctcaactacactcaaatgtcgaattctgttatcttccaaccatttctccgatccaacaaaatcatttttaagttgtttttctgacatcttcaacactttgaacccctcacttagttttggaaagaagccttctggcctcatacaccaagacctaaacacaccaaacaaaacctctaaatcactaccgaatctctcaactccaccatcataaaacttcacgctgctcaaaagaataccattgaatatcattctatcaatcccagaagccagacttctccacaccccaatgaagtctttcctgttcaaattgacttctagcactgacattttcccttgcagataatcaagtgccccaactaaagactttgaaacggtccaaccttcctcacttttttcctgccactgcctcttgttcttcatatagtctcgacatagagcatcaaaaccccttaaaattacaacatatagtttttcaacccactccattctaaatgcctccaacttttcagtctccacatcaaatataccattttcaagatcttcaatcagccctttgccactctcgttttcctcagcttgatcaccctgaattgatcccaattccagaaaaaacaggtcctcgcaccattcccttagtacagattccagtttacgagcagcattaatagatgttgccactttgattaaggcttcatcattagtcaaggcagtcaaaccttcagcttcttggcacctgaaaagcaagcaatccaaaaactttattaagataggggcaccagctgatctgagaaacgttgacctgagggatttcttaggaagtgatcgacaacggttaattatagctgataagtgccgtataaaagcactagtaattggaggagcattataatcttcagggttagatgaaaggtttgctccctgaacctttattgtccaatttttctcgtcctcacaatcatttttcaatttatttagtatttctcccagctctatctttgcccaaaggtcaagccagtcaggccgatcactaaaaacagagaatgaagaaatcttctgcatgctctcatcttcctggaaggaaaaagagactccagaatgctctaacagagacttaatctgtttatcaaatgatatcattaagtcaataagatgaagccaggatgttctagcctgtgattgggtatccatatcattctcttcatcaacctgtgcgtcatactttgggaaaatttctttagccaagtaagttgataaggaagatacattagctgaaatccattcttctctgcaactatacccggatagcatagcttcatcaacaagtggttgtaataattcatccatagagtctacataatctctagtcattttatagacaagggcaaaaatgaattctggcttctcaacccagtttgagagatgtcgttgagatgccaagaacattggatttaccagctcctcaatcacccaaagtggctgatatatagcaacttccctactatagccttccagttgccgagattttcttcgtcgctgaagctcctgtagactgcacagagcaaaaaagttttcacagtactggtgtttgaggtccccttgcattgtaaaaagaggattgaggattttggctttgtttggggctgccgaagtcaaagatgatagtgaaggtggccacccaagggaagctagaagtgctcgatgatctgcaattgcctgtggtcttaagatggccaatgctcgatctactctgtggtcgactgctgaaacaagacgcccccattgaggctgtcttttagtgactgaagttaaaatatcttcagtcagtttcagagttttgatagcacgtaaacgagtatcctgtattaattgagaattcaagaaactataattaatgacctgatcctgaaggcatgatgattaaaaaaatttattaatgtaaacaaggtttctgtactcacttctgagtcttgtgttgcataatacttctttaagttttttgtcatagttgaagatacagcatcctcaatgtcaccaatcagactatcaagcttcaatgctgtttctgaaagatcaacagggggtaaaaaaccaattaaaaaaacaacagcataagaaaatttgacagagaccatacttcattcacatcacgattattataacatgtattccgatgaaggaaaagcttatatccaaaacacagtaacataaatatatatattcacagcaaaatatatatatgcatatgcattactacaattcatatgactagcatatgaattgtggtgcaaaatctcatctgagttccatggtcaatcaactgaagtcaataccaatgctaagagaagaaattggtcctcaatatgtatgtttacgaatattatccatcatatgtattttattcagaggcacccagccacctgaacacgcttatcttttatggtaggtaacatttgatttccataagaacttacacggtttgaagctcttagtctcctacaaggctttttgctccctcctaatgtagagacttctctataagtcatacttccttgaaaatgaaaattctagagcgtagaagttagaaacgcactatacaagcttccaaaatctcagtctgctaccattacaaactttaaaacagacaagatctaagaattcagaataacaatcaaagataaactcacgaggcctgacctaaatactactttcattgattttatgccaaggcatttggcctaagaagaaagctccataactttagatcccatccttcatttatatgaatttgggtagccacgtccaaaagccactatatgatctttattaaccacctggctgttagagttattattagagtaatttgcggcattaaatacttaagtttaaataaatacttaagtttaatttttaacggtaataatacttaagttataattttggaacttctgtaggtacctagttaaataaattactacgtggcaatccctgattggt

SEQ ID NO: 113074 - DNA, 1930 bp, Cannabis sativa
ggtatttttgtaaatagaaagttttgttttctatttatgtttatttttcctttttaggttataaatgtaaattgctgtttattatagaaaaaatcccataaatgtatagatatttaaatttcccaataaatatgcattaattgattaattgtcattattcttgtgttgtctgcaattcgattcacctgcaatctaagcaatcttctgctatagaaaacaaaaaaagcaatcttctgttctgtgctggccgagttataaatataatttctaagctgagtttctaaggccccaattctggaccgttcttgtcacttccgtttagtaaacttataaaaacatagaaaaccagaaattccatacaattcattcgtttcgattcccaatttatataatatagattcattgattgcatttattactccttccatagcagatatttcaacaatttttgtcaccatcttcttcattataattcaatgtcgagctaattatatatatatataatattcaagaaactgactgaaattgcagattttacctttaagcttacatacttaattgaaactaaaagttacacgatacagagtcttaatcttaagctacagggaaagattaaggttcaaaccattgatgaattgagatttgcgacgaggatgagattgatcgttaggaatattactagtgttgttattgggcgttgaaaaaactgaaggaattcctcgaaattcgagtccagaaatgaaatcttctctcacaaacgaaggtatccaactggttttgccactattaatgtcgttatcatcataaaactgcttcctcttcttcgtctgcgcaatcgtattcctctcattcatcttgatttcttgattactattatcatcattattactcataacatttacaccttttctcaaccgatttcgagcttctttaaaactcgtaatcaactcaaaaaacttatcaattttaccttcatcatcgtcattatcattatcgttttcgcaatcaacttcttcttgctcatctcgctgacaatcattatggtcatcacaagacactgtcttggccttcttcttcttaatagtctccattacatctctgtcatcagtcgtttgaggacaactctgatgatccattattaattatgagtttgtattttctcgatggcttttctgggatgttgaaaagagtattattatttttctttttttgagaagaaatgcttagaagagtatttatatttatatagtgggtgtgttttgaattggaatcgtgaaatgacgaaaatgggcataggggtaccaaaacgacggctggatttggaggtattggagtagaaggggtcaaatggggtatgaaggtaattgaagaaggggatggcttcacagctgagatatgtgatgacgggagaggggatgagatcatggggttgacgtgggtgaatgggtagagattctacgattgaaacgtttttccttagtttgaatttggtactactaaggggaccaacgcatttatcaccgaacatggcctcttagacaatatcctatcatcatatcatttaaaagtaagttaattaggatttttgttttccttaaattttgacataaattaaatcatatcatattccttttttaatttttttgacggttaaaaattctatctgaactattgagattataaaatttaaggaattttgttcaattccatttaattttactaatttagtgattatttatgtactaaatcatactactcatactttaactttcatacatattagacttttcttactaaaattggtcgatgtattatatcgtattgtattgtatagtattatattgtattgtattttatgcaatattcttatataaaattgtatataatattaacttttatgaacacctaaatatataatattttagtataa

SEQ ID NO: 113075 - DNA, 2174 bp, Cannabis sativa
aataaaatctccggaattgagaaattacaattctaatgctcattttaataatggggtccacaaattattataaaaataacagaaattagtcctaattgcctttactaatccaaattacttaagcggtcattacataaagccctatattttcataagttgatttgaaaagaatgttcaaagaggctctattattaaccatgcacctagcaaccatcatgctccatattcatgcagttatgaccagaggggcattatgagggaacctgacctgggcaacatctccttctttaaaggatatgacaggctctccaagcttgagttacttggagtccctttcttccacagccaggatgtcacttttttctcatgacggagggtctgagcatagcgatcccgagctttacttgtttcgtctgctatgtggggttttcctattatgatccctaagtgtcccgccactggtggtcgtattaggtccctattctggacaacttgtgccagagtttgatcattttgcatataacgaggtagattggattatctttcttgattaggaattcactttctcttttcaaatgtagacacttgtttgtatcatgaccaaattcattatgcaaacagtagaacttagacgtatctcgcttactgatgtccttcttgatgggaagaggcttcttgtataggatagtagcttgggtggccatgtaaattgtcttacgagttttggttagtggcctcagcttgggtggtaagggctgattattaggattcaccaggttagcaggatcaactggattagcagtattggcaggattttttagattggcagcattagtcaaattagtcaaattagttgggcctcccgaggtgggggaaacacgaacatcgggatcatccatcataggatcctgaggaaaatccaaagaagtggaggtagtggttcttctggttttaactatggtgactgatcaaaatcaaagtcaaataaagttatcaatgaaagcaccaaaatattgaccttggatttggtcaactgacagtggagccttatttactactgataaccaccgcgtgtaaattgtaataacaaataataaaagcgacacaatgatttatagaggtttggcacccttgtttagtgggtaatgacctgctatccttttaattgtattaattctagagataataccacgcagatcacaggcttaaaccttgtaatttctagctatggctctcttgaacattacagtagtgagaattgagtattacagattcagaacaagagtgattaatgaggaaaataggctaagtgtctaatgaggaagtgaggaggcgtgagagaaaaaattaatggtgtggggcttgaaagacttagagcaagtccttttttaccttgcctaatgccctttatataatgcagggcttacgaaagatcatcattcaaaatagataaatatcccccctcaaaataggaaaaattgattttctatcttatatttaaattgcaaaataagataattaatatccctaaagaataggtagatattagcttgaagaagatcctctatttgaggattatttacatgtgttggtcagccaaccctatctttagggcctagctagcatatagatcctcattggccgacaagggatgatccggccaggatcccttggttggttgtttcctcctagtttagtcttgcttgattgcttggaacccttaacaattggcatattgtgcaaggtgactttgttcacccattgacaagttgtattccacgtggtcttaagttttgtgaatgtggacatgccacgtcaagtggataaaaattgggatatcaccctcaaaaagtttgacacctgccagtgactagccaatgccatatgcaattaggtaatatatgcttcctgggaaagagatggaggtcataccatgtcgcccttaaaacactcaagctcactctctaagctccaaattttttcgctaagcatagataattttaccaggtggcgtatgcgctcccccctttgcctatcataatggtgaaatgggtcctcctctaagtactcaaaatcaaatgagaatagcgtaataaggacaattcctaggagtaagcgagaagccatagatagaaaacaaaactcttaacttcgcttttagccaacgacaatga

SEQ ID NO: 113076 - DNA, 3442 bp, Cannabis sativa
  modified_base (3411)..(3415): a, c, t, g, unknown or other
cataagtatagtttagtagtactcaatccaattccctgttgttcgacctcacttgcgtgagatactacttgattgcgtatacttgcgtaataaacataaaattcgtaataataatcatataaatacaaaactcttccacgacatatctaatttaatactataaaaccaacaatatgatattttcatttctctacatgcatggcataatcatttcagtacatgtatgatattatcaactctttacatgtatgatataatgagaaattatttgtattttaaaattattaaaacaaaatgtcaaaattatgctccgtcaaatccatattacttgaaaaataaattaattactgtttaatagccttatttcattactgtaagtccaacttgagtatatgtgccgagtattactagaaatagatttcattttactttgggatggttaaacttgatgcacagatctttgtaccaaaattatgtaatataaaaatagtaacattacaattatatccctttaaaataatattattaaatgttaaacattttgacgccactatgcccagttaccaaacccggttacaacaggtcaaattccatctggcattagtaatttgtactgtatgttaattatgaaaaaataattttttttttgatgaactagctgagaaattcattactaaacttaattttgaacaacctgtatgcaccttcaaataagaaggccaaattatctatacacaacaaaaataaactacacaactatgctaacttttcaaaccattctttatcactcctttaaattttccttggcatcacacaagatattcggtttttcacaagtcatttagcttgctgctgtaaatgctgaactttaacttcatttgagttccaaattttatcatttcggctgaaccatagttggtataccaatgctgccactgccgaagcaaagacttgcttcttgaaattactttgcttggatctttcaatccacctcagcaggccatgtaaggttgctggtttttgcatgccaattcagccactgcttcagctgggaaagaaacaaactcaaaacaagacattcaaagaataaatgatcctttctttcacctgcattgttgcagagaatgcacaaaggactgtctattatttcgaacttgaataacctgtctcttgttttaaatctatccaagatagccaaccaaagcacaaaactatcttttgaaatgttaagtttacaacattgccctttccagagaaagcacctacaaattcttccaatttcagaagttattctctttgggagaatcaaaatttggctcaaatatgtgtgaattgtaaggagcactgagtaaataagaacaactcggcctgtaaaagagaggtttctatagctccaggtcttaattctagcagtcattttctggataagacttgtacattttgaggcagaaattttcttggcacaaataggtatactaagatacctaaagggtgttgtatgcctactgaaaccagacctgtctagtactctttgaatctcactttcctgcatcccactgcaatatatagcaaatttagttttattcggttgcaaactagatgtattagagaagagcttcagcccctgtagcatgtagtaaatgctcttaaaatctcccttacagaaaagtaaaacatcatcagaaaaactgagatgatttagcttcagttcagcacatctttcatggaaatagaagtcttttttttgcccaactttcttcaaaattctgcttagatactcaattcccgacacaaataacagaggtgacataggatcaccttgtcacaaccccctctttgattcaaagaaaccatgagtggatccattgaacataagagaaaatcttagagttgtaatgcagttcataaccagcctaatgaacttagttagaaagttagaagcattcagcaataaatcccactccaatgtgtcataacctttttgcaaatcaagctttatcatgcaattaggctttgtagattttctaccataatgtctaattaaatcttgacatatcattatgttacgagctatatatctacctctaataaaaccaccatgattttcagagacaatacgaggaagaattattttgagcctagaacatataagctttgtggcaatcttgtataaaacattataacaagctatatgatgataatcactcacagtattagggcatttgattttgggaataagagtgaagactgttcagttgatctccttcagcagctgtccatagtgtaagaaagatgtgacaacttcatatatgtctattccaacaagctcccaattatcttgaaagaagtagctactgtatccatcaggacctggcgatttgataccagggatgctaaaaacagcagccttaacctcttcaaggaaaattctgtttccaacaaagcaacatgctggtttgaaagaactggcccttgtcgaacaacctccattaaaacctgttgtcttctttctacccgagttcctagaaattttgtataaaaatctaggaaagcattcgtcactacattagggtcataaattctatccccatcattattagcaatagagaaaatggtattttgagttctcctctgcctaatagatgagtgaaacagctctgtattcatatctcaatcgcaaatccaatatacttttgccttctgatgcatgaaagaacattatgcttcatgcattgaaacatactccttccttgcttctaatttcatggcttgaaagtccacattcaacagatcattatgcattttcttctgagcttcatccagcttttccctggcttgcacttctgcaatctaaatgtcttggaaacattccttgttaattgcttttaaaacactttttagagccttgagttttgttactacatgaaacatcttagtgcctcttacttcttgctgccacacttattttactttctggttatattgaggatgttgtctccacatccgaaagtacttgaagggcttcttcccaccagaaaactcaggatatacacttaaaatagcaggtgtatgatcaaagatgccctcattgaggaatatagcctcagcattcgaaaatctatctaaccgtgcttgatttgccaagattcgatcaatctttgaaaaaattcgattggggccttgttgtttattgctccatgtgaaaaaattaccactgaattttacatcttcaaggtgacaatcagtcacacaattctgaaattcaaaaggaaaaaatctagctttatctccaattctttcaacccttgccaaaatttcattaaaatcccctaatacaagccaaggttccactgtattatgttggacttattttaccaggatctaggtttactaacaagtatgttattaacnnnnnaaatatgaacttctaaaatgatatgaa

SEQ ID NO: 113077 - DNA, 1223 bp, Cannabis sativa
  modified_base (455)..(463): a, c, t, g, unknown or other
aatacaatccaagtacatgtataacacaaaatgcgaatgctgaagctgtaatgttatatgttatcagtaaaacatgttcaaaaaaatcaaaactagattaaacccatcgaacttatcaaaaaaaaagattaaacccattgacccaattagcaagatgttcctaccagagttagtaagaaaaacaatcacctatgtttttacttgttaaaaattgatttaagccttttaatcaaatatttctccacacaaactaggataggaattagaaactgagtctttttagcaatatacaattaaaaattcttttgcaagaatttgagtgggaactcattcgctgaaatatcaagtaccacatatgcaaagatattgtactccgcaaaatctctcctcctaaaccaattaagttcaacatttcgaaatcaaacaagagaacaacgagagagagagagagagannnnnnnnnagagagagagagagagagtaagacctttttgcgcatgcgacggaactcgctggccttgaactcattacgagccgatttctgtagacgaagcatgagaagatcacccttgaggtcaataatctcgtcattaatttgttcagtggttttggctctgatttctttaagttcttcatctcgcttggccatcatgactacagaagaggaagaagaagcctttgtagaaatgggggaaagggaaatgggttgaattcggagtgcattgaagaaggaggacttagggattggagagagaagctttggagagaatgtgagtgttgaaggtgagactatggatatggagctcaacatctttctctgtatatcttctgagttctcaatttcagctttggaagtagataaggccgcctacccttcctcccagtatttttcatacagccactcgtgggtttggtaccgtatttatttgaaggtcctcttgttgggtaaaaaatctgtaaatataaatcattcttttaaaggtaatttttatttttattttatttttttttaaaaaaaaaaaaaggtttaataatacctatctagcttagcttctacaatattttttaactttagaataaaaaaaaaaaaaaaattatggggtttgaataaaaactaaaaaatggctaattagtaattttttcctccgaactttgacatgtactaaatcgtgccccttaacttttttggccgttagaaattcccccgaactattgagattgtt

SEQ ID NO: 113078 - DNA, 4143 bp, Cannabis sativa
tctctctctctctctctcccatctacactcccaccatagcatctctcaacacttcagatttttcatctttgattcctactttgtaaccttaaaggagctaaatcaaatcccacctatagtgatctgaatataactatccctcggtatcaatacaacaaaaagaggagtaggtcattacccgctaactaaggaggtcgaacctctataaaaaaatttgtgctctttacttttgagttctatttgtgtaacacgtggcaaacatcagattcatacgacccctctgtcgattggctacttttcgaggtcattataagagtaattaattttatgtaaccatatacatgcataagtattgatgtaagaccatctccgatgcaaaatgtaaatattatcttaaaattgggataaaaaaatgaagaagtattatatttagtacaatatttgcaattatgttccaatgcacaataacattttaagagataaattggtttaaaaatatatcattaatgacaaacaataaattaaatatttaaaaaattattaatgacaatattgtaaaaaaaaaatgtacgtattaaagtatttcattaataattaatggtaaaaatattataaaaaagtaacaatgtattaaatttgacacaatgctataccatgttataaatttggtcaaattttttagcatgtggtaaatttagcacaacttattgtacaccattgaaaaaactttttattgaaaagaaaaaataataatacacctcctatttaacactccattaaagatgatctaccaatactaactctcatatatttgaaattatcaatatggataattatcaagtagagataatatatcaaaactttatgcttttggaaccaatcgctgactagtgttgtgtcactgactcactactaggattcctttttgttgagcatcaacaatggcaggcaacaaggttataaatatggcatatccaatgatgattttgcataaatgctcttttatttttggaaatgatatttatcaatttggttttgcggctataaaattatcaatgtaatgtggacaatgtatatattatataacccaaagaaggatccaaatatattgtgaagcaccaaattgtggtcctagctgcaattttcagttttggtccatattatggtatagtgcatattttgtatacatcattatggtaaatttgagccaaatcctttttacataacaaaaaactattttcaacggtttataaatttcctgttcttactttatatttcactacacaaactttatcaacaaagtaccgaaatatatgtacgaccatatcattcttttggatcgattttttttgggctgattttgtataaatgcaatatggtgattagcaactttttagaccatattatatgaaaagagagaagagacataatgataaccacattctctttcttttttgatatttgatatatagtaaccaaattatttatgtatacgatacaattataaacatttttttaatacttttttagataccaaccaatgtagtttgaatagtctaaaagataaatattggagagagaatcttattgtgaagtgattatatgaaatacatcacaaaataagcaaacatgtatgtacacaatgcggctccatgatctctccttagtttgctcattatgttggatttaatatttaatccttataaagctaatgtttgatgcttattctatgtataaatattttttctagaaagagactagtattgatcgatttggcataataagacattatatataatttatatatattagagtaaattataggaatttttcttgagtattactcattgataattattaagaaaaataactataaatttctattatccacattttcgaaagagtgacacatggtcccttgcggaggcccactaaggtaccgggcccatcaaccggccatcaactagtaggtaaatatgtgtactggcccatctcttgaaatgggcacagatccaaacgacatgtccggatataaatcaaatcctctgagttccccaaaaaaaattcaactatgattaaaacctaagaatagaaggaatattgggagtgcatacccttaagggttatccaagagaagaagttgaagggtatccactcagatctatgaaaaggacatgacaaaaatataatcatttttttaggatcacccactactctaacgttcctttttcaaaacgatagcttgcgcctcaacctgtcattgtcaacagtactatatcgtatgacagactggaacttggaattgggccttacccacttgacccaattattcaaattataataataaataatataatttaccctattagtgagctttattgtacaaaaccctcatggggtctgaatccatcgacccatataagcagacgtgcctatagatatgtcattatgccttcatgcaaagggctcagaatcttttggttcacaaccagaaagtacattaaagagctgtaaaatgtccatagccaagttcttataacactactttatggactaagactcgttaacgctctaactacgtaaaaattatgtctcattttcttcttaatcgtattttcattagcttaatatgttattataattagttgtcgaaaaacttgttaaaaaaatatcaatttcagaagtaactatatggacattcattgtaatatccattaaaaatttatccatattttcagtcataagaaatatttaattaattttaaaaatttggcataatttacgatattgaaaataaaatttaaaataacaaattgaacatgtataaaaacacacacatatacatctgactatttatgtctactaatatatattttcttataaaaataatttattataatttctctatataatgaaaatagatagggaaatttgaatatttatgcatttattggattaaaattggtccactattcaaagctatccaatatttgtgaaacaggctaacttttactaaaattccatttcactcctctcattccaaaaactgactctctctcttctgcccttttctccatttctctcgaactctctcggacccactaccaccacgtaaagactgaacccaccataactcgatcaaaccaactaaggacgaagacctaatcggcccaccacccactccaccactcaacccaccacccactccaccactcaacccaccataaagatgaccacaaaactcgactcacaaatgtcagccgatgtaagattcctccctatggcaatttttaatattttcttattgttttagggttaaaatgatgtttattgatagatttagggtttgatatgtgcattttggattagatttagggttagatattgtatctgtgatttttaggcgagaaaacacatttttaagctgggccgatgcattcccaatgcaggcccgatgcatcgtgtgatgcaaagttggttttggggctagataaaggcctaatataaggcccgatgggcctgatggtcagtctgattgtctaaccatcttccaaaatttttgacttggctcaacgggcccgatatagggtacgatgatgcccgattattatatagaattttagtttttttgttatggcctgatgtgggcccaacagggtacgatatttagtccagatgtgttttctcgttcaattttttttaggtttcggtccgaaaggcccgacatagggcccgatggtaatttagaattttaatattttttgtggcccgatatttgctcgatgtagggtatgatgtttggcccaatgtttattctctttcatattttttaggtgaaggtctaacaagcccgacatagggccagataggttcgatacatggactgattgtaatccgatgcttatgcacaaattttctcactgccattttttgtgttttttttttgcactcttctaaagttccacgccttttacttctagtgtcagaccattacactggtcgtgtgacttggcggggcgatagttggtattacccaaaagtaaaagccaaatttatggaaatacagttgttggaaagggtgaaggaggaatccccttttaagaaattttttgagagagagccattagcattttcgggtgcact

SEQ ID NO: 113079 - DNA, 3382 bp, Cannabis sativa
cctatagattagggcattacatacaaaaagggttttagtgaaaaaaaaacgtgattaatttaaacttttataatgagcagtaattgtacaatacatttatagaatttgagatcccttatctaaattttcatacataaacaaatcaaaagatgtcccatggtgactataaaataatgagccctagctaccccaaagatctaactctctaggtcgaactgtcttaatatgtataatcttcatttagctccagacttactgtcatttagcaacaacctttcctttacctccacataacatagctgctatctgtgagtcgaaagactaagtaagaaaaccataaaatataaacataccccaactagtgaccaggcccccatacacccatcacgaagccataatctgcatcaaacacatataagtctcaaacattcttgacagaatgattgaccataatactagtcgggtactatagttatgtcgccatgacagcatcaatccatactttaagtataattgaccataatatcaacctggcaccatagttgtgttgccatggtagcatcaactcatgctacctgaaggtataaccaaccataataccaacctatactcagcactctagtcgtactgatgtggtagcattatttcatactacttgaattgcagaaaagatataatcatgatatctagatgcatgcttgtatacaccaactatcactataactgatatatcatatatctggcaatataaacatgtacatatgtatgtgattactagtcttacctcaattcttatttcaggtgtgtcggtcaatctgagtggaaatagatgctgatgagcaggggtcctaagtcacatttacaaaataactggtaagtgtttgttctagaacacttcttgattcctgaaaataatctacggttttctactaaactatgtggtgaaaacatcctaaaataaaaacttatagtttggctctaaaatatataccatattgtagagctcgtcacaagccttaaaaattatatagaacatctaaaatggacacttgagtgaaaagttatagccaaaatacgaattttaatcctcccaaaaatacaaaaaacggcagaccaaattttttgctccctgtaaaatggaacatcaggaaacaacatgattcccccccgccccccgattctaacctaaacctttccaaactatccagaacttctaaacacaatatataagcatatttcatgaagaaacctcagccaaaattcgaatagaaatcaaaataccaaacatgagccaagtttgagtactttgaactcaaaattgcatagcattttctacagccaaccaattcctttcaaactagtcctaaacaatccctaacaaccctagaaagtctttcctaacctttcttgaatccctcaaccagtcctactaaaaacaactactgaaaacctacaaaaatctaagaaaactagtaagttttgtgctacggtttaccttagatgattatggatgattgagcttagctttcctttgatcctcctagctgaaatgagttgaaaccaatgaagaagattctggttttcctctagtttttggaaaccacgaaaaggagaagatatgaaggtagaaggtaagcttgattttgactttttaatctccttttgacttaatttttgcttttgtttttttactttccccaagctgttgtcacctataaaaggtgagtcgtagccaccaaaactcttaaaaataggtgtcttatcaaagtaccaaatgataataatgtccttattaccccaatattcaaaaatgtctaataatatttgccccgcaatatacttgatacaaactcgtatccatgtgagttaaattttcatccaacccatttctactattaccagttataaaaatgtgaaaatatgaaatttcatacataacatgcataccacacctagaattcaataaaatctccaaaattgagaaataataaatataacacttattccataaaaataggctcataaaatataaaacacacatataaccacataatacaattaattaatgttaagtgtcttactaatctcatatctaagtatgacgatcattacaaaaactttgtattttttttattttactgcattattgttcatcacaggttttctagtataagttatagaaccttggtttgtagctacaaaatttttgtttcagtactaaatttattgttccacatttaattaattgattaattaaataataaatttgtaattataaaatacgaaatttcatttggtatcaaagcaagttactaaactcttcgtgagatcatgaggttacattattttgtttaatttattttatgtgatatgtcgttctttgtagaaggaagttctaccactcgtccacttctattgaatgatactaattatccttattcgaaggtcaggatgagggcgttcattaagtcacaagatgaaaaggcttggatggctatacttttgggttggtctctacctacttaaaaggatgatgaaggtaattttaaagtaaaacttgaacttaattggtctaataaagatgaaattttttttggctaataataaagcttttcatgcaatctttaatggtgttggtgaaggctttataaaattgatatcatcttgtcaatctgcaaaggagacgtggaaaattcttcaaactaagtttgaagatactgttgatgtaaagagatcacgttttaccatgttgcaaactagagttgatggattaaggatgtcaaaaacagaaactttatcagaattttatgaaagattgtctgatattggtaataaattgtttgctttgggagagaaactagatgaatatgtgttggttcaaaaatagtttgtgtacttccagacaattttgacatggaatttctagcaatggaggaggctaaggattttggcaaaatgaaggttgaggaactaatgggtttcgtaagaatatttgaactaaatcaacaaataaagctaaaaggcaagtctaaacgttcagataagaaaagcaaagttatttcatttaaattttcttaaaaagaagtttttgatgatgagaaagatgaaaaaatggccttgttaacaaggaattttcaaaaattcatgaaaaaggttggcaacaaaaagaatttttcaaaaatctcccataggtaatacctcgactaaaccttttgtttctaataaaggtattcaatgtagagaatgtgaaggctttggtcatattcagtctgagtattctcataccttgaaaaagaataaaaagggttttactgtaacaccctaactagcataggcctattacgtgatttttaaacgtactgtgcagctcgtcgctaatcaa

SEQ ID NO: 113080 - DNA, 2954 bp, Cannabis sativa
tattttattattgggaatctaactgatgtcagcaaacttaacctattctatatttttcttaaataattattattattattataatatattttttcatttaatcttgacagttttacattacttttacttcataccagcctatgaagcataaacactataaataaggggttaagggtaccatacataggcttgaagaggcaaaacagaaagcatcttccagattagtcttctctcctccactcttccaattacacaatcttctctctcaaattcgaacttcatctctcaaattgaacctgaaagcatggtcggaaccactcagaaaccctccacagtcaccaatatcaagttcctctgtagctacggcggcaaaatcctccctcgttatccagacggaaagctccggtatctcggtggtgatactcgcgttctcgccgtcgatcgctcgatttccttcgccggttagtaatattttactatttttcgtttataccgttttctgttttggttattttccgttgtcgtttatatatgtggattttgtgtttacagagctatcgttgaagctcgtggaattgtgtggaacttccgtttgtctccgttgtcaattgccgtcggaagatcttgacgctttagtttcgatcacttgtgatgaggatctgattaatctgatcgaggaatacgatcgaggtgcttcatcattatcatcactgaagatcagagcgtttctatttcctccaaaatcagtaaaaaaaatctctcctcctccttcatcggcttcgtccagttcatcttacagtacagctcaggtttcgactccaaggtctccgatgtcatcattcaccgacggccggtgcctccgacagatcgctccacatatggcgtttcaaaaatcggtcgtctctaatagagcaccgcactatgctcatcatcaccataatattcatggaaatccaggccaagtctacctcattcaccatggaaaccactggcaataaccagaagaagaaaaaaaaaaagagacgatgacgaaaatgaaaatattcgttcaattttaaagccaatactacaaatagtataaacaattggggcctaaacgaaaaaacgaaaaaaaacaaaggagttatatataaaaaaaaatgcagtatatatatgatgtatttggagctgtatatcgtttgagatggattgcttttagatccctggcgattaatgaatttcagtccagtttggtgtttttttttctcttttacatggtgagtgatttttccccaacttgaaaaaaaaagcccatagtgcatttcataacagcaaccttccgtcgtcgttttccgtttctccccccaaccccactagccaacttgccttacgttacgtcgttacccgttaccgttaccgttccgttagtttgttcgttatttttacggggttagcgtcacaacaaaatggctgcctattttctgtcagattatccactgttacgtgtcacgttaagtgtctgttatccgtcctcctttgtaggcgtgaatttatcttttcttgttcttcgtgatacttccacgtcatagatacccatatttttttaattattattatttattatttattaattaatcgtttttgattcgcaggtttagatgattctggaagtcgacattgccggagatgaaggtggagcatggctaaccaaccaaccacttatttattaaaaaaaatatattaattttggtaatatagttttgaattttgtgatattttgggaaaaaaataaaaaaaaaatgggccatgatgaagagaaattgaccggttgacagtttgtattttgtgaaatcagattgagtcgctgcgaaagcggtgggagcaatggtggttcgtatcaacaaacacttaagtccaaagccaatagaaaaatgaaaaagaaaaaatgtcacgacatttgtggggaccatatatgggaatactcaaacttattaagaagatggcaaaggagaaagagaaaacccataatttaatgtgtccacatgacagctggtatgagagttcctggttcatgaaattgcaattaaattttaagagactaaataataaaataaataaaataaaataaaataaaactttaattatttttattgagaaaagatacataagagtgaagatgaagtgtgaggagagtactaatgaggatttttggtgagtattagatgagggtcctcctccactcaagtagcactcaaaagggtggattccagttagtgacataaaagtgaaaagaaagttgataaatgccatattttgaagaagttatcctatgagttgaaattatacatatatgtccaagttcaacactatttattaaattgcgtatagttgaattcaaaactaaatcttacataatctcaccatctctcatataaatcgacggtacttttattctttttttgaaggatgactttgaaattaagttcatttagaaaataaattaggatgttcatggtatacggtgttcaagcattggtatatgacagttattttaggttgattagaatttttgtattgaactttaacctctactaaaactaaattgtatttttaaactttttacactgttaaaaatttatctaaattatttagagtattgaattatatgacttacattaacatttactatatgtatttaaaagtattttgaaagttaaaagtaaatacgtgaaatagtgagcaagtccgctcttaagcataaatgggttaagcccgtgcttacggtccatatttttttagggcccaaaataaaaaataataaaaaaatttattagtgtaaacaacaaatattcacagcttcttacaatatttttttgaggttcttacaatatttttttgaggaaattatattgtatacccactttacttaatttgttttaatttttacctctatttttatattttttttatatata

SEQ ID NO: 113081 - DNA, 4449 bp, Cannabis sativa
  modified_base (45)..(47): a, c, t, g, unknown or other
  modified_base (3412)..(3425): a, c, t, g, unknown or other
  modified_base (4394)..(4406): a, c, t, g, unknown or other
aaaattttactttcattttttgattaaaaaattaaaaaacaaaannnttaccaaacggcacctaaataactcaaaagtgagtagtagtcaaaaaaaaaagacacgaactgaccaaaaataataacgttttcgcaagaaaaatacaccatcttattagcataccagcaatccaaaagctgaaggaagctttaccgaactcttaatagcttgaacagctaccaagtagtcggattcaagtgaaacttgttgccaccctttgcctttacacgacccattttgccaactgaaactgcttccacaattgttccattgcttttcctaacaataaagctgaaattagggctgtacatcggtcggtttagacggtttatcctatatattttctaacacaatctaaagttcgggctactaaaatttaagtgcaacccgcccaatttttttaaaaaaaaaaactataaaccgacagcggtttggtcgggttaacccgcccaaactggtcaaacttctttttttgtttcaaaattaaaattaataaaaattaaaatatcatatttcaccaaaatacaacacaatatatatgactttgaaactaacaattaagtatataactttatattataatatatttaatcatttatgttatatataataaaaactaaaaagtaaaaaaaaattaaaatccaaagtcgggttggtcgggtcattcggtttaattgggggggttggacctattttcaactcgcttaattaacaaattggatggtttgtaattttttcgggttatttcgatttgtaacttttatcgattttttcgaattggtttgggtgggttattcggtttgggtgatttacaattttttttttacaaccctagctgaaaccaaatgaatttgtagcttcgaaaatatcaccatccacgttgaccttaattgtattagttgcaggtgtaatccatatcatgaacaagtagaggttccattcttctttgttgagcaaaactccattgattaaggttaaatcttggagacgaaaatacttcagcatccattttagttcatttattccatatgagatcatttcgagtgttccatatagcccatgagaccataagtacttcctttgaaacattatcatcttttcctgcaattgtttctttgaaccattgacaaaattcagcagaagtattggagttgaagctgatgatagactagttccagcaggctgttgcaaaagagcagcgaactaaaacacgaagaatggtttcgacctcttaatgacggaaaggacacagtagatcgacatcaacgtgttttgtttacaactgcactttagtgggaagacacactgcatacactacgtcccttaaatgattgttttagtaaattttttatttatttcgacatacttaaagagttttttaatctaattttcttttctaataataccttgtagttatttatgacgtttcttcttatacgaatattaagtaactatttaaatattttttttttggtattgtaaattatttaaaatttttaaaaaatttaccaataattttaaataattataatatatatgtgaacataaaaaaaaaaattaaaaacaattctaaataactaaaaagagaaaaatatacaaaaatatacctttaaactttacaaggtactacaaattctatagactataatgatttcatttttcaataaaataaaatcaatttcatccttttttgtgtctcggatatcaataatggtatggtatcctataacttttttttttttttgtctttagggcccatagcatattcatatattttatattatctttacttttggtgtgatgtattcattcaatagtctctttacaattttctttgtttagtgataactcatatatgaatattataatctaccacgttgtatgttacttaaatttatatgatataatattcgagcttaaaatgaagtctcacctattataacttaaaatatatgaatataattcttaaatataattagtatgggacctcaaataatgttggacatattacaaccttattgaaattaacactactcaaattggaagtaaatggatgagaaacttaaaagtgatactagttttttctattgatgaataaaaatgattcaatatatatgaaaaagttttctcttttttatttttcaaattctatgaaaaagttttatcttttatttatatagatcatcccttttatacatcgtgtagaaaagtacttatacataaaggtgtttataaaataattaatatgatataattcgcacttgtgtagattaaatttgattgaaaattctaaaattcgtatttgtggagatcgaatattaatttacatacaaaaatagctaattcaattcattctgtacctatttatatatatttaaaaatttataaatgtataattcatattttttttttaaaaaaaaactaatatatatatgttacatatatttatatgtttcaaaatttaatatataaaatatatgtatttatataaaaataaatatataatctaaaataaactaaatatttctatctacatacaactttttttttcgtcttttttaaaatttgttatttaattgttttaatttattatcgatacataaaacaataataacttttattttgttgttgttggttatataaaaataatttataatgtaataaatattaaaaaaataattaatctaaaataactaatcaaatccttattattgttgattgaatttaattggatttgagctcttgagcaaattagatttgatccaaaatataaaattcacatttaacttttttcaagtatttcattattacacatagtagctattaagctctaaacattaaggtggcgttggctagaggtaatgaaataaaaaagaaacaattttcattccgtttatttatttggttgcatattagagtattggaatgtcattccaatagaatgactttttcaccattttagtagaatgattattctgttttaaaatgaaaggaaaaattattccaatgcatgatgagaaaaaaaattaataattttttatgcattttaaaatttattacattctatttctatttttatttacattttcattcatattctcatgttttcattcttcccaaccaaacattaccttacattttttgacgttattctattattttgttgaatttcaagtcaaaatatattcttgaattctctatcacatatgctcgagtttcaaaaataattcctagaaaggaaattaagaattaagattttattatacgtttttttatttttacactttaaaataatttttttcattttttaggaaattctacatagaaactcatattacaactagcgttgtaacctaaattgcaacaaaaaatnnnnnnnnnnnnnntattgcaactagcgctgcaactactttagaaactcacactgtaaatttggaaaaaaaattataaaaataatatatgggtatatcataagaaatttgaattttaagtaaaattatatgtgggattatataattttttaaaaaaataaatgaaaatataataagaaaataaaaataaatacatcatgaagagcccttttaactttgaagtataataaaagaaaatagctcataataaaaagagaattattaaaaaggaaaaaaaatcaatatttatagcatatagcatattctatccttaaagtattatgccttaatccttaattagttttataaccaaaccacattcaataagagaaataggctattagtagagaggccaatttggaccaatatataaagaataataatcacttacctttacaaaattaaaaaagactttctcatccacaaaggtgtccctcacctagtgaaaagtcatggattaattaacattaaatgactttgtacggatttacaaagtatttttattttatttttcaaaagaaaaaaaaaaaaaagattacaaagtatactttttaaccatattaaatggcacaacttgtaaataaaattacttcaactacaagttattattgtcacttttaaaacatttgaagaaaaaaatcacataaaatttttaaaaaagaaaaatataaaaagccttaaaaatgtatgaaattgaaaattgtttatcaaatttagatatataaaaaggagattttacaaaaaaaaaaaatgggaataattatatagtttacaaaaatatgagaataaagtaatgtaacaaaatatggtaattttaaaaaatataataaacattccaacaaactgacatgaataaatttaataaaattttcaagaacaattatcaccaaaaagttgtcaaaataataaaaaaaaatcactatggctcgtttggaacgccgtatnnnnnnnnnnnnnattgtattgtattatattgaactatattttatgcaattttttt

SEQ ID NO: 113082 - DNA, 1137 bp, Cannabis sativa
atctataaaactgccctatttttgctccacccttatccctctccaaaaccccaaccaaacgccgcttcttatctttctttcttcttacacaagtttcatccaaaacccagaaccagaacaactgtagaagaagaagaagaaagataagaaacaatggcttccattaccggtgtctctttcatgtaccagtcacccagtttggaaccttacaggagagtctcatcttgtaccacaaccactgcttcagcgcccccttcttcttcctcttctttgccattttccgataagtctcactccaacagtgttttgagagcttattacaacaagggtgggtctcgtctgggtcttagcttagtggcttctgtaattgctactcccaattcggtactcagtgaagaagctttcaaagggcttggtgattttgacgaggaatctgttgatgttagtgactacgatgagtacgattccgaaggtgagcctggttctgtccctgttgatggtgatgagcttgctgtggccaagttgggtcttcctgctcgtcttgttgaaatcttggagaggcgtggaattactaaccttttccctatccaggtactatttttcgctacttctctttctttggttcgaatcaaaattgttatgtgtttgcactcctaattggatagacttaaggatttaatccacattctaagctctttatatatttacggattaacgaaatttgccaaactatgaaaatgttaaaattagcaaaataacgacattgaatttacattttcattgccactgtaatggttgcactgtgtaagttgtaaaattatggtcgtaaaatgatcaaatggcctttttatttcgcatataaactttattattttgctaataaaattttgtaagaagttattttgctaagggactctgtgaaatttagggtgctaatatttaaaaaaaaattgttatataaaattgtttttattttttaattttaatttagaattaaattttttaaaattttgaaaacaaaaatatcactaaacagttttttttttttttcataatcaatattttagattctgacaacctaaactttgaggtggcgtttggttggaggtaatgaaaaggaatggaatggaaaagaaa

SEQ ID NO: 113083 - DNA, 3072 bp, Cannabis sativa
  modified_base (3023)..(3045): a, c, t, g, unknown or other
agagccatataaccttccttaccgacccgctttcacttaagataatgcattacctcaaatgaaatcataatgttatcagttatcaacctccctgggacaaaagcactttggttagttgatattaactgtggaaggacttctttaaggcgattggcaagcactttagagatgattttgtatagcacattacaaagggatattggcctaagatcaatcattgaagttggattcttgacttttgggataagcaccatattagtatcattaaggccttgtgggagtatacccgttgtcatgaaacttctaacaagattgataatgtccaaacctacaatgctccaacaccgttgaaagaaaccaggggtcatgccgtcagggcatggggatttatcagggtgcatttggaaaaggactttacggacctcctcatttgaaaccggggcaaggagagaagcattttgagcttcagaaaccgtagtaggaacatgagcaataacatgggcagtaaaagtatttgaagtgcagaaaagatcattaaaataattgacaatgacatctgctaaaccattattccagtcaatccaattaccgtgagtatccctgagcttggacacagcattgtgcttctttctcgaagttgcataggcatgaaaatatttgctattgtggtcgccttctctaagccaaagttgtttggatctttgcctccagaacacctccctttgagtatagacttcaaaaagctgtttttcagcttctttaaatttctcgatcgaatcagcatcccttccctttctccacttgcggacatcatttttaagagtacgaattctatctttgaaatttccagtgtaatctttaccctaatcggctagaattgtactgcattgtgatattttctcagttatactgctgccaatacagaaatcccaggtgtctttgacaatttgagtgcaaattggttcccttagccaggcgtttttcgaatctgaacgtcttatgagcagcaataaaatcatcattccaagggacaagtaataaagggcaatgatctgagatagaccattcaagattgagaagctttgccgagttaaagaggttcatccatctttggttaacaagtgctctgtcaagcctaacttctatccaattgttggtgccacgacccttctcccaggtatattgatagccagtaagggcaaattcattgagatggcaatcggaaagagcttgattgaaaccattaatgagccagtcagggtatgcatttccaccttttttgtcttcttggcttgtgacattgttgagatcaccaatgacacaccatggaaggtcatatttcacagataaatttctcagcagtgtccaagtttgtaccctgttattcctatttggttctccataacagcccgtgagacgccatgtaggcttatcccctgcgtgaacactaacatcaatatggtggctcgaatactctagaacttgaatctcatctctgactttccaaagtagggcaagtcctccacttcgtccaacagcatcaacagttaacaggccttcaaagcccaaagaaactttcaatctttcaatagaatcatgtttgcaaagtgtctcacataagaaaacatatttgggccgcttatggatcactaaatccttaaagaattgtaaggcccgtgggttcccaagcccacggcaattccaactaaggatactcatgaccctcagtgggcctggaaaccaggacccaccaatgacccgttttttgacagcccatcagagtctaggctcatatcagattcctcttcattagtgccttcattaccttccataatggtcctccttcttttcgtatctatgaccataattgtgttggctggcacacgttcttcgcttcttcctgataaggattgactagcatctttactattaacgaatgcatgattttctccatcattcattgcatgtatctggccaccttcttgtccctggtacgtatttgcagtacccctctgattacggggagattgattgccaccattaatgacttcatcgttcctgccggagctttcaaactcatctgagaattgtttatcggaatcagttccagttcgcaaccattgtgctccgatcctctgtttcttccttcttggttcagccttcatccacagtccatatggcttcttaatttgatcaataggggtttcgaagagcttgtgacagaagctttctgaatggccaattataccacatataaaacagaaagtgggaacgaattcatactcaaactggcaccacagccaatcaccattggtcttcttcagtttgatccttcttttgagaggcaaatctatgttaacagtgactcttattcgaaggtaatccctccaaatacccataaagttcttcgggtcagacttgataaatgatccaatatagtttccaacatttctagcatttgtttccgtcatgaaccctgttctaagattgtgtaattgaacccacatatccagacgatgcagtcgaacacttctgggattttctccttttttcagacgctcgaaaatcaactggattctattgaaagtccaaggactctcatctattactctctgaatatcaatttcatgataaaactggaaaatgaataggttgggttccagttccttcacaaacatgccttttcctggttgccataaggaagccagagtgttctgcattgagtcaaaatcaatcagcctagtagttaagagttttccaacgagacaccaacgatcatcaataggttgtccaacatcctctgcaatatcgcacagcaactccccttcttgctcctcttccaattgtatattatcatattgctcattcaggttgacattccattggctactggaagccattctcgaaacaaagacaaaatctcacgaaagaaacacactcactcacgaaaacacgattagcatactcatgtcaatagacaagactataatataattaaatactttctaaaacgataaattaannnnnnnnnnnnnnnnnnnnnnnttacattgatgcagcggaattaatgtc

SEQ ID NO: 113084 - DNA, 1775 bp, Cannabis sativa
  modified_base (1529)..(1550): a, c, t, g, unknown or other
gtaaaataatttccaacatgtagaacataactatataaaagatcacaaaccacgtactcaaatagttatcgcgggaaattagaaatgagcagatttatgaaacatcaacttcaataccatcagttgaatgaccaatagtagttgccatagttcttgaacaggaaaacttggtacatcattgttgtgagagggttttgagataacctatctgctatgaacacgaggcatgcgttcttttctctgtacatacaaggatgatccattgacttaccaacaagcaattgaagaccctaacttagacaagtggaataatgacatggatcaaaaaatggattccatgcgtacctacaaagtttgggactatgaattcttgccagatggtgttacagctatagggtgtaaatgaatttttaagaattagagaaatactgaagggaaagtagagacctttaaagctaggcttgtagccaaaggcttcacacatcgagaagacgtcaattatgacaaaaccttctctcttgtggtgatgcttaaatctattcacattcttctatccttacctgcaacttatgattatgagatatagcaaatggacgtcaagattgattttctaaatggcaatcttcacaagaccatttatatggaacaactagaaggttatgtgcaaccaggggaagatcaaaaggtatgtcaattgcttaaatccatttatggcttcgaacaaaatgaatacaaagcctgtgtatacaaatacattaaaggtaatgtagtggtattactggttctttatgttgatgacattatacttattgggaataatgtagaaaggttatcaaacataaagaaatggttagctgaataattcccattgaaggatttggaagaagtaagctatgttcttggcattaaatttgtggagatataaagcgaagaacattagcacttttccaagaaaattatatagataaggttctagaaagattctccatagagaattccaagaaaggatagttaccatccagataagaaatttctctttgcaaggatcaatgtccaaagactcctctggagatagaggacatgagaaagtatccttatgcattagcagttgggagcttactatatacaatgttgtgtacaaggcttgacacatgttatgttgttgggattgttattcatgaccaattaaatccaagtttcgaacactggatagctgtgaagcatattctcaggtatctttagagaacgagagatctcaagcttatatattctggaaaaagacagtgattgtgctttttaattacacaaagatagtcaaaatttgatatttgggatagtattcactctttgtggtagagtttgttggattatattttaccaggacctagatttactaacaagtatgtttattaacacctaaatttgaatttctaaaataataaaatttaaacacatataaagtttgagtaaccttacattaattgcagcggaatataatgactcctcccattcagatctctaacccttgnnnnnnnnnnnnnnnnnnnnnnatcaagatctgagcctgattctccttaagttatttggattcttcaaagtcttacacactatgattgagtactagacttgctatgggtgggcatgtactcactcactaaggctcgaaaatttatgaagaacactggaagagtttcaaaaattagaagaaagaagaggaaggagtctcaagaactctctagttgtctgacaagttgtaaactaggttatgagtcatt

SEQ ID NO: 113085 - DNA, 3298 bp, Cannabis sativa
tttcattttgtgattaaaaaattgaaaaacaaaagtgttaccaaacggaattgaaaataggtcttgtttttggtgtctcaattttttttttattttttattttatattttataatttatataaatatatgcagatttagacagtatggattatgggaaagatacgcggagttatatcctgatggagatttgatttatacaattggtgttaacgactatacaaaagactggttctttgctcatgttaccaggtcaatattaattccactctagtaataattactatatgaaaattgttggttatggtggaactaatttgatacaatgttatttaattaatatcattcattgtaatactttgcatattaaaatattgtagatcagtttcttaaaatttcacattttcattgttccaagataaacaattaatgtcacaaaataatataattaccacacttaactattatattaattatatttctcgtttcattgcatttaataaaagagactacctccaaattttaaatggcaggaagactgagaatgacacatatgaagagaccacttggcaaatcaagtttgatcttgacaacaaaattgagactgctaatgcaacttttcaactccgcatagcccttgccactgcaaatgctgctcaattagaggtaacactttcattagagtttagagctatcccatatatattaatttgtatatttacaaaacacacattatttattatattaaattttaatgaaaattataaatgtcaagaagaaagtcttacacatcaccatcacctaccataaaactaatctctattttactttgtctatagtgttgctctacatgtagagccaactgtagactctatataaatgaattggtttttgttaatacttattacatactctttttactgattgaataataaattttatgaaatgaataaagatattagactatataattcatataaaaaattatagaaaaattgatgtacggtaatgtaaaataataataaatatagttttaattagtgatgtctttttaaaatagagtagaatgattgatgtaatgctctttgttagagagtcttacaattttaacatgtaaaaaacttaatactattaataatattatagactactttacttatcatttcattctgttctacttttagttatattttacattataagatagtatgagaattaagacaactctaaggagtatttcatcaaaaatccaaaaactaattgtaaaataaaagtaaaaaaaaattacttgtgatttagagattgtgagtcaaatagaatcacttgatttgagaattttgagtcaaagaattggtgaataaaagtagtctaacatcttaaggaaaatattacatagtctcgtattgatagaaacttaacatcctactacactcatcactaaataattttgagataaaatatcatactctttaccatgcacctcatttttcaatcatatttgcacatttctaggattttattaaacttttctcatttattttttccctcttattaactgtattcctttttttattaaaaataaaaaacaggttcgaattaatgatgagaatggaaatgctcctctgtttaacagtggacaaatcggacatgataacgcaatagctagacatggaattcatggtgtctacagactatttaacataagcattccaggatctctacttgttaatggaaaaactaatacaatatttttaacacaggccaacaacaccagccctttacaaggattcatgtatgattatattcgtttagaagctcctcaaattgcatcacatcacatcacatgatgtatattactattcatctcaaattctatttactatatttacccttatttggatcatcataacttattataattatgttataaaatgctatatttggatgtctaaattatctagtcatgtatctcaattaattcttgtttacatttaccattaattcttatcttctctttattttgatttttaattttttttattattttcttccaaatatctctattaatcatttctacaattttaaaaaagaataataacttaatcgttaattgttttattgaaaattaataccactgcgaaatcctgtcgaaaaaaatcagctattctagtcgttaataaactgttgaaatcattcattttgttgacattgttgtgtgatgttgttgcttccattgtcgtgtcatccatcgtgtattacaaacacaaggaattgttttgcatcatttttataggattattattctagcatagaagatgtagggtttaattttgaaataattacatgaggcacaattttttgttaaaaaattacaattttacgtttacagaattttttttaaatttttacggttttccataaaaataacacaaaaacaacaagaaaattacataaaagtaacatcaaaataacatctaaaaatatcaaaataacatgcagataacaaaaaatcaacaacaaattaacaagagtacaacataaaagaccgtattttctgtaaattaaatcaaaaaatcgtaagattgttaaaaattctgtgaaaccgtatttttgtaatttatttgttgtttttgtctatttgtgaaataatccctttaattttgatgtcaacaatttttttatgagagcattgctttttttaaaaaaaaaagaaaaagaaaaaagctttcaccttaattgtagagctactatattcgattttctttgacataataattttctcttcatctgtttatggaacgaatactaagagtatctataacgatgcaccattttactaaattactaaatcttgtcacagttacactcgaatgacacaccatattgtgcactaaattttacaccaatttagtgttgaacttttttttttttcgcattctaagccttattttaatttattttagaaaataatctaatattttagtcctgaaataaaaatttatcacaaaaataataattgatttaattaaaacactaatatcttggaaaatgcaaaataataataacaaaaatattaatattagtattaaataaaataaaaacaacattacactaagttattaaactaaaaaaacaacattaatgaaaataaacgttaagtagaataaaaatttaatatgatcacttaaggatcttaaccttgaagaatattaaactatgcaagtgtgattttatttaagttttctttttaaaaaaaaaaaatatatatatatatatatgtaatgtttaattgatttaata

SEQ ID NO: 113086 - DNA, 2751 bp, Cannabis sativa
  modified_base (2715)..(2723): a, c, t, g, unknown or other
ttctattgataacaaatcagattgtattgaaatgagttttatttaaggcataaaatcccagcatgtatctctatagatttcagttgcatttaccctggtcgatgtatgcgagaaacctgcaagattgacgctggctggacggtgtcatttaccctttctggatattatagcttattctttaaataaattgtttgaggaataacccacccatgatggcatgccgaggaggtatcagccgtccaaatcttaaaatgttccacatgttgcctagatgaatcaagtcatcctacgtagaatttgggataaaatttgtcctcccatgtccatgtgggaattttctgttggtacgtggactcgcttggcccacacactaggtgaatggagtgacacgtgctcggactacgatgtaggtatacagagttttccatattttcaagcatttaatgcttcacctcaaaaaatgtacctttgggtcacgtgctgacgattggacaccccagtgtgtactgatggcaccttttgagggaaaaacccaaaatttaaaatgttgaattaccaaaataccctctcagaaacctatacgaagggaattaggatttcatttttctcttttagccatttcaaaactcagataattaagagcaaataatcaaattctctcaaatcttcaagttctcttcgaagcttcaaggaattttcaagatcatttccaaacttctactcgaattactcggtgatcttcaagagtgagtaagtccctaactctttatgtattttctttaatttcttgcattttactttgaattgtttctatgaacattctaggtttatgaaatgaattgttcttcatttttagagatttaagacttataatttgatatcgaatgcatgcgcacggaccataatctttgatttttttgcaaatttcactgttttttgttaaaaaaaacactttaaaacactatgctcgatgtttttggagaattttgagatcatccagtgtacttgagcatcttcaaactaggattctcgtcattagaacaaaatttccttccttcgatctttaaatctaattggttggagcaaatgagttgtttctttccatgaccctggtcggttcttacctccctttccctcttttttagatgaactcgagcgacttcttggaaggtaagcaccaagtagatgatggattactttaattactatatcaggaccagcctaaactctgtgcaacctcttcatcatcgagtgagactttaacgtctagctttgacgagtgggaagtaacaagcaaggagtctgaacctccaaaacctattgcgcaacaccatcactaccctaattgtattagcggtgaaagttatggtcggttcatttgggaattgaatcgaggcatgaggcgatatctacctatttcttggacatacaaggtcctcgtagggattccagacactttgcccgtaggcgatccagaaccttcaaagaaagtcactgtggaagtggagattgcggttaacgttgcacaatatccttcaactagacgcccgcccaggactagagaattggcatggaccaagaaaacttacaagaaagtttcatctgaagaccctcatcttgcacggttaatggcgttagttcatgctctgaagaagaagctactgaggtgcatgtcgataatgtcgatgtgcaagaagttgaagaccaaggcgaggctcgcccaactcaagttgataaggaggaagagcttgtcgctcttacgttgtttgaagggttcggcggatataatgaggtggggcagcctattactgtgcgaagagaactaatggtcgagaaaattgattatgttagtgaggaatacaaggaggctcgtgagtccatacactaagaaaggcctaagccaatgtggatttctcctccgtccaacctcacactcaagaggcttacaagcctaaacaagaaggggctcaatggagatgtaacttcctttctccattttgacgaacagcttgccaatgaccctaggatggtatttgcgcgtggtccaattgacatgcctaacatggggctcttttatcccttcatcatacttctagaagctggcaaattacaatatgcttgacgcagtttacgccgaagggtatcaagtattaggctgctttatacatcctatacgggcaacagaaatgggggataccttctcctcatgataccaactagttctttgacatgaagtccagctcgaggtacgaccgctcaggttatttaattttcccaagttgactgcccctggctgactggcacgacgggctaggatgtctcgaagatagatgaattcatccaagattattatattgtgcaagggatgaaggctaaccacatgtcctttcagtaggccaaaattgatgaccaacctcctttcacacgggtagaggacaagggcccaagctattttgtagatgccgagcacaacatgaaacatctctttgctagctaacgaggagaatttccttgttatgcactatactcgttcggggaggctataaaagaagggtcggtagccgaggcacatgttcttgtgcaaccaacatccaagccaaataagaagaagaggaataaggcaaataggaagcagggtccgggtgaggtttctattattattaaggaagctgtcgcgaaagtgacatgtcccatctgttggaatttattttaccnnnnnnnnngatctactcataagtatgttgtttaaca

SEQ ID NO: 113087 - DNA, 2324 bp, Cannabis sativa
tcaacaaaatcaattagtaaagtttcaaacaatttcaaaaatacaattgacttaaacaagattaggctccctctaaagctctgctacaatcttttgtaattactttgccaatttgatttctgaacatcaccaaacactgaactcctttcgtctttgatgtgtttcctcccaaagtaattcttaaacaagacttctcttgaagacctttctcgtgttcaatgaagttcttcaacttattctaagaacagaataataacaaaatcacaatgaccaaaaccttgttgaacacaccaagattttacaaaagaaaatatctcctcacaaacgaggaattgtgaggaattgttgaaaccttggctgcagaagaaaaacgaggaattgttgttgtagatttgggcagtgacacttcaagagatagatcatctagttctttctcaacagttgggatgattcagcatcatcatctacaatagcatctttgccataaacattagctgggattagttaaataacaattttgctaaatttttgtaccattaattgcttattcatgatggagcgtaaagtttttttcttaatgctctgttttatgggatagtggaatagttaaataacttatctttctgagtttatatatatatatatatgttgattgggtcttctaggttgagtatggtttgattttgcaattttattcttatttttgtgtttagtttttctatgtttaaagtgttttttttggatctatttttacttccattaaagaaagtcaataatgacaccatgaatattaggtttttacattacaggtttttagatgaaaagaaaggatttgtgctaggtcatggtaatgatgatatattgatgatgacacaattcgatttgttagtagtattttatttttattttagttgagaaaattatacttatgtagttatgttggtatcttaaatatatgtttatttattaacttttggacaattataactatattatgcatttataattagaacaatttaaaattatattttattgtgtaattatttataattaagctttcttattttaatttaaaaaataattaataaaatttttaaattaaataaaaaataaattacaaagcacctggcaaaagtcaaacatccatctatcaaaagtaatttttaccagggcattaatgccctggcaaaaataagacctttcccggtgcacatttgcactgacaaaagttagacttttcccagtgtacatttgtgctgacaaaagtaagatttttccctacgtacatttgtgatggcaaaagttagacttttaggaaaagttatttttgccaacgctttttattttgtgccggcaaaagttccaatactatatgaatttaccaacctcctttgccagtgcaaaaatgcgttggtaaaagtaaatgttgttttaccagcaccaggggcggacccatattaaggcaaggtggggccgtcgcccccttgaaaaaaaaaatcggaaaaaaaatatatatacatcttagttagtcaaaatatatatttttaattaaaaatgaaatttctaaacatgatacaacttttagcataatagttaagctttatgttatagattgaggaagtaatgggatcaaatcccaataagagtgtagttaccttttagtattttatttttttttaatagagattaataaaatttgtatttagtactttaatcattgaagttaacttttttatttttattttttttttacttaaactatatttatactatgaaaatataaatttgcattaatttttaatatgttatatcatgtagaaaaaaatggtacggtctcccttactttaaaaaaaagtttgtcttccctcaacttaaatcttaagtccgtcactaatcagtacaatatctaatttttgtcagcacaaaaatacattgctaaaagtctaaaatagtaagtatgtgattataaatgatgcccaatgtaataatagtattataaatgaccaaggtgtgtgtaactttccagaaaagtttaccataatatattgtagtttgttaacacaaccgactatgagctgtataataaggactattaaatgtcccaaggtgagtgttcaaaggtgttttgttgtatctaaaagattaagtctcaaaaaggccctttttctatctagatgaattactaagtctatatatctattatgatctaataagtcttgtcttgtgacatgtttgagagttagcatttgtgttttgtgcgtccgattacggttgtttatgatttaatggcgtctagtagtagaactatggaagatttgggacat

SEQ ID NO: 113088 - DNA, 1643 bp, Cannabis sativa
  modified_base (1583)..(1607): a, c, t, g, unknown or other
aattaatcaaaaatcaagaagcagttatgttttaaaatagtaaagtttttcgagcaagagtcatatatcaatgtattaatatttttgattctcttagctatttacatcatgtttagggtaactaagtaatctatatttactttcttcaaaaaaaaaaaaaagtaatctatatttaaaatattgtagtcttcatatattctaacatctgaatataaatatatatattttatgatactgttagatgttttggagtgtgtatgtggtgtgggtgacattgagctttgtagattaatttattaaacctttcatattttattttgatctcttatataatattataaaaaagttattatattttatattatattatttattttgtgcccaaaaaagttaacaaaatacaataattttagaacaccgtgtgcgaagcagcgcagtgcagattaatttcctaattaacattaacttctttaaaatgacatctactttaagaagagaatggtaaaaatttaccatatatcaagtgatatattttatatttcttcttaaggtaatgaataatgcttctccacatgtaaaagtattatttaaatttattttattaatatttttgtttctttatatgtgtatatgtatataaattataatatttatatatatttataaaactgaattatgaagcggtgatgtgacattttaaaatggctttgaaattattttttctctctctttgattttctcagtaaacctatttattaactaaaaaaaataagaattataatattttacattttttttatttgtaattatttaagttattttttttctctcgttaattcttttattaaacctatttattaattaataaaaataaaaattataatattttagtcattttttattttccaaaataaaaaaaataataatgaaatactaaaatatatcattaactatatatacatataagtttaaaataaaaattaattactctaaacgatatattataaactacacatattaactcttttatattctttcatatattctttacgtttaagattatacacacaatattaatagctaggtgactatatatggtgctattttgcgagaaatcaaaagtttcaacaaatcggttctaattaacgtgcataatcaattgtaaacatatatatattatctatttgtttcaggtataactaatttatttaatgagtgactctttataaaagtagtattcaattttttcatagctttttagtttttttacctttgatattaatttctatttctttgatgttataattacatgcgataattaatgacaagaattatgtattgtgtaaaaattaaggttttttttattaggtgcatatatatggttttttgaaaattatgaatcatattcttatataattataatgtatggttattttcttataatcttcttaggtatacatatattatttattattagtttatcattgttatatattatatattttgatagtaaattagtaaagggatatttacaaaagttgacaataaacttataattactatttggtaacacttttgttttnnnnnnnnnnnnnnnnnnnnnnnnngtaaaatttttgtttttaaaaaaattatttttaaaa

SEQ ID NO: 113089 - DNA, 2374 bp, Cannabis sativa
  modified_base (44)..(75): a, c, t, g, unknown or other
  modified_base (2314)..(2349): a, c, t, g, unknown or other
tgaaccatgcaacataaaaggttatttctgatctttattaatannnnnnnnnnnnnnnnnnnnnnnnnnnnnnnntagggcacaaaacccaacaggaggcactagcacactttttttccctgggtgttgagtcctggtgcttgagcacatgcatgaccctcctttgcagatcagttgagtgaccttgccctagggtttgatcaggccttcctttttggagatttggattttaacgtgcaggacttggtagaaaatttttcttcttggattcatcatctacgactttccctttgtttcccagttgggagggtccagcttaaggattgttgaaccttcttgcaacaactaaggtgtcatcattaatatgaacccccaggacctttgtttattggaggaacctttgagctaagacccattgctgctatcagggcttgcatttgcaggagggtctcctaaatttgaagggtagtttcttcttgctacgccattttagcatcatggtctatgactatctgccataaccgtagaacctcggggtcttcctcatagtcttagtaatattctcatctttcatcattgtcaccatcttcctagttgtcctctttgagagggttttcattgtgttgttcttgtagttggtgaacattttgaagaggttgacctctcgcgactgacgcttcaccgtctcctgcagtggttgtctgagcatctactagagcaagtcagtttaggccatcagccacatgggctttggtgttgttgcaagtagcttggttgcctcgtttctcaatcactgttcttatggctaccatatttgtagatgacaaatatggtggaaacttttttaaatctcaatgaaagtactaaaatatttaccgatattttcaaaaactgaaataaaagaagattaagttgaagaaaacatgattaagaaataaataaaatgagattttttacatggttgaagtgttaatgagatttagggcccgtttggcacaaaatctgaaatagctaaaagttgtgataacaaacgtgtttggtaagcaattaaaaaacaacttgttgaaaaatttatggagaaactatagctaaaaactaaagttggtacaacccaactttaagaaaaatttattttgattaaaatacagtataataaattattttgtactaaaagtatttaattacttattatatattacaaaaaataacaatgtttttttgaaggaaaaaataattaatattataatctcttattttttatttgttttaaaaagtattttatatttatatttaaatttttattattaacaaaccacatcaacctaaagtttcttataaactacaattttttttacaagtaataaaaatataattttaaaatattatgaattatttttatcaaatatatataaatttatactatggggaaaattattaaaaatatatagaaaataaaaaatttataacataattttttatatatttgtgattataattaactagattataatattatcattattataatagaatcttaataacccacaacaattttaaatttataatttactaaacacccagctcattttttcttttttgcaattcgttacaactatattttcccacaacacagctacaattgccttttcccatagcatagcttttttaaactgacccttagtccacaagtcaatattattaagccatggctgtggactatttaactactttttctcgtacaagtatttctacctaaaatttgtaaccatttacattaagggatgaaaccttcactacaacaattttagtttttaggggcaacaatattaggggcgacatattgtcgcctctttatgtcgcctctaaagagggtggtactatgcatcttggctaatgggttgggcttacccaggctcgctagggtttgttaggtgaggcttaattgtgaagataaccatcgtccgtacgccgacatactgttcacagtgatagtcttgcatgagccttcaaattgttagaggaatgtcagaatagtgggcattggcccaaaaatgtgatttccttttattgtgtgcctttccaaggcctgacagaggggataagtcgccaaattttttgggatccctatcagagacatgccacgtaggatgaggtcctgaacgcctttttgactcccgttcccaaatgacccccaagggtatctgtctctacctctcaggacgcctgttgtctaaatgtgtgattattttttgaaatcatatgtccaacttagtcgccattacaaaaaaagactacttttagtgacaactttttnnnnnnnnnnnnnnnnnnnnnnnnnnnnnnnnnnnntttagtcacaacaaaaaattacttg

SEQ ID NO: 113090 - DNA, 4382 bp, Cannabis sativa
gtgttcctggacggaccagtggaggtgctgccataaaagagcttcattgagcactggagcttgtggaggagttttctgaacttgtttttgttggtgtgacctgagacatttgagtgctttcagttgtcatgagtgttggcctttgaatggctctgacaccaaagttcaaattcgagagaaatgtagaaaatgaagactcagctcaaagagcatgagtgctactgattttcatatatagaaaaataattacagaaacaaaggcacaagtgccaattacacagtgtcacgttgcaaccaaaaaaagcaacctgtaacaacaatctgttaaaggaaataacagatgaaatctacctaaggattacaacaatcaagcattccaataagacccttcagtcatcattgacatcatcatttggtgatgattcgatttctctgaagtctgtcattatattttattttgtaaaacataatatttaaattgaaattaactaaatagagagaactgacaaatttttataaaacacatgatcaaaatttatattcactctattacaaagcgattactagtaatactatacaagaatgggatccgttttgcatgaaagtattcacactatattagtgctaggaaacagagaatgtattcacacgctatatatttcactttcttttagaatgaatatgcttttaaaagtccttggagttcgatacacatgacattatacatagttatagacaagattaattcttaataatcaagtttgcttaatttactattagcactaaacctttgattggcatcaaatttcacaccaatagaggtgcacatttgagtttccgtctcccttttcaattcaagtcaattgcctttggacctgaatcaatgtcattctgatattgactattcagatcaaacgttcccactaatccatattttctcaaatggttactgtttttgtctaaatgtgttggtgatctcttagaatttggttgctcaacactaataccatcagacatggtacctccattccttttcctcccactaacttgattgcttgtagcattgttccgtagattgtgttctggatgaacttccattagttgtagttcaatggtgttcgtgctagacttttggggatcaccattgttatccattggtttcttctcttcttctcgccctgagctttcagaagaagtcagtgaactctccatggaacacattgtgcctctcatttgtttcctttcaatgccttctaagcttaaatctcttgtctctgttatttctgagaaagaagagctggggcatccattgttaaccatcgataataatcgagaaagctcggctttcgtgagctctacacccactgaagaagagctatatccagcaagagtttcttgagctttcttcagtacagactgtagatactttccttgagcttcaattctcagctgcagatgtctttgcacctgaaatacagtacggatttattctgaatatactcttgcatctaatcttattttaaagaaaggcagctgagttgggatttgtgttattggtcctacctcaagctgttcatggagtttcctttgtacttccatttgcaattggagagcctgagctatatgcaagcctctgatcaaacacaacattttgttaataggaactccttcaattataacttccataaataagaaagaaaagaaaaatgggatctatttctaactattactcattcatctgactctgagttccatcattgatttctccattaaaatgcccatcactcccctgaatctctttgaaatctgaaacaaggatgacactatcagaaatatgtagccaaaaaaaaaattgagcatcatattctgtaatagcatagccaatatataatatatatattacctgatccattgaagctaccttcttgcttattgtccgagcaggcttcagattgttggctcttacccaacctgtatttctgcataagaacagaaaatggttttcaatatgattttttactatactatacaaaaatgattggacagttatctatatgggagaaaatatgtacaatacctgtaaatggctctttagatggtacaaagtcagtcctggaattcccatcaccctcatcaaactctttggagtagcctctgcccatattataaaaagaaagatacacattagatctttcgtactaagaagatgaagattattttgtaaattaatatttatgtatactcaactatctgctcctccaagctgattgatagcatcaacaaatctttgatgaagttctgatgtccatttgagccttggttttgcatcagtggataagaccaaattcatattctgattttgcatattcagaataacaatttgtgtgtattccaggtgagacagatagatagagagctagggacttttcctaaggtggtgcttgaatatgtggcagctgtagttctctttataaattggagttgttgggctgtcctattttctcactccatatctggaaacataagtggggttatgttggagaggggaatatatgccatgagctgtggctcttttctttctcccatcttccatttcataccaactttttctttaaaaaaagaaaaaaaaaaaaacaattatttgtttattaattgatttttttctttcttctttgacttgaaaggagtggagagaatctctgatgcagcaagaacagagaaagcaaacatagttcaatttgagtctcaaaaggagagaaaagaagaaaagtgtatggtttgtttttatcttgatgtttttccacatccctctctctctctctctttctctccgttttccatatatatctccccatttctctccttgattccctacttaattgggctgccccaccatgatgaataatgggtgcaacttaatagcatgagaagctttgaaaggtgaaaaaaaaaataagttgatgaaagtgctataatggatatttcttttttgtgactaaaagggaaattcaaatgagttttctttctctctcttctattttattttaatttataggagggtgtggtgtgattggcagattctttttgttctttgtagggaagaaggaatcaaagaatcttacattagattttaggacccaggccataacatatttttcttgtaaagtagtagtaagctgagggaataaaaggaaaaaaaaaaaaaaaagaaaggttgaatcaaacaagaccttgtaatgaaatgaagatgagatacaaattcctatacaatgacacccctacagtatatgctttattgtaaaaaaattgaagtgaaagaaagccatgtatttgtaggatcatccaaataaagtggaatctgaggccctgaattttatactcaaccctgtcatatacagtctattactcaaagctttaacatacacctctgaggtcccacatatgtaccatccatcagtcaatattcctctactcatcatttttcgttttacactaatctttctaacattaattgcaatttgtttgagacaattattaactgttcttgttatctcttagttttcacattgacatggagggggtccaaggaagggtgacatggcaagtcataactggacgtaaagttaccttaatttatccaaagttcaaatatacacatatgtacataaatatttttcatctagaaggtaaatcaaagtttcctttcaatttgcgattagctcatcaaaatttgatccatcatcttatagtgctatctatgggacacatagtgcaaattgtactgtacaatcacgatatgcacacaactcttttctcaaagggagcacccaatgaaatgacaaaaaggtccatataatatacgatcatgcatgcactactttttcttttataatgtaataaatgtgattagaaatcaaacagcacttgctctggataaaagtctcacaaagaaatatattccaaagggagtgttgctttaatctgtaatgcatatccaggacgattggcaagtgaagaggagaaattttcatcccaaaaaagaaaagatgaggaaaaaaaaaaggaaaagagagtgcacaatggccaacaacaaatcgtaaaagtcaattgcataagatcaaactgtggatttcttgggttgcggtcaagaagttttgatcacttggaatcaaaatccaatcattggtttttaaaagccttaccccatctaaacacagccacatgtacattttggtttgcctcattgatgtaaccaatgtttcatgattcaaaagtacctaaagttttgattcttaatgttattgaaattaaaacacataataatgaatccaagatgttgagaatcatggaatcactttattgcaccatctggatctcgtgcg

SEQ ID NO: 113091 - DNA, 7703 bp, Cannabis sativa
ggggtgatactaatctcactagaaaactttaagtttcactatgctctaagatttcaatttgacacttcaaacaacgaggctgagtatgaagccttgataactggtttgggaatagctgaagcgttaaaagtcaagaatcttatgtgctacagtgactcacagttaattgtaaatcaagttctaggcgaataccaggcaaagggtttaagaatggaaaaatacatggagaaggttcggaagaacttggaaaagtttgattattttaaaatcaaacaaattgaaagagaacaaaactctaatgccgacgccttggcaaaactggcttcgcagaacaaacttgatgagttgaatttggtaccggtcgaagtattaaacgaaccgagtatatatgaaaaggaagaagttgggatgattgataactcgcctacttggatgacacccatagtcaaatatcttctcaacgggcaacttgcaaaagacaaaaatgaggcatgaaaacttatgtattaagtaccttgctacacgatagtagaaggcaaattgtatcaaaggggatattcaatacctctcctatcgtgtgttctccccacataagcaagcgagataatcaaagagatccacgaaggcttttgtggagaccatgcaggttggcaaagcttgtcaaagaaaataatttgacaaggatgttattggccaactataaataaagacactcacaaatttgtcaaaaatgcgataagtgtcaaagattttcacatatatcttgcgtaccaccaacaaaactaagaatggtgaccgcaccagacctatttgcaatatgggggattaattttattgcagcactccctatagggtgaggaggagcaaagtgcgcagtagtgcctgtcgatttctttacaaagtggacagaggctgaacctttaatttccataacctgcaagaaagttctcgactttgtcgtccaaaacataatttgtagatttggaataccaattaagatagtatatgataatggaacaaagttcgatggtgagttattcactgatgtctgcgaaaggaacaaaattattaagggcttctcgttagtctcaaggtctcaagtgaatgggcaagtagaagctattaataaaaccttgaaggatatatcaaaaagaagttggacgctgcaaaaggtagaagggtagatgaactaccacaagtgctttgggctcacagaacgattgagaaaacagtagcagggcatactctgtcctcgctggcatttggctcagaggcaatgctgcaaatagaagtcaatatctcgacccacagttgagatttctataatcaagaataaaactaataactcttgaaattgtccttggatctacttcaagaaaaacgtactgagttgcaaattactaatgctgcatatcaacaccgagttacaagatatttcaataagaaagtgaagaaaaagctttttaatgtcggtgatttggtgctaaggcgggtatttgcaaacatgagagatgcatctacaggagtatttaacccaaactaggaaggttcatatgtgaacgaggcaatagttggagctggggtttataaattggctcggcttaacaactcgctaataaagaacaactcgaatgttgagcatttgtgaccctactaccagtaaactcaaaaatatgctgtaatctctctctgatgtgatttttaaatttcaatcattattaataaagttgaagtatttttcaagtaattacaaagttttattctttaaaattacttgaggggcacatatatgtgcatgatcaaatggaatttatccaggaatacataatatattgcaaacccactccatttatttttttttattgaagtcatctatggacgatgcaaggtcaaaagtaacagttgtaaatgagatttaactcataacatcaacactaagctacatgtgaagctgaatatcaaacgactcacattttataggaatgtattaaaacaaggtaccaagatgccttgataaaaaatacttaacctaaggtgtgaatagaaggcttaactattcatataggcaataaaaaatatacaaaataattcacaagataaattattcaaagtatgtttaagtttgcttaaattagattataactctttacgcgaagtagaactgataaactgctcacgaatggaaggcatcgcagacgataattgctcacgtacatagtagattactaactactttagcaatatcaaaaggaaaacaagatccatagaaacacttacttaaagtattttaaatttgatcaaagtataattgtttatgttgtgaataaaaacgcaaacaagcaaatatatcaagttcaaatgtaaaaatgcgaggcaataaatgaaagataaaataaaagcaaagttggcaatccaacaatgcaaatttgtctttacaaaaaagggccacaagggggaaaaccattgtctcagccatagggccattttcctaaataaataaataaataaaaatatatagttaaaaaccaagccacctacatagtaggaggcttggatggttcttcttcttctccttctgcctcagcctcctcttctgctttcttggcctgctcgcagtaggcaagtacttcctccatgccttctcccaagaaactcaaataaatttttgtattgccatccaagctcggtagatggaatgcttggcaacggcattgcattgctccttggtgtttgcttgagcgccctcgagcttcatggtggttgcattgagttcttcttggagtttcagacacaacttggacttgtccttggcctcattctgagatgcctcaagctcagccttttaggccctcttcttctcctcggcccctttatttagacgagagatctctgactgagcctctttccattctttagccacgacctcgctttgcccaaatgtgctctaaagctcgccctccagttgtttcaccctgtcgagaccccggtgttcggcgacaaaggagaggaagttttgcttaaaataaatcaatgaaaatgcataagtatttttgagggttcttgaaataaaaggcaaaacgaaaggagagagaaactaattgagatactgaaggcgagactcctctcaagcatctcggtcaggctgccattattgaccaagtcccggtcgcttggcaaaaaggatcagagatgacgccaacaagtagcagcatactgcacagagtgttctgaaccaatactcccagccttgatgggcaaagcctcaggcacttggcttgaagaagctgtggcctgacttgcttttggaacagggtcctcgatatgtgttatagcaagaggatgagtttgaacttggttctcagaaggctcgagatctatggtctgcgaggcacgtttcttgttagccttcctcttcttaggccttttgaggggctccacattgatgtatgaagacgcaaccgagacaattatccttttcttccccttttttcttgaagagtggacaaggtcctctagatccatatctgcaagataaagaaatgtgctaacacttgtttaaaaacagataaaggggaaaatgggaaacgatttcccacttaagggagtttaccataatcataagatgatgaagaaggaggactatagtattcactaaattccctagatcctgtgatcctgaatatgtcataggagttaattggttctaaatcccaacttgaatctatatgacctaacctatccaacatagtcccatactgctagacaatcccatagtatgagctagtacatctaatctgaatgtggaatcctgggtaccaactatcgaacatatgtattacgcgatctatgagaaagggattctaggtgtaaattttttactgaatatctcagaaagacacaagtgtgttacgctcggccctatgcactgtgggtgaccattcaaattgattacctcgagattcttcttctccagcttcccgagggactgcattctagaggtaatgcacccgagccgcatagtcttgagtttcctcgtcagctgggactcgaacctactaccacgacatatacttgggatacttataatcacaagtatactcattttcagcgagtaggccaactaatctcatattggcttcgttcaagagaaactcaactgattagagaccaaagggaagacccaacagaagcctgcattgctctgccatcttgagagtgggggttggtcttttcgagattgctgtcaaaaggataaaatgataagtctgcgaggcaaaaattaaaaacatggaataatttaaaaccaagtttggcgcagatggttacttacgtattatgtgaaaggcggttgtatttattggggagaggccacttgtgcagaagaagtattctttgaaaggggtcttgtttggtaacccaacgatgatcttacgatcgcctgtatgagtcccaagatagtaaaagcctcctaaaacatttttccttgcagggactgccttgaccgagtaaagatagactatttctaggggagtggggcattcccatcctaaaatcttatacaaaacccttaaattagcaaggattctataggaaattggaaccaacttgaatggggctattctaagatggttgatgaacttcttaaagtaatctcacaaggggagaatcgcttcagccgtgatacgctcgaggctccaagtgcctatccctaccgagccactggtttcaccaatggccccctcatgtgcctcgcgagtaagtcaatttggtgggtagtagctaaattcagaaggggaaacagatctaacacgacatttctgtttctggtcaatgccacaaatccataagataccacctaaatagtctctgatggctcttatcctcgactcaatgagttcggcctcgaaagtgacgttggggtcctggagagtgtttgacttacgaggcttggaagacataatttcttgagggactacattctagaggtaatgcacccgacccacattgtcctgagttttctcgtcagctgggactggaacctgctgccctgacatatacttgggatacttataatcacaagtatactcattttcagcgagtaggccaacagatcttagattggcttcattcaagagaaactcggctgattagagaccaaagggaagacctagcagaagcctacgtccctcggccatctcgagagtggggggtggtcttttcgagaccgctgtcaaaaggataaaatataagtcagcgaggccaaaattaaaaacatagaataatttaaaaccaagtttggggtacatggttacttacgtattatgcaaaaggtagttgtactgattggggagagaccacttgtgtagaagaagtcttctttgaaaggggtcttgtttggtaacccaacgatgatcttagaattgcctgtatgagtcccaacatagtaaaagcctccagcagcatttttcctcacgagccaccggtacttgcttttccactagttttaccataggccccctcacgtccctagcgagtaagttgttgtggtgggtagcagctaaattcaccagggcaacagatctaacacgacttttctgtttttggtcaatgcaacaagtccttaagataccacctacatagtcttttatggctcttatccccgactcaatgagttcggcctcgaaagtgatgttggggtcttggggagtctttgacttatgaggcttggaagacatcattttgaagtccagattacttggtggaaaagcaattgtgactctaggtaaaaataagggcttagctaaaggaatagatgataaaattgggaggttcaggccagagagcatctcgtaagaaaccacattgaccctctagcaatatcatcctggtgggtttttatcaaatggtttctaattcttgcatcatttatctctaattttgactggggttttgaagttttgcgtttgtaggggatggcaagttcactaggatactctgtttctacggattttggagaataaacttctgaaccagattgggacatatttacaaaaagagtaatcccaattcctggatgaaatttatcaaactagaagctttaaaatatgagaaacctaaaaatttgtactctgcctaaaccctaaaaattactcaaaatttcaaaccaaaatcactaaaagtaaatggaatggcaaaaaagtagactataaaaacgataaccaaaccaaaaaaatgtaaaaaaaaaagaatagagaaggatgggtcacttatcgtttgaagtcgggttgttgtacaatgaaccattctacaactgaagatggagcgaatggtgtgatgatctttttgaactcttgaggtcgaacaataaattcgaataaacacgcaaaaagaatgtaagtgatagtgagggcatgcaaagctttgtaaaatcaggatggagtttttcacagaaaggctcaagaaattttgaaatggcgaaaatggttaaaatgtggttcttttttcatttttataccattgggttttgtctctgttagattaagaaacaaaggatccaacagatagaaatgagagagaagtggaaaagatggtttattaatgctcatgatgtgcctcgaaacaataaaccgccaaattaaagagaatgcattttttcataagggattatggcagatataccctcagtaatcatttaaaaagcattttttattgaaaatgactttttaaggggcaattgttaaacccgaaattcagctgtacttcagaaggtgacacacgttaatctcgtggaatatgaataaaaaaatataatggtaatcatatcattaaatgcaaaatggaataactcattaaatatagaataaatagagtatatttataactcgctaactgcacagtcttaagcaagacaagaatgtacaaactatcaatttttgtatcgacgagaaaccatcttgtctcgaaaggcaaaatcccgtaggggccatagataacgcatagcaagacatccatctcactacgtctaagaaggcattgacgaggcgagtcagttattagaacacttagcgtataatacacattatactaactaagtgtaataacttgaaggtcatgattgtccagtctgcaaggctttatggtcaaagagaagttcttaagtttgctcaatgaactggtgctcatgccattgctggaaggcttatgaataaaccaagttgttcatgtatgaggtgagatacctctagcgagatatcctggaagtgagtttctatcaatgttagcgttgaccaccttgaagacaatttaaatcacaactgtgtgattttttaatattatatacacgtacttaaatggagtgtaataaaagcccataattttgatgaatattgttatgggattcgaatttgaatgtaattaactgtcaacctatattactataaataggggcagattctacgcaaaaaaaggaggaaaaatcttagagagaaaagggagtgtacagattgtaaaaaccctaatactgtatccaaaaatatctgaataagatagactcgtggactatgcagagttaactgcaaaactacataaaaatcttagtgtcatcgttattattttcattatatttgtacttgatttattacaaaataggttcataatcgttaacaaaaatctgcgttaacaatatatatatatatatttgttca

SEQ ID NO: 113092 - DNA, 2453 bp, Cannabis sativa
  modified_base (2414)..(2415): a, c, t, g, unknown or other
acactagtattttttgtcttgatcatgcttcatatttttctatgcaaaataaaattggtatttccacatttcatagtaccataattcagaagtattaggtagctataaatcctactttagtgataaagcaaaaatccagaatgacaaagcaaaaagaaaaagaaaagttgatgattaggcctaccattgttctttgtcacctcttgatgaagttgtgctagtcactgaggaatgactaccaaattgcacatatgaacagcctaaaataagtagaattaaagtaataatatctaattaatataagtatataacagggtggcaaaattaattaaagtaacaacctttttggcttctacaaaaatgaaaggaaaaagaatactttgttatgtttaaaaaatggtgactcaccattactttctttgctgtgttctactaaattctgtttccgagtctgctgcccaagtctatacttctgcaaaatccacaatttattcacttcaacaaaaatgaaatcatatttttccagaatcaaaacatctaacaaaacaaaaataaataaagaatatttacctgtaaatggcttttcaaatggtataatgtcagaccttttaatcccattagccttaacacagctttcggagttgcttctgaaataaacacaaaataacttagagagcattacatatgtacacctcaatatcaataattgataattaacaactaatgtgacaattcagttaatcaaacaaactagagcaagaacttttaggaagttatacaattcttggaggagaaaaaaaagaacggaaagcagtggttagttgtgatacatactttcagggccaccaagtttagtaacggcgtcaacaaatcgatcatgaagatcagccgtccatctcagcctcggttttgggtctcttgtcatcacaatcccgttttcgtacccaaaacttctctccattatgtttctcccactcaaaaataaactttctaggtagcctaacagaggagagcagaattcttcaagaaaaaacaaagaaaggagagcagaacacacagaggctgttgttctctatagtctagtagtatagtatctagcctatagtctatagatcaatcaatccaaccttttcttatgaatggaattgggattagattcttctgggcatgcatttagcttttcttttcgaagggtccccaaaactgtaggcctaaaaggaataaggacgtgtaattcacaccaaacaacatttgagattcccttttaagaaaaaacacaaaaccagaaaacatgacacttagacgtgaaaaaaaggcaaagttgacgaaacattaatgctcattgttgggtttcattgaggaaaataatataaacaaagcaattattattattattattatttagttaaattttgttttagtgatttgactttatttagagacaagatgtacatattttagttgcaggaacatgtagagagaacctcggcgacgaatctgaggcaacagcatgggacccacccacccaatggaggagaggttcacaacttcacatatagatgagagtagcatggagtttggaaatgggagaaggagaaggagcatattagaggtgacacgtggaggccagcgtggaatattcgccgtcgaacaaggggggaagaatattcgtggagtcacgtggcggtggaaggtcatgtgggtggggtcggtggtccagcgacaacaaatggagacgcgtttcggagcctccgcaagcgacggggattggaattggaggtgacgccagaatattccaaacaaacccttgcatgtatgtatgtagcataattagatgagatagtagtgggtgggggttgtacttgtgggcctgcctccctatttcttcacttttctttttctgggatattctattatttatttatttattttaaatgttttaagttaatccaattttctaatttagtgaaactaaaatatggttgttagattaagttcaccattcactttagtttgggattttttatcttcaaaatcattacaatatatataacaactaagatgtattatataataccgcagttccaatcctagctctacaactacaacctccatgtaaacttgatctcctattctttaaagttaccaccacattctaatagtctcgaaacctcttcacagtaaagaaaaaacaaaaacaagagcaactactgccaccaggacaaaagagtattactatagaatacaaatataagaatatgattttgtcccgtgattgtactttcacggaatgcattctgtgatgtacggcagctgtcagatgaggtaattatttgatctgacgactgagattgatctaggggtatttagagttgaaaagtaaaaacgtaccttgacactcatttaatgtaccnngagacccatctaatataccacggaatacattccgtgaa

SEQ ID NO: 113093 - DNA, 1529 bp, Cannabis sativa
  modified_base (42)..(52): a, c, t, g, unknown or other
catatatgaataagaaatttttcgatatttatatataaattnnnnnnnnnnnaatattaataatttaatatttatgcatatatcaaaatatttaattctttattaataatcagaatatgtctttatagatttttcagggcataaaccctaacaacaccatatcaacatggtgccttgaagagcaacttggcatgactcaagaaccatattgatattgtgccttaaagagcatctcaacaagctcttcaagagcaccatctcggcattgtacacttgaggaacatcttgaccaccaaagccattgcaaatggtaatctcagccatcacttgtggatggccatctcggccaaacctgtcaagaagaacctcgacaggcaagcttctcaagaggcacttgctttgctcactacattgagtttctacaccgtggtcgaacaacaaaaccaacacttagtgaatttttttaattactagagaaaaatcaataaaggtggaatcaaaaggtcaaggcaagcacacgacctagtacgcgccaagatacggccacaccacctgcgttatggtggttgtgagagatggtacatgcaatgcgagtagtggaggcatctttcctacataaaccgacatcacgacaaagggtaagtcgcatccactacctctgcacataaggaccacctaacacctgataaccactacttggcagaagaccacctcctacaccatgtcacctgcaagagtatgatgtcctacttgtgtctttgggaccactagaagatcaacttataaatcagagctattagagctcaccaattttgagatttgaaaaggggttggaaaatcattgtattcaaagcactatagtgactaatataactgttttttcttcctctccctttaacattctgaaattaacgtaaagtttttaagtttactttcaagtttttgaatttccagccacaagttagttgacgagttctagccgtaaactagtactcaagtgaagttcaacgaaagtatgaactcgatgtatatatactcgtattgatggtttgaattgtaaatttaaagaacttaagtcaaggtagagattgttagagtttgactcaaattaattttgtttctatatttataaagttgtaattttttgggtaattattaattgtgtaaaaaaaagttttactatttaagttttataattttataaatatatgttttgtgtgtgagagaaaaatgtgtgggaaaaggttaattgtgaaagagaagtgagtgtgaatttgtagtggggtgagagagaacaaaaagcaagtgtatattgaatttaggtagaaaaattgagatagtgggtaaatgtaaaagttataagtaagttttgtaatttttccaaactaagtttttgcttctttattatttcggtactgagcctagagtttattaattgggcattttacaattttttatacattattttaattaattacaaaatatgtgcaaaaaaacttattatcattttctcatacacttttatatat

SEQ ID NO: 113094 - DNA, 2998 bp, Cannabis sativa
  modified_base (2958)..(2960): a, c, t, g, unknown or other
tctctctctctctctttctttcgatctctcttcttcgtatgttggctattttttaggattgcggtggtgttgtcgacataggtcggggtgcggtggtggcgtgcgatgttggtggtgtggtggtgcggtggtttaaaattgtgcattttgggttcaaatgattgttcaaatctgtgtatatgtggtcatgtgagatctaaaatagtggggtatgcgatgcttctgattttattttcctaattcttttactttggttcataatagaagcgaaaaacccactagtgtcggtgcactggttttgcttcggttatgaaccaaagtaaaaccttttcttttgctttggttcataatagaagcaaaaaaatatttaacgtcggttcaaaattgaagcaaaaaaaatcaaaatttgtgcctacgactataacgttggttatagaaccaaagcaattgtttacgtgtcactttaaaaccaaaacaaaaagcactttttgtagtagtgcaggaacatatcccagcttcgtgaccataaaaccttcaacccttggcaaaccattctcgaaagcaaagtctgctacaatgagatcagagggacgagacaccgtgttgccggaagactcttccagtttccctttttattcctgcaaacaaataaggaaaaaataattgtcagatattaaccaagaatcgtattagattaaatagggaaacttcctaaaatgagtatcaagcaattaattcctagttaatttcccacaatcaaagtgcacggtgttgaccaaatcaaaccaaattccatttgcctagtcatcgaatcttctcctttgtgggccggacatcacgagacagtccaagtatgttattcactgtatacttcccaatagagggaaaagggaaactaaatttaattcttagactactgtaaatacccatcaaatcctctggactaaggcttgaaatctctggcaaacttttttgaggaaaacttgagatcatatattctttttattcctaaaggctctttcaagttaagaactacttaataacactaactcgaggcataaggctaattaatgccccaaccacgtaaaaaattgtttatctttttttttttactctcctttgttaattgtttttttttcatcagttgttattgtttatatttcgtttatgaaagttttcgtaaactccctataacaatccatctttcttctttacaaataacagtgaagcaccccatggtgagaaactcaatctgatgaatccaagattaagtaactcttgtaaaacaatcttacatacccttagccccacatgagtcatttgatagggaactttagatatcaattccactcccagaactaatttaatgacaaattcaatttctcaatgaggaggtattccaggaaaatcctttggaaatacatcttataattcacatacaagtctcatactttcatgtccaattttaataggtcatccagtatccaccactatatctaggaatcctatgcaacctttgtacattaggtctctatctttcataactgtatttttgggtatacgagattcttgtaccttacccaaaaatatagttgggttggcacttttaggttgaaacacgacacaactgtagctcgatcaggttggcggtcaactcacaaccgtcaatcccaaaaggtaaggatctaatccatctggtactgatcatcaactccctagatgataacagagttccaaaccctgaagcatatacattgagaggtttatgaaaactttctatcactctacctgacacataagagtgtgtagctccagattcaactaacaccgtataagaaaagctattaatagataagcattgattccacactgacacatttcacgccaagaccctaactaacacttacaatttctttcccaactataacatttactactcacaactaataatcatggtttttattaaataatattatttgctaaattctcatatgtttcctattatcaaaagcaataaacatttaatcacacatgtaaataagtatttactctcaacacttactgcaccatgattcgagcttgtatttcacgattcttgtacatgttcaactagtttttaggaagtttaaaaacctttgcgctttgataccaaattgtaatgtcttactcagagaaatgctaactgtcgtgattacaatctcgttaatcgagatctataagcatagtgattaaaaataaatacataacttaattaaataaaaaacatttcacaaaacatactctacttaaaatataatattaattatacatgtctgggatcctatcaaattattttcaaaatatctcaagttatttgatataggccgacctaagcgtcaaagggaaatttctttacgattccctgttggacacaaccctcgtggcctaggttggccaaaacctttataattcatcatcaaaacccacaaactattggctgacctaacactgcttttcccttgcttgcacaatagagatctcgtgagctaagacccagcaagacagaccaataatatagtatgaacaattatattaataacacttcatacattacacctctacgtatataattgtgccactacactgtagataatattatatcatataaattgatgccatcgaatccaatgtctatatgacatagacctacttgttatgttcacacgttttgtttacatacaaggccttactagggtttatcttggttttagctaccaagtctaacctagttatacagttctcatataactcgtcttacttattcacataatacaatatatcttaaggtaaaaatcctaattcatgattccatatataaacaatcatatatcatataactgcgtgactatgctatactcttgttggaaatattttatcaggatctagatttactaccaagtatgttttattaacatcctnnnatgaattctaaaacaataaaaataaacacataagagtt

SEQ ID NO: 113095 - DNA, 6383 bp, Cannabis sativa
  modified_base (31)..(35): a, c, t, g, unknown or other
tgcctttcatgaatctaaaaattgaagtcannnnnttagttttatgcaaattaaactgaatttctagttgaattttagtttcgtagcagttcttctacaatttttttatgaatttgaaacagcccctgttttgattgattctgatcgtcttttcaggtgaagtcactagaattaatggtggttctctttctggttgaattttcgtttcagttgcgttagattgctgcgtagttgcacgatggttgcacaatggttgcgtgataattgcacaatggttaaatgtgtgtgtaagtggtatttgtgtaattttttttattataatttatttttatttggccaactgaaaatatttttgtaataatattattttttttttttttagttaaaactgaaaaacgcgataaataatctgccaaaaatgctcttacgaggctatttacccaggcgagaattggtattttaatttacggcaagattgaaaacaggatttgaagagcacgggatattttgcgcgtgtctctggggtaaacctaattagatttgtaattttgtagtagctgatacatgattgggcaatcgatcccaaattgcgtcacacacttcaccccacgcgcctgcttagattcaccttcaccgaactctccaaaatataaagagcaataataaaaagaaaaagattttctcaattcaaacgcaaagaagaccgaccgacccaccctcccactcgctaccttctacaatggcggaaaagcttgaccgatggactctaatgacgccggctttgttaaccctactctgttcgatgggttttctgatgactccggccacagctatttggttgaccattcccaacacgggaactaagtgcgtttctgaggaaatacaatccaacgtcgtcgttttggccgattactacgtcgttcatgacgccctagatgtcaatcacgatcaacctcacctccctaccatttctgctcgggtatgtttcattttctccttccacttatctaattgtatatttttttttggatgaatctaagattttctttttctgaaaatgaaattccgaattcgttagaatggaatgagatctaataagttcaattgcgtgtctatattatatttatgtaaatctaagtaaatccagcttcaaagctgtaacttttcagtttctcgtatttttagctgttgaactctggattgtgaattttgatatagtaatcgataactatctctcgatctcctatgttgagttaatagggagtaaattgtttaattcctgatattgggtttgtttttggtttcgtgttatttgaaaaaggttacatcaccctatggaaacaatctacaccacctggaaaatgtcactcaaggtcagtttgcctttacaacaacagagagtggaaattacttggcttgtttctggatggatggcaaatcaccggaggcatcaagcttcagtgttagtctagactggagaaccggaattgcagccaaggattgggaatcggttgccaggaaggaaaagattgaggtaactttacttgtattttctaccttttgattgaggccacttttcttttctagatgtttctgttatctgagagagtgtcttgtcaattgtgttgtgctaaagggtgtagaactggagctcaggaaacttgaaggtattgtagattctattagagagaatctagtttatctcaagaacaggtaactcctaccgttgttgcacccctttacagacttgttttttcccctgtgcatatagagaaggtttactacagatattgattaaagtttggttggctttgatcaaatactctacagattaattggatgatagaatttgactagatgtaacatgggttgatctggttcttatctttcttccaagtgaggtcttttaaactttaatggggggttgagcttttgcacaggttaacattgtatctaaaggatcatatcatttagatatctaaattatgaacacgtacaacttactagattaatgggagtacaaatggaatttgatttgtgctagtttataataagaatcatatcattacaagattttcagagacaaagttgtttgaattcaagtaaatcatagcatttatgtgactgtcgtttttttatttacacagagaagcagagatgagggaagtaagcgaaaaaacgaacgcaagagtcgcttggtttagtatcatgtcccttggtgtgtgcatttttgtctcaggtctgcaattgtggcacttgaagcgcttcttccgaaagaagaagcttatatagatttctacttctcattggtttcctgatacaaatattatggtagaagatgaaatggtggggaaagggagcagaagtgcgtactctaattattctttaactccgggagtaaaaatgtttgtttgaaaagtttatagtttcccggatatggggaataagtagaaatacagaattttaacaggtgtctttacagtgttagtttttgtgactttaccccttgtcattgattttttattatctttggactttatggagaatgtattgatatacccttcggtgacccccttgaaatggccacacatgtaagattatgatttgattttcagctattgtcttttgggtagttatagaaaggaaatttaactatgcttaataatgtacgtaatttatgtatggtaaaatgataaagttactacttaaccttaaaagaagcatattttagatttttttttaagttttttattcaacaaagaatcaaaggataaaagttattacaaagctcaacaataagtaaaagtaaatcaataccaacaaagagtgagcaaacaacaagactaatagaccgaccaattgagacacgaatatccattgaagtcatagtcattttcaagtaccatatcagtatagatggaagataaagaattaaaacaaggatacaaaccctctgatctctaacgagagaaaatccattattgaaccaaaaaactaaataaaaaacacaacataaaagcattagatctgaaagtggatctaagataaaacaacaacaataaataaaaacaagattaaagaatctacaccaacgggagaggaagagtcatcctgccaccaacaagctctcaacactggagggaacgcaaaactcgaccaccccttcatcttagcacgtccccgagcttcaaaagaaaaggcagagggccaaaaacgccaaaaatggttgagcaaagacgaatgacactgtcggaggcccatcgatgcctcctacagatctcaaccgctgtagaccacgaagccccaaaaacctccacctcccctcaacggcgactctgaaaaagcatccctgttgtcggcttccccatgctcgtcgtgcaaggaaccatagccaagagaaccaccaacatacagtccctctcagctagagaacaccaaacacatagccaggccgtcgactaggtctctagccgagaagggagaagaaaaagagatgaaaccctaacttggatagagaaaagagaagaaaaccctagctaaaggtacgtacaattagaagaacgtaccttctatttggtttgcttttgaaagtatgtgtattccacatattttagatttaaggaatatcttttttattaagatacgaattatatcaattttattttgtttcatgggattatggtatgcatttaaaaaatgattatcgacgtggttggtaaatttttatgtatgagtagtttttttaggtcacaagttcataaaaccgaatttgataattattaaaagttatattatagattatatataattcaatgcatactcaactataaaatttgataacaatagtaaattcacttggaaacatgatcacgtccttgagcatcttgattggtgcgttattaataatgaatgaaaaaatctttttcctaatgcttctttgttacatctcccattctatggttctgataatatgacccttaaagttattctcgaagatgacctttggtgacaaaatgggaacaaacattttttttttttgaaaaccattagctcacgaacactcatttttatgacattgttcactcttcttggagtgttaatgagaattagcctgaggccaacaaccttgaatattttcttcataagcaaacaaattgtgttaatagtattaagtcttggagcagtggccagggcaaccttaggaaccagattaaggccactcagaaaactttggatagtatttatactttcattttcttgagtaacaacgaccttgacatggccaaagctctctaggcttctcttgacacttcgctttacaaagataaaatagtttggaagcaaagtcaataattggctggcttagagcaggagacaaaaataccaagttctttcatcataaagcctctgctagaagaaaaaaaaatcattagatcaaccacccttgaggatggcttcgttgctagaagaaaaaaaaatcattagatcaaccacccttgaggatggctttgtttctcaactttgtaaatttttacaagtctttgttttccacccaaggttgtgacaatgttgttatttctgatatccttgctagtgtcaatagtagcctatcccaatctcaggttgcttccctcgatagccctttcatagaggatgaggttagggaagctttaattcatctttttgctgacaaggctcttgctctggatggcctcaatgctttcttttataaaaaaaattggaccactcttgggtctgatttttgcaaagtcattttggctgttcttaacaatatcttggatgtctccctcatcaacaatactattattgttattattcccaagagaaaaaatgcttcttaaatgagggatttcaaacccattagcctgtgttctaccctttacaaagtgattgataaggttttagtcaatagaatttaacttgttcttgatactatcatctccagcaaccaaagtgtcttcctgtctgataggctgatctttgataacattttcattgccaatgaaattgttaatgctattgattgtaggaagaaaggaaagattggttgggctgctcttaaacttgacatggagaaggccttcgatagagttgagtggagctttgtggaggctattctcaagcatgttggttttccctctaggtttgtttccgttgtgcttaggtgtgtctcttcggttaatggttttctttctaagttttttcactccactaagggataaggcaaggggatcccttatccccttatctgttcctcttaatggctgaagggctttctactgccattcgaattaaagagtccaccaaagaattctctggccttactatctgcaaaaatgccactgttacttcccatttgatttttattgatgacaacattttattttcccctgtcaatgtaaactctaccactgccatctgaagcattttgcatacctacaatcgtgctactagccagttggttaactttgccaagtcttcgattctgctctcccttaataccaattttgaggccaaggaaagcttttgtaatcacttgggacttacgatgtgggttttattagtaaatatttaggggttcctcagtgtgttggtagggctaacaaatttgtcttccattacttagttcaaagtgtctcctcggaaatgagtgtatgaaatgctaagttcttttctagaactggtaaagaaactcttatcaaagttgtggtctaagatgtcccctcttatgctatgtcttgctttatatggactagtaatagttgtacgaatctccaaagacttattgctaatttctgatggggatacttaaataataataaaaaaaagatccattgggagaattggcctagtttatgtgtttcaaaattttatgggaggttggggtttcagtctattaataatcataaccacgctctcctggctaagcaggcttgaaaagtatggacaaacccctcctcgctacttttttgtctgctcaatgctaggtattttaatgaataatgatattcttgatgctcctaaggggcactgctcttctatcacttggagaagtcttctttggggcagagagcttcttttgaaggggcttgtttggaaagtgggaaatgggaattccatctctttggctaactctcgttgggttctaggtttgaacactcttaccttatcacatgatggttcctctcataatcttattgtctctttttttatttatgaagaagggagttggttttgagttttgtgccctaaataaaactcatttcaaataattagatttactaattaataaaagatcagaaataattttatgttgcatggttcacatgatttattttataattatgtttaatgtataaatt

SEQ ID NO: 113096 - DNA, 4128 bp, Cannabis sativa
  modified_base (4039)..(4061): a, c, t, g, unknown or other
ttttttttttttttcatttctacttttgccaaaacaaagcccttcacttgatttctttttctatttttctttttttttttcccaatcttcctttttttcccacatatattacaaaaacttgcttttcatatgggttcacatatgggtcactttggcccatttaattctcacattatccatactacaaacaataaagacaatgtgagctttagtgtggatgaatgctttatactaaatatttgggctcccacgagtttatggactttaatatcatttctctcgatttcgacaattagtccaaaatataagaaactcaataaattttctacaaaaatacacaacattgagattaacacttataaaatgagaaactcaataaattgattcagagttctgaaaattaatatataaagaactaaaattaatatttattcaaaactaaataaaaagactactaaaataaactaaaaatgcttgagaacaaacctaaattaatgcacaaaaagagttaaataactctattttcatagagttatcagtttctgggggagtgggacacggagttcttgcgaactaatttttgtcatgagaatataacttattcttggtatggtacctagttcattggattctgaagatcgaattatttggcactataataagaatggtgagtatttcgtgcaaagtgggtatcaagtggcgattaagaaaagagaaatagaggaagggtcgaatatggcgagggtggagaaatggtggaggcgagtttggggtttgaaagttccaacaaagaaaacattttctttggcatctttgtcacgagtggctgcccacttctaatgtgactaggaagagggggatgtgttgtcgttgtaggttacaatgggaagatgtggattggtcccatgctatttggggttgtgattgaattacaagtttgtggaaagttgttagttttgggaaggtcagtaaaaagtgtgctggtgaggtacctatagctttttatgccacattgataggttggtgccaaaagacaagtttgatttatttattatttttgcttggcagacttggtatatgcggaactatgtgttaatttttttgtactgtcaatggatcaagcactggattgggtggttgaatatttgcatgagttttgggataaacatggtggtggtcatttgtatgaggtattgggacgttaccatccatctccactcttggtatgatattgtccgctttgggcctaagccctcacgactttgttctagggcaccttcccaaaagcccccattccaatggagatagtgttcattcttatatacccatgatctttcccatttcaagccaatgtgagactttggttacacacccagagatcctcacctcaaacataggaccatattacctcccctcaattaatgatcttctattcgtccactctctacccactagtgtactttcctttaatgcgttgagacgtatgtcttacatggattcccaccactacctcaagagtttcgtgctcattactaggccaactgcaatgcgagcacactgcctaaccacatccacagaccatcatgagagtacaacgaggctcatcacctttatttgatattctgaggattcattcacatggccaactttgggatccgactctgatactattttttggaatgtcagacaccatccatctccactcttggtatgatattgtatgctttgggccttagtcctcacggttttatttttgggcaccttcccaaaaggtctcataccaatagagatagtgtccatcctatatacccatgatcttttccatttccagccaatgtgagactttggttgcacacccaacatgaagctaagacaaaatgcaaatggtagcctcctaaggtgggagagttgctaattaaagtggatattgtgattggtgaagttgacaggtgttgtagtaccagattggtggttcgaaatcatgttggtgaggttactgcagcgcaaggtatgttcttgaataggcccttttctcctattgctgctgagctattagctataaaacatgggattgagatgactagcttgttatcattagagcattgtataatcttgttggattgtattttggcggttgctatgttagggaggccaccggagttatgtggagcatgggacctacttgtggtggagataaagctgttgtttggagagaatggtattgcaggtgtaactttctaggcacgatttgctaaagaagtggcacatttgatagataagaatgttttgagttgtaaagtttctagttttggggatgaaggagttcctccaatggctgtctttgttgtgattgaggatttgcctctccttatgtaatgcttttaatatgtactgttcttgttttaaaaaaagcttataaataatacaacaattgttaaaataaaaatttacaaaggcaaaaagtttggaaataagatagtacgataactgaaaatgaaatcgcatagtaacacattttttaatgagttttttgggtcaaaacctttccaactgttatttcacttgtatttaacattttaagcttaaattttggcgataaaactctccaaactacagaattagtagcaatattattgctcataatttagtgaaatgagcgttgcaaagttaccaatcataaaacaaataaattgtacttttcgactttacaatatggttgctcataatttagtgaaatgggtgttgcaatttaaagtagaaggagacataccgtttgaggaaatggatcaatctttgctaccggagccggattagtttgtgggttttttttttttttttacttttacaattagttatgtgtatttatgccctattgtactttcttttaatttttttgaatgtgtctatttgatttatttttttcgaaccctaatttttgttgtttgaattaatgctcttcggcctcttctctggttggaggcacattctataaaaaaaattctcaactttaatttaaatatataaaggaaaatttgataggttgagacctaattttgttttcattgtgggatattttttgtttttataaatagatattctttttcaaagctcctcctattattaaatggatataacacttagctttggttcaagtctaaaggactcccactagcatctctagcatctctattttcctatttaaaatatatcactaaaatactacttacttatttgacatcacttctacaacacatcatacattagttagtcagttgagtcagcaagttagttagagttgttttaagttaattggtataactttatacttttataatctaaattattttgttcggtgtatcaaaatgtatcaagatttgaagagatatatttggtagtgaggaatgaagaaggttagtagaatatgttgcgcgcagctttacttgccaacaaactaaatcagaacgccaaagatcaacaaggacattacaacaatggattttgtcactggactacccactactcgcaaagggaaggatacaatatgggtcattgtggatagattgactaagtccggccattaatttctacttataagaaaacttgatgggcggattgattggcgaatatttacattgcggagattgtaagatgacatggagttcccacctctatcgtttcagattgagtacgaacgacttacgtcaacattctggaaacaaatgcaatgtaaatattcgccatagtaaacttaccatcaagaccttgaaagatatgttgagagcttgtgttttggacttccaatgatcatgggagactaaattaacttccattaatagagttttcttacactaacaactattatgatactgtgaaaatgactccttataaaactcactataaggaaatgtcgatcccttattcactggcatgaggcaagtcaaaggaaattcttgggtacaaaagaaattgatagggccactaaagatgttaagatgatacatcagaggatatagacttctatcactacaagaaatgtcannnnnnnnnnnnnnnnnnnnnnntgcgctggtaaaagtaacttttaccagtacatttcataaactgcgctggcaaaaaggtcaaagtttt

SEQ ID NO: 113097 - DNA, 2949 bp, Cannabis sativa
ttcatttagatatttaaaaaatattaaaatttaattttataaaaactaaattttacgggaataaacttgagtatattttatttttctcaaaaaatgtcaatttgtttatttgtataatttaatatttttttattgaattttttaagtatttttctttatttgttaagatatgagattataaatataaataagtttgattttttcttcaaaaaattgtaatttatttaaattatttattagattgtcaataattttgatttgattataaagtttgaaaatattttttggcgaataatttaatttttttaagtaaaattaatatttgttaattaatttaatattattgtcaagtttttttaataatttttattattttttgaaaattaatagaatattataattgcttaaaaatagaatattataatttttaaaataattttttaatataagagggcacaattttatattagtcaaagttttggggataaaaatgctaatttttaacaataaggataacataacttaacagaatggacataattatgtaactattatttttaacaagccatatattttaggggacaaaattaaataattctgagtttaagaggaaaaaatgttaattattctctttaggatagattcatgaagataatcattgtgtacaatgttactttttctataacattaggttaagtattaaacaaaaactttactgattaaaatgtgcttattattttttaaagggaaacaaaaccacaacattattaattattgcatgtgtaaatattaactttttcaagaattaggttaaagttaaagaaaaactttagtcattcaaaatgtgcttattgattttagaggaaaaaaaaagaccccaaatattggtatagatcacagtgaataaaaccatgtgcttgccattgagaacaaaatcctagctaataaactaaaacaaattccaactattgagtacattaattccacttgttctattactccattatttttaataaataattcttctattatttttcttcctattattttaaaaattaaatcaaataaagtctttacttaagagattctgtttttctttgtttagtttacttttttttttttctttagcaatatattccttagagaattgagccgccacatgcctatagttccctatttataaataatccactaaaataaataaataaataacataaaagatttgaacttagatttggtcacatactcaacatgattctacagtgtgagctttttacacgtgtacatttaaatattattctcattcaactttggtcataaattaacattattaataataaaaattaaaaaattaactattaatttaaccacattatgtaaggaaaaataataacatattctaaggtgcagaaattgacacattacctattctactccataaaataattttttttaaaataaaaaattgaatcaaataaaataatggatagagtacactagcttttttttttaatggaattttataagcataataataaaatgagagagaggaataagaaatgtgggagaggaagggacatgttggggatttaggggcacacgtgggtgtatctgaaacgcacacgtggcagtggaattgtgatgacgtggcaatgcgtttattgactgataaagtcttacggtgggggcgggtgtacggaatccgtgcgtctcgtgagttgtgccgcttgacctgacctgagatatgggtcgagtaaaggattttgtcgcacgtgattatcacgtgtacggattatttcggggtaaatgaaatattgtcgtttagactttctttcggacgaaatatattgtcgtttgtgttagttctttctttgtcgcacgtgataatcacgtttcacttacgtatacggattgtttcgggttggtgaaaaagttgtcgtttgtgttagttttcttttttcttcgatttttttttttgctaaagcttttgaatttgtgttagttgattatttttttataggatttaaaaaattattgaatttaaaattaaaataagtaaatgattttttcgatgaacaaaataagatactgttctgtataggatttttttttatagtaatacatggtacaatgtttatttttggataaatgctatgtgtaatacacataagattgaaatttatctaaaaaaataataaaattatttttaggtgttgttaaaaaagaatttatatagacacaattaaatattttaacagaacgataatttaaaataagatgaaaaaaattaaatagaattatttcgtatattattttttaacttgtttttttaaatttacagtttgagttgttccgttagtttctccaataatttttatgtgggttgttatacatattttagttgcgatttaagttagttgctataggagtttttctattaaattctgtaaaaatacaaaaaaaaatataaaaataaaaaaactccaaaaattaatgacgaattaaatagtgattaaagtagttaagagtaaaaattatatctatttattttatttcaataataacattacatagtctaataacattaattaactaaaaaaaatgtaatattttgtaattacacataattcttataagggaccacgagaattagaaaatgtaattaagattcttcaattatctctaattacatagttcttgtgtaattatatttctcgaagaaagaagaaacatgtagatggtactgtaaatttgttaaaaaattaggaagtagatgattcaaaaatcctcacctggataaataactttgtggaacaatctattggtacccacttagcaaagtatgatacatcaaaagaagtctaggaccatctcgtaagactgtatacacagtctaattttgcaaagcagtttcagttggaaactgaaactagagttattgaacaaaaa

SEQ ID NO: 113098 - DNA, 2616 bp, Cannabis sativa
  modified_base (27)..(46): a, c, t, g, unknown or other
gcacttagtgcggattggatgttgttnnnnnnnnnnnnnnnnnnnnggatcggatgaacacccctacttcttttaggttcatcttattaagctcatttgagatgtggtttcttgcactggtatcaataaaccaaacatcatggtcaagagaaatgaggttgtatatgatgcaacattgttaggaggtttaatctggttactgcctgttccaccaggtgttgacacttctagctacataaattatgtcacttggatgaagatatctataatctttgtgtgacatgatgtaccctataaataaacactttaataaggatctgaaagacaccttgtgagcttgataaggcctaagtagaggaaaataagaacaaccaaaaatctttaaaatcttataatctggtggagttttgtacagtttttcaaatggggagagaaacttgttcataggggtaggcaatctatttatgaggtatgatgcagaaacataaaagcttcccaccaaaattcttgtggcattttagtttgagctagaagagttaggccaacatctacaacatgcccatcctttcattttattctaccctaagttgacgtatatgagaacttgagtttttgagcacaatgtcaaaagttaggaactggtttttgagaggtgaaagcactttccctaagtcagactgtatacatttaattttggttagaaactgtctttcaataagggcattaaactgattgaacagtgaaggtgctttagacttaacattgataggaataatccacacaagcttgctaaaattatttacaaaacttatctaatatttgtatccatcgatggaagtgtaaaaagatggtccccaaatatttgtgtgaactaattcaaaaggagttgtagctttattttcagtagatttaaaattattaaattggtgtattttccctatttgacatgcatcgcaaaagttactgatttacatttgaagtttggactaacacgagcaacaactttagctaaaattgatttggatggatatccaagcctacaatgccaagtagaaacagttttagaattatttagagcatgattactagcagtagtacagttgagagcaaaaggaatgctacttttactttcttggattgatttgattttggactgaggtaaggatgaagaacttggtggctacacttggagtttgtatagggcatcattgagggaaccctttagaagaacttgcctcgttgtcttatctttgattagacaacaaatattactacactctagagtgacatgattacctctattgaatagagaaatgctctatagattttggctaacattaggaatatacaaattttctttgagagcaagaggcttataaggaattttattagacatagacttagaaccaatttgaagaatagtcatagaagtaccattaccaacaactactttggcttcgcctttgtagtccactgtgttctgcaaattctaggagtcagttgttatgtggtgcgtggctccagtataaagaaaccatgctctagagatatcacctgtagttggagtttctccaagatttgcttgtggattttttgtgttggtgtcatagtttgtgttgcctgaggaggaagctccactaaaggtgatgttaaacctatgatagcacttttgagcagtatggccagttcttccacacaattgacacataagtctattgcctcttccaccacgattactagagtagcttcttcctcctctctagtttcctctctgaccacgaccaatgtattttcttttagtgttgttgttcaaagaaagatttgcaagatttgcttaacattggagagagtgtcagtgttgttttgattgatttgaagttcgtaactgtgtaatatggattaaacttcttgcaggctcaacagaaggtcacaagatgttagattgacaatgacgacttcattttcttttcctagacctccatgaatgtacataactagatcatcatcagtgattggttgtccagctctagcaagagcatcctcacaacttttcatctttagaaagtattcttcgatctaggatgaacctttcttggtggcccgaggaagtcctcgaacttgcataactttggttcccaatctttatgaaaagagttgtgcaaaaatattccagatctcgaataatgttcgacaattgatcacatgtccaaccatcagttcaaacacagagttcatcatccagtggattagaaattgatcaaacctcagccattgaagataagtagggttcaggagattaccttcaagtgtttgaggaggtggaagaattgttccaatagcacatagtcgtcgagattgtaagctcttacaattgccagaatgagagatctccataaagtgtagttggatatgtctaatcttagatttagcagacggaggttgttattagggagtcctgcttgtggatcctcttgagcaggttgaactagatgagtagtgttcggaggagtaccattgccttcgacttttcctctactgttagaagaattagcttcatttgacatcattagagctcagataccatgaaaagaatttgaaaagagagagagagagaga

SEQ ID NO: 113099 - DNA, 1575 bp, Cannabis sativa
ccccctgccaatatggctagacaagacatcaaaaaaattctcctccacaagtatgacaattcagaatatgcaacacttatgagaaataatctacaacgaattaaatccgtaagcgaatctctacgaatatgtctagtaaattgaaatattaagaattttattattgataatgtaataattttttaaaaatatacagatttgatattgtagctataacaaatattaaaaaaaaaatccatcatacctatattttcaaacacaaaaaaaattgagaaaaatattaaaataagaggttgacatttgctagaaatatatacccgatctattgggtactcttaataaatttctaaattttgagtcatttttatattaaaaaaaaaagttctaatcgcgaacttggttatagataggaaaacacattgattttgtcaatcgaaccaatttatcttatatttcatctatttgagttaatccatatgagaaatgttagtatttaaatttcacacaatttaatttaataattattttataaaatatcattaactatttataaggcgtcgcctcttaaagtagtggtaagttcttaatataacaattgttgcagaaagaagtgattgtgctatcaaacaaaagtaaagcaagttggtggaagcaactatacacattaacagatcgttcatttgtaaacatgagaagagatgttggatattattggctaaggatgatattctacttgggtgtagctgtatgtactggaattctctactacaatatccacacttcatttttggatatcattgcaagagcaaagtgtcaaggttttgtctatggcttcatgatttgtttatccaatggaggcttaccttcattcatagaagaaaccaaggtaattttcttatatacctatcatttaagaatgatatatatttttttggtaagtctaagtacacttcctataaaagggttttgttccattatactttttatatccattttggtatctagaggaattttaaatcttatttttttttttttatatagttgtgtaggttattgtttagaaaattttgaataattattgaaaataagatttaaatagttatataagaaaaaaaaaattacacgtacaatcaaatatttaaatgggggcatatttttttaagtgacattttctgtttatatttcaaatgttaaacttaatggttatgtagtattaaatataataaaaaataacaattaataacacaaaaaaaaaagcattgaagtgctgtttttagaataaattgcatatattcaaaagaaaaaatggcattacaaagacttaaactcttgcccttgagatatgtctaaatttacacaaccgctacaagaaagagagaccttattgttaataatttgctttaagataaaacatatacaataattaactaaattatttatacaattctttttttatatatattaaaacaaattttactttttgtttttgtgactaattataaattatgattcttatgttgtaactaaaaagtccgtgaataaaagtattagttataaaaattacaatttgttgtg

SEQ ID NO: 113100 - DNA, 6598 bp, Cannabis sativa
ttttattatttaatgattaaaattaatgtatggtttcatgtaataagttttcaaaatgtataagtttttaaaataattttttttgcacattttttgtaattatgttgtttttatagtacatttattaaaaaaacctattttttatgcattttaaatattattctattccattcttatttcaattcccatattcattcttattcttatattttcattcattccaacctgaacaccacctaagaaatttaaaattagataagtttataataatattccaataatatataatacaacgatcctaattaaaaattataatgttatctaacttaaaaattagcttcttttttttttcatatccattaattaattaattgtatctttgaatttgattaataatgttgtggttgatactaattctttggttgttgttgttgttggattggtttcttttgttgagctcagcatacatttcttcaatcattggtttccatagcctaactctggcatttataaaccagtttgatacctgtttaaacaaaaacgacaaccaataaaccccatttacacatcaaaacgacaacaaatacaaaaaacgacaatcaaaattgatagaaaaacatacttacttgattttttgtcaatccactcttcattgctagcacttgcttttctgtatctttaggatatctgtaaaaataatcaaaacccatcaaagatacatatataattactattgttattattattaataatcttaataatactacttatttgagataaaaggtcacactctccatcttcattagttggaaattacaaatatacctttttaatatattattattaaaaagttttgaataagaataatataataattttattaataaatattctctatccatcttttttatcaaacaacttaatatatcttttaaataatttcagatatatattttataatacatagtttagtaattttatttttcttttaatttatttagtttggtaaatttaatattaaacttcatacttttcaccaacatcaatatgtatattttagaaaaattattaatttaccataacattttaactaactagattggttgggaatctgcataaattattgtttaatacttttgtagattctcgaccaataattgtagctcgaaattactcgctcaattaaaatttgttatttaaacataatttaatcaagtttaataacaataaaaaaaaaatatttgcaattctattaacatttataattgttacacatattatactattcaaaaaaataccgagaatatattttatcttataattttattacagttatactcttttgtaattgttcagtgacaattaaatccgttaagtaacaactcaaaaacacgtaaagatatatttatttagtatatttaattacataatctaataatatatcgttacatgtttttgagttgacacttaatgactaaaaaatatatatctgcaataaaattataaaataaagtttaagtagataatatatataacaaattataaatgttaaagaaatttagccgcaaatattcctaatgaaaaaacaaaaattaagaaagggtttatgtttcttacggatgaaggaagttctgaaacatccaagctttaagaacagacacagatctctctggtaaacctctttgaggtctccatagaagttccttcttcttcttcacttcttcaactccccattcattctccgtaacacaacacttgttcttctccatatccatttccatggctacccaatgcttgcttatcctttctcttaatcctttgtacagtacagacattgtttgcagagcaaaacgagcgtgtatttgggggtctaactctgttgctgcgtggaaagctgataccactgtgtgaatctcatccatacattggttataacgctcatcaacctggtaagttcagaatgaactctatgtatttgttaaaatgattatgagagagatacttgttagcttaacaatttacattgctttttgtaaatttaatgagatttattttgtaaaaattcattctatagagacaaagaactacttaccatttggagacctttaagtgtttgttaaaatgactatgggagatatacttgttagctaaactatatggattttcaacaatttctagaaaatcccatctcaaaaaaagattgctttttgtaaattcaatgaggttactttataaaaactctttctttagtgtcaaaaaactacttaccatttggagagctctaagtgtttttgttaaaatgactttgagagagatactggttagtaaaacaatctatatggcttttcaacaaaatctagaaaattccatcccaaataatattgctttttgtaaactcaatgactttattttgtaaaagttcattctttagagtacaaaaactacttgccatttggagaccattaagtgttttaaaatgactattagagaaatacttgttagcttaacaatctattatatggattttcaacgatttcttgaaaatcccatctcaaaaaatattgctttttgtaaattcaatgagtttattttgtaagaaattcattatttagagtcaaaaaactacttaccatttggagtaaagacagcaactttgctctctttgtttcggttactcttctgcgagtttcggattcagtttctccttcaagtatgctgccaccatcagatgttgaatccattggtgacattgttgagaatgagcaagagttcatcaagtaattaccactcaaataatgatgatcataactgatgttttcgagcgaaaagcttgcaatgtgagcaagtatttcttgagctgcagacagatatcttgatcctaatatcacttgtgagagttgcagtggtctgtaagagccgaaactcggcgaaagattttcacctctgttgttactacaagaagcttgttcagaaaccagcattgtttcggtagtgtttccagtaggcatagcagatgcagagcattggcctggaattgtagtagtcatccctgtgatgacagagggctgagatgtggccagagatagagagagttcattactgaattctgaagaaccaatgtgattattatttctattactattccatacattttgatcaaatgtttgatgaaatgctgaagtctgatcattataagtaacataaccattgttgttgttgttgtagttttcagtagaaacaaaaccagacaagacaccatttgaggaatacatttgatgaggaaccgaaatggctaagttgttgagattttcttgaaggccatgattatggccagtgctattattacatatggcacttgaactattgccaaccccaccaagtgaggaggcctcatctgagtcatctcttgtgtaatactgaagatcatatagataagactgaagatcaaaggaggaggagtttatggctgaagaatgaggtgaaatcccatctgtgagcagagagtttcggcttgtcatgatcatttgctgtggtatattaaaggtttgattattattactctccatatcagaaaggaaaaaaaaaactcagccttgaaacactgtcattgaatcaaacccttcactcaaaacaaacaaagttgttcacttttgacatgaatacacctgaaaaagaagttgaaatggtcagaatcatcatgaactaagtgttttcaggtaaaaccaaagaagaagaggaagaatgataggctcactcacctttgtgtttatagaagaatcaaactgagctgacccccacaaaggcaaaaaatgatgatggagatggagagagttgggaatgttcaatgaagggaagattcatgggattgtcccaaatcagacccttggaaaatttccaatctttcaaaagataaagtgttctgttttttgagatactacagattgacaacacagtcatataataatagatataatgtattttgctttcttttgggtaccaaaaataggtaaaataagcagcacaaagttcagacttcagaaggttatgctttgatttatctttgtacgcaaaagaaataaataaataaataagtgatctttttcaaaaaattcaaaaaataaaaattcttacttttaacccccctcatgcattattattccccaccttactcaaactcataacacccaatccaacccaactcagaaaatcatgtaataatactaaaaaccatacaagtaaacttattactaatagagattatgaagaagaagatgatgatgaaataaatggggttttaaaagaaaggaaaattgaaaaagagaaagtgaagtgtgttgcagaggctgaggcagtggcagtggcagcactcatttgtgttgcaggctttaaataggggcccatgcctttgtccttgttctatattttatctgttttttcactgcaataaaatcatcataaataaatatatatctgggatttttatgccaggtctcttcaccatcattttaccagacaaattatgttatatttatatatatatattgtagaaaaaaattaaaataaaaaaaagtacaaagacaagaagagagaacaaattaataaaagagtaaaatcttgcgaatctaaaagccatttaaagagctttaaaagctgattcaatagaacaagagagagtactgttgtgaacagtatttattgtactactacttctactactactactactaactctgtactcttctgtgctcacttctcatatagaaaaataaataattaaaatgaaaaagaaaaaggggttttgttttgttttgatgatcaagttgtgaagatgatgatgcaagcacctactaaatactttctcactcatacctaatgtctacaagttaaaacaaataaataaaagtaaagtaaatcctatggacaaaagaaatcttatttagattatcatccaacttttttaaaaccaaaaaaaaaatctaaaataatttatagtgttacaatatgtttattttgaaaatttacattattatgtaaagttttaaaatattgtcgttttagttctcttgagagttgagacgacgtgctcggaagatgaattaggtgtcattttagtctgctcgagagttaagtttattgtcgttttagccctcttgagatgacatgcttggaaaatgagttagtcgtcatttttatccactcgagaggtaagttcattgtcgttttagccatctcgagacaacaagcctgggaggtaagttcactgtcgttttagttttcttgggacgacaaactcgaaaagcaaccttaaggttggccttcgatatacttgttaggcttcgaataaatttttcaaaggctttaacttttgaagaaaatttcctactagatgtcgtgcagcgagacctacgggaacacaagcacatcactaactaatggttgtagagattgtgttgttgggtgtacattcgctataagactatgcctaagacaatacaaaattatgggacccttaatattatataaacctcgttttacatttaatattaaataaaattaatttaatacaatggtaaaagttttaaacctccaccattagattagggttcaattcttgttgtcgaaactttttattttatattaaacaataaaaattgatatagaaagttaagtataaatgtctattatttatttattacgttatatttgaaataaaagaatctttttcggggcctagtaggacgagggtcctagacatgaacttattctgcctcttttacacaccttttatgtaaaggataagcgaccattctcctccaattctaacaaccgcgagaagctatacaacgtacactctcgtggaccacacaactaaacttacatccaatttattgtaagctctcaattagtgtgaatggattagactaattaatgtgttttaaggtttaattcattagataaatagaattgaggatctgatttttggtgtttgctaaaatggtgtaaaaatttatgcttaattaatagagtggtcaaactgaaaagatataacaaataaattagaagaggccgcaattaaaagttacaatgtagcatagctagctttttattttttataattattattgttattattactactttgaatattagattgaatctccaaatccaatcatcattattattttacaatatccactttcattattcttattttcattaacattattattacttattgttttatcattactattttttttattattatttgatatctaaaatcttcaattaattaacctctttcttgtcccccaattcggcaggacacgtgttaccatcgtagaggtggcacttgcgtgacgtggccaataacagacttaaaatttttattatgtgagggtgtaattatcataaaaaaaaaaacatttaagtctatgtaatttatttaattttgtagaagttattttacttattttagtataattatcaaagggaaatttcaatttttgaccctaataaaataccccatttcaaaatatataccctccactaatttatacaaattaattccactattactcatttgtacccaaaatac

SEQ ID NO: 113101 - DNA, 1710 bp, Cannabis sativa
  modified_base (1191)..(1196): a, c, t, g, unknown or other
ttgttgtttttatgtttttgtaaaataatccctttaagatttatagagatagtgcttaattttaaaaggatttttttatcactcttaattcttatacaaatatatatggttattaaagatttttgacccgaactatgacatatatattaatatatattgtgccttttgaacttttcaacttattacaaatagttcataaactattcatagtattgtaaatgagtttttttgcgaaattttgtcacacgtagcaaacaaaatgatgacatgattacttagtcaattgtcacatcagcgacacatgtataatttattattgaaaaaataaaaattatgtagttttaaaaaattattaaactaaaaatcaattagaagaaaattacgtaaaactaaattaaaaaatattaaattatttacatgacatggcactaacgtaacaattggttaagcaattatgttattattttgtttgtcacgtgtgacaaaatttaataaaatgaccaatttataatactgtgaatagttcatgaaccatttataatggattgaaaaatcaaagacataataatacacatcataattttatgaaaaaatatttaaatagtctatatatatatattatcttgtctgttgataattataattgtttatcacgaaaatctgaataatataaaattatttgtattataaattcaaaatgtcgctacaaaatattctaatacaataaagtctaaattcaacatactaaatagtccaacttaacacaattaaaatttgagaaattaatgttaatggataccttcaataccttcaagtactaaaaaaaaaagaagcaaatgcatataatttataatcggatctaatatatttaattgttatagggtattagtggtgccattactttctataagtagcgtcttacgattaactatcgatatttcttaaaaaatatttcttaaattatatgagttctcgtacttaattataccaatattaatataacaccgacgaatatgctagttaccaataatgttttttagtaattcttttaaataaataatataagaaactgttaattaattacaacataccacttcagtattgggtaccttaaaattaaggcgactaaaagcatctccaatagtagtatttttaaggatgttaaaaatttacacatcatctaaaaatatnnnnnnttattttatctctcttccacattattttttgacacttttacttctaaaaatactccaatgtataacactatttaaaaattctataattatgatctcacactttattatttaatgtgtaccgtaatttttagctacaataatttttttagctacaataatttttaagcttcaattttttattaaaaaaaataatagcatcaatactacaacatagcatccatgcaaatttttagaatgacatccttttttctttaatgatatagtatttcaatattttactacataatatgtccaccttaccaagtatcctctaaagttttaccattagagatgctctaaggtgatgtttagttcattgtaatggtaatggtaatggtaatgaataggttcattacattgattacatatcaaaaccaatgtaatccccattacaattacactccattacaaagaaaaaaaaataatatgttaataaaaatatagtaaaaaaagtcaaagtctatattaccctttt

SEQ ID NO: 113102 - DNA, 2291 bp, Cannabis sativa
cagaaataataggtaaatctaatagaaagcaataaattctggttcatgacctcaacaaatggacaccataaatgagaaggaacagataagaagatgaatgctaaaagcctagcaagctttacaaggatgcgtggccccataaaatccataccttattgtttttataatttttattttggtgtgtaggctggtaatatccaattcaattaaattgaactgatataatttaatttaatctaattacaaaaaaattgtatatctaattataattaaattggatgcattggattggaagataaaagttgaattttaattagattagattaaatgtaaatcttaaaatttaattaaaaatggatcaaatctaattatatttatataaacaaaacaattatttatataataaaaagtaataaaaaataaaaaatgtatattaattatatttttagtggtttttttttgttgaatttgtaatacttggttgttctatgtatttattttcatgatgtgttgttctattttattacttggtagtattgttgttttagttattttaagcttttagttatattacacttataacaataatattttttatgagtattaaacctaaataaagagtgatatttagttgttatgtatctttcttcatatttttatattaatattaaaaattaagtgtgtaattggatatccaatcgaaaaactaatccaatttaattggtaattagattagattttaaggtataattggattagatcggatgataatttttcaaatccaattactaattgaattggatcggatgagtagattaaagttagattggattggatgtccagctctaatgtaggcaaaaagttttatgagataaatgtgtacatgctcatatccagggcaaccacatagaggcgaggaggacactcaccccttgaaaaaattatagaaaaaattgtatatgtaataagttagttaccataaatatttgtaattaaatgttgtaattattaacaaagcatcaacaatgttttcttgaatggtgggttgcaagaaaaactctatatatatgatgcatccaccaggatctgatattgacactcctatttctatggtgtgcaagttacaaaaagctatatatggcttaaagtaggctcctcgagcatagtttgaaaggctccaaacttctctcttgtctcatggctttgcttcatcaaagtatgatcactcattgttcattaatcacataagtaactcaatcactctcgtattggtatatgctgatgataatcaccagtagtgattaagagttcattggccaactttttgtaagtttgaactatgaatattctttaaaaaatcttaaagagcttaactactttcttagcattgaggtcaaatacacaatatatggcattcatttaaaacaaagatgcaaagattcaagtctagctcaactccaatgacttgtggcctcaaactttctgcttatggaagtgcccatgtagaagatgtttaactgtatagattagttgtaggagcactgcaataacttgttatcaccagtctagaatcttttacaatgtgaataaggtgtaccaatttacgcataatcctcttcaaaatcataagatatctcagtggaacaataaactttaggcttcacttgaagagacctcagtaactcgagctcatcgcattctatgatgtagattgggttgcagaccctgatgacaggagatcaactccaggctatgccatctaccttggatctaatctagttggttggtcttgtaagatgcaacatacaatttctaggtctatgctcaaatctagtatagagatagagtttcgtaatttagcaaatgttgttgctgaaattacatggcttaaatctctattttgtgagttgcatatctacattccaaggcccccatctatctagtgtgataattcgagcacaattttactcactgtgaatccatttttgcatgaaaggacaaagcacattgagttgcacttgtacgttgttcgagagaaagttattcaacaaatggttgaagtaaaacatgttccttccattgatcaaatatttgctgattgtttcacaaaggccaattcaagtaccaagttagtttttaaagataaactcaaaattgagattttggattagcattagattttggatttgttgtaactgtattgttagtgttagagattttattacaatggaagaaaatcaagatattacaactctattgcaatacaatacaaggaccaacaaagagattaa

SEQ ID NO: 113103 - DNA, 1249 bp, Cannabis sativa
gagagagagagagagagttagtttgagagaaaaagaaaaaaaaattaaagagaaaataacacagattatcaatcaaaagctgtgattcgaaatctgttggaaaaactttgttatacctatttggattagtgaaaaatcaagccctctgaggtagcttgacagaaacatagcccatcattctagagtgaactctaagatcaaactgtggtgttcagatctactcaatttctatatgttcctctcaaatcctcaactctaatctttcacttgtgtttgtgtgtgtgtgcttgagttttggattttgtgtgtttgatttctgtatttgcgtgtgagtgattgatctatgagatcgtgtgcttgaaaccctagttttctctcgaagaagacgaaaaagcttcaagattgtgtctcgagctatttatctcaattagggttttgtatgtcttactatttggccggatcgagttcttttggactcttgcttttaattttaccaatttttcatggatgcatgaaatttctgcaaaattaccactaattgcctattgtctattaattgcgtgtctttgagttagaagctgaagattctaacaatcttaaacattattattattactgaaagtttacttaatagattctaatttcgataatatcccaatagctttaaataagaaatgaatcaattactttacactcgagaagactttatttagggatgttcatccaatccaacctacactattttatttaaagtgtattcaattaacacttagtatatattttatatttttgatctgatctaatcatacaatagttcaaatttaatgcaatctgcaatagtgcggattcaaactattattttagattgattacttttttttaaatattgattaaatgtataaaacaaactattgtctgcaaccataaattaaaacaaacaaaaccaaaattaacaaatggaaaagaagagaaaaaaaatatttttgttttaaattatatttatatatacataaataaaatatacatttgatcatatattaaattacgaaatatatttgtattttgtactatatgaattagctttttatattattatttttaattttaaaatattaattatataatttttttaaaaaatatatataaataaattagaacctgtctaccaactatttaccaactaccttaaccattacaccaaggttactattatgtctataaatatcatcttttaatacaaatatatgtt

SEQ ID NO: 113104 - DNA, 2599 bp, Cannabis sativa
  modified_base (32)..(55): a, c, t, g, unknown or other
tgtgtttattttattgttttagagaattcatnnnnnnnnnnnnnnnnnnnnnnnntgttagtaaatctagatcctggtgaaatattcctaataaataagactaaaagaaataactgtcattcttaaaaaaattataaatagggatagaacttatgataaaagggatggaaaaaatatctaggatcacctgcaataaattgagattgtattacttacattcccttaattctgtaccctgtaacacaaaaaagaaaaaaaaatccaaaaactaataaaaacttatggactatatagatttaattataaaactatgtaaatatcttatgccaagctatttattattatctattaacactaattagtagtaattattaaaaatttattttaagttataaaaatgttattgtaaacgaaagtctgagtgactaataacattgacacgtaggagagtgctatataaacacctctattgccttttgccgtttcctttctctttggggcagttatttttttcacaataaattgttgtcttactataattacatctcccacaccattgatgataaaattacaaaactatgagaaagaagttaatttacatttttatgggcataaaacttatgtcattaaatgtggtaactttagattaaaaaaaaaataaaaatgtaataggaaccccaacaaaatacaataaataaactaacaagatttttaaatataaatattaccaaaaaagttgtcgggttagtcattgtagttgaaaaaattgtcagaattgtcattgtcatcaaaaaaatcgtcaaagttgtccccgacctcaaaaaatcactaaaaaagtcttcagagttgtcaccattgcctaaaaggttgttggaaaatttttcatcagtggagttagatattagagttgttgtcggagttgaatgttggatgtcagaatctgacaaaaagaaattggttttgttacacaaccaaaataaaaactaatactcaaaaactagttacttaaaataataaaattaaaaagtgaaacttaaaaccaacttacataaataaaaaaggtcaattgttaaatacaaaaactaattacttaatacaaaaaaataaaaaacaaaatgagacaaagaaataaaacacataaacaattgaaagataaattgaaacacgaaaactaattaattagaaaacaatcacaacaatcaattgtattattaaaaaaattgacaaacaaaattggttatataaaacaaccaaattaaaaattaactcacaaaatttagttacatgagataactaaataaaaaaaccaattacttaaaataactaaattcaaaaagttacctcaaataactaaataaaaagctaattacttgaaataacaaataaaaaactaattaaaaaacaacacaataaaatacatctaaattactaaaaaaaagtcgttactagtaatatctgaaaaaaaaaaattaaacatatagtataaaaacttaatatatgggaagaaaattccctaaaaatataaaattttaaaaaataccatataaaatttagctaaaaaagagtcatatttttgaaaaatatacatatattgtggaatttaaatttgaaaatcttatgtaaatatatcacaaagtcatttatatattaacgtaacacattttttttaaaaacataatatctcatcacaattatatgtttttgttgatctattaatttgcttcaatttttttcaagatcttaatgttatattatttatgccttaataatgtaatataaattaaataagtgagacttgaaaaattagctccaactatacaaaaaaataactcgttataataaagaatggatagggagttctctaaatgtaggcgactccctatttttttttttgtaaaacttttttaataatattttaatccaaatcactattacttttctattatttttataaagttaatttatatttgataaatcaaaattataaaatattattaaaataatgaaatgctaattatcgtagagaacatagttgaagcaactataataaaaataattatctattttaattttttagctattaatttagctaaacaataaaaaataacattaaagacactcttaataaaaatatagaatggtgtatttagcaaataaacatataatatatttattatgattagggaggaaatagagtaggatggatagagagtttagaaaggatagagagtagaaaggatggagaggatagttgctagctctcctttgtattgtttggtgttaggaacttaggagtagagttggaaagatgtagggtaaaataaaaataaaattattattttattatttttaatataaattataaattatttatttgaagtgtaaaatgatatttaatatggtttctgtctttttcttaaatcctttcatttttcaagagattaaaaattgtgtattaagagagtgcgggtcttcctttatctcttctctccttctctttccttcttgccaaataagggaatacatcatgttagaaattttattataatgaaagaaaatcaagatgcattacaattttattgtaaaataatacaaggac

SEQ ID NO: 113105 - DNA, 1765 bp, Cannabis sativa
atttgaaatatcaatcaattcagtcatttcatatatttacagctgaattttctttggtaaatctttttcttttttacccagaaatctttgctgagataaattttagggtgtggttttccattttgattgatgatgttaaataagggattctgtaatggcaagaaaaaatttgctaattctctgtttggttagggttggttgttgattcttcaattgcttattaacaatgttaaactacaaatttactattaatgatacataaaaacatgattaagtcatagaattttaatctaaaatttgaaaagttattatctgcctaatgagaaagagttgacctttgtcatttttagacttgtggcttcacaagtagtcctcggagcattagcacctctttttaggcatgtccctaattagttagagatattttttaaaagttattaaattaaaagaaataccctatttaattatattaataatgatattagtcataagtattgcttagcttgcatcatctaagaatatgttataataattattaaattaaattatatgaatttcgatatttaattacgataatatttaagcggtgtttttaatatgaataattattacgaggaactactactaagagcattttaaatgatagtattttttaaaaatgttatatatctatacatcattcaaatatataatattatattttatttttttttcacactattttttttactcttacttctaaaaatacggataatactttttaaaaatattataattacgacctcaagacattataatatatataattttttaatatttcgggagggagttgtttggaagttgtaattgttgtatcatagttttaggagaatataaaaactaaaaattgtaggatatcactcattattttgcttttaaacacaattttatttattttgttctctattggaattttgtttggaaatgagagtaacatttttcatagcttaagaaggaagggagcatgtttagctttatcttgaaaatttatttgttattaattattatgtcttcccaattattattattattaaaagttaatacaaaaattaaaatgtttcttagttttaataaatttttaattttaaaataatataaattaattaaatcaattggacatttgtataaatatgtacaatttggcaatcacgttagattctaatagtgatgtgtcattagccacgtagataaaatgacaaactaataaagattgtggaacgacaccttcaaaatacaaatagaatatgagtttggtaggtttttccaccaaaatttaaatttggagggttcaatgcaagtgtaatgaaagtttagagagtttagctgccaattactctaaattttattttaatagaaaatcagttcaagatactattttaaaaaatatatagtctaaattattttgtatcaaaataaatagttcattcaataactttttataaaatataatatttaaaaaataagcttttttattttattttttttgagaaaaagtactgttatattaatcattcaaacaaaatgtaatacaacagacaaaattgaaggtagacaatccttcaatcagaaaaatttctctccaccgatagagtaaattaagccaaaacatgaaagaccttactctaagggaaattggaaacaagattttaataactagactaaatcattgggatgagtatggccttgaacttcatgaatcaatgtcaaaataatctccagattgttc

SEQ ID NO: 113106 - DNA, 1768 bp, Cannabis sativa
ttgaaatcaataacagaaaagataacaacaaatttgcatatttattcaatccccattaaatttatttgtacatttatgttttgaaagactttatctgctccagtagaaaataatatgtataaattaaaataaagtaagaaaaaattctggctcgggtagaccctagaggagagggtgctttcatgagacagcagcctctctcccaattgggatgtactgtatctgtatgataacttggctccatgagatatgaggagtcgaaatatatgcacgtgcaattgtctgctataagcattagtgataaatcatatatagacccagtaaaattgggatatctttcttttgctaaagtagggaattttttttgttatgtgtatattacttttagtgacaaaataaatgtatgcatgaatgtagtgtatactacttatatctataatataaccacagtctagtctacgtatacaacatataaacagcttgttttgtaattattcactaaggttaccacccataagggtgaaagtatgatcaatttttttgcatcacaagaacatcataggtggtccatattctataatgtcagactgttgttccccatttgtagatgggtgtggggataaactagcaacagtttgtcatcccctgcaacccttcacacaaatttctctgttagtgcccaaaagtaaaacaaaaacagctaatgacattttggtgggaaacagtaagtagtgagtgtgtcttcattttattcacaccaccactcatttttttttcaatttaagtaataataataaaaaccccttgggaccaccaaccaactgctcaacctcttgttacttcttcttcttctacataattgaggtttcgaattctaatgaagtggactcacataatcttcatcattaccatatctttgattttatacattttttttttctttctttcttgttttcaatccttttggattctggttttagatttggatcttctctcataagtcataaatgggcatgattaatattctcaaatctctcttccaaaagtaccccacactctatatataatacagaattgcaaaatgttctagttaaaagagaacagagttttcaggttttgttgtttttggttaaaacttactgaaaagttgaagatagccagcttgactgtttggagccaaattgcagaaaggaaaaaaagaaaagaaaggactgtcctttccagggccaattatttccactttcacgttgtttctgatacaaaagctagcacaagccagaaatagtctataaatataccattatactatacatgatatgatatgataagatatgaatatgatggcaaacaaaattatgaaatgcacggaagaccactctctgcgatgcatattcacatcagattgagtggcatattatgctaaagaatataagtggatttgtcattttctgatttcacatattttaattaaataattatataacatattgctaattattcacaagacttaataacaatgctcatgtgtaataacaagtacctttgattgaaccaaactaatattgagctcaagtcctcctaaaccacatacttcgaatagaaaaatggtaaagaatatagtaaaaatctttaactaatagtctactagaatttcttgtgtaaccaatttattatgtcaacattgtcaagtaattagtgggactataatgggcttgagatattgttttccccggccaattgtttcttttttttttttttgattctctgt

SEQ ID NO: 113107 - DNA, 5404 bp, Cannabis sativa
aaaaaaaatctcaaatagttagccttggaaacaaattttgaggcctagaaagtaaggcccacttagcccggcccgaaaagaatattcaaattttcaatcgttggacttctctctctcatactctgttccattctacgtttcccggttctttcgccaacgaagtcttcctctattatagaaacttctccctccattgctatctactctaactccgattcacgtaccagctcatctcactcttctcgcttctaccaactcttcgttcccagctctcatggagaacctgatctcgttggtgaacaagatacagagggcgtgcaccgcccttggcgatcacggcgaagaaagcgcattgcccactctctgggacgcattgccgtcaattgctgtcgttgggggccaggttcgatatcgattttattttccgtttttcctttctttcgatctcatgatcatattgatgtctatttttcgttcgtgatttttggacacggtttatcttgatttcttccatcttttcattcgaatttttatttccttgatacaatctctgtctttgtagagctctggaaaatcttcggttttggagagtgttgtggggaaggactttctgcctcgtggatcaggtaagactacttaaactgaaaaagaagaagaagaagaatcttcataatcctgtatatatacggcattggtgtttattttggataatcatgaatcgtaacatgcagggattgttactcggcgtcctcttgtcctgcagcttcacaggattgatgatggaagagaatatgcagagtttatgcatctccccaggaaaaaattcaccgattttggtatcattatttagaaatgatcaaaactgtattaaaaaatttctagtaattgctctctatccatctttacatattgcccacgttttttcgtttataaaatataatgcaaaagcgactttctagaaaaacaatttagtcattaaagattttgtaaggaaaagctattgcaatataactctcttgagtcttgatccacggtttgcttaaaagttagttagtgtgagcgaccaaaattttaaaattgttacttagtttgagatatacattatagtggtggcttgtagagttttcttaattgattgagttgatgagtgtgaaagtagtatggagtattgattgattattattttcgagacaatgttttacccttggatcatttagtgtttatattcaaaaagaagaaatgcatatatatctttagacaatgtttggattctctaatttattgatattgtattgtgtttagctgctgtcagaaaggagatcggtgatgagactgatcgtgagacaggccgcagtaccaaacaaatttctagtgttccaatccatctcagtatctattctcccaatggtatctatacatacatgctgtctggcaatcatgcactttgtttcacttacttgacacaccttatatgctacaaattccattcatcatctaggtaactcagagcagaaatggtatatacgtcataagttttttattttgacaaaaaaagggaccataagtttgttactttagaaattgttctttttgagtaaataatattgtgaattatcttgtctgtaaactattgtaaatgtttgcttgtttgaccctgacagttgtgaacttgactctgattgatcttcctggacttacaaaagtagctgttggtgagttatgtaccgaaagttctgcttggtagttagtacactactttcaagactggctcattgacatttggtattttgtggtcttttagagggtcagccagagagcattgtgcaggacattgagaatatggttcgatctttcattgaaaaggtagctatttgctgaatttcacatttaacctaaattagtaaattttgacacttgtgtatggtttaatcaaggatgtcaagatttatgtgttcttcattaagaaaatcatatattgcaacattgcttatatgactggactttttgcagccaaattgtattattctagcaatttctcctgccaaccaggatcttgccacttctgatgcaattaagatctctcgtgaagtagatcctaaaggtaagatgtacaaagtttcttattatttttggatgctatgacaattttaattgatatcataagctgttttattgagtcactaaagtgtttttccttctacaaatattgatttagtttctttatcatcaattactcaggagagaggacatttggagttttgacaaaaattgatcttatggacaagggtactaatgcagctgatgtaagttctagctccaaattcataggaaaactgaaaaaaagaaaaaggaaaaaggaatcttgaaaggaaaatttaaatcaggaaagaacagcttagacttgacagtaattgagtaaataggccaacacttttttctccatgttatgaattactaacattttaattatcaatacctgaacaaatatagtgaacgcatttttgacttgttgatgatgcataactttattggtactcgtttaaattatcaaatcattcaaattcattttaatccctaaacaagccatctaatgtagtctgtctctctttcactcagatcttggagggaaaatcttataagcttcagtttccttggattggtgttgtcaatcgttcccaagctgatattaacaaaagtgttgatatgattgctgcccgacgtagggagcgcgagtacttttcgaataccacagagtacaggcatcttgctcatcgtatgggttctgagcatttaggaaagatgctttccaaggtatatatgaatgcaaagttatattattgttccctctatttgtttaaacattccaggtatcattgaaatcatgctcaatgttctctctgtgcattgattggttcttaacatttgattggtaatcaaattttcagcatttggaaactgtgatcaagtccagaattccgagccttcagtctcttattagcaagactattacggagctggagggagaattgagccgacttggaaggcccattgctactgatgctggtgtaagaattgcacccactgccttcctctaattttcattttcttccctttcctttagtggttttttcactttctatattattattattattattatttattttttagataaatttcaatcacaaacctagcacttatatcaaaaccttgtaatataaacaaaaccacacacagccacagctttcagctttttttttttttttttgttgataaatttgaatcacacataatccaattaccaaaacttatcatgggttcgttaacccttggtagctataacctttgagtgttcacatgcttcgtatttttgaaattgcagggaaagctttacatgattatggaaatctgtcgtacttttgatcagatatttaaagaacatcttgatggcgtgtacgttttctcttgctattaaaatcactttgattttagggtcaacctttacattcatgattataataaatataatgaccacaggcgacctgggggcgataaaatctacggtgtttttgataatcagtttccagctgctttgaaaaggctgcaattcgataaacacctttcaatggacaatgttcgcaagattattactgaagcagatggatatcaaccacatttaattgctcctgaacaaggataccgacgactcgttgaatcctctttaatatgcatcaggggtcccgctgaggcagctgttgatgcggtatatattcataaacagtagatttgttgtggcaattcaaaccatgaaaaactatctcttaagtcttaactaaccaccttcatactaataaataatgtccttgttttttagcaatatacattattactttataaagtagatttgttgtgttgtgcgtattgctttgattgcatgtgctgctttgttgtgtttgtctgatttcatgtatatcttgttggtttaggtacacgggatacttaaggatctggttcacaagtctctcggtgagaccatggcaagtctctcactcaacttcatgcttgcatttattatttaataatttcttatatttatatcctgtgtaatttatggtcatcaaaactttggttgacttcagtgagcttagttggacaaattaatgtctcgtctcgtgagaaaggactagctggaaacctgaaaaaacactaacattatggaaaactttccaataattattttgatgtggacttaatgggacaattcttacccaaagtaggctaactgatttaactaattgagtcttattatatagtttattgggttgcatttataggaactaaagcaatatcccacattaagagttgaagttggaaatgcagcaattgaatcacttgacagattgagagaagaaagcaagaaagcaacccttttgttggtcgatatggagtgtggttacctaactgttgaattctttcgtaaacttcctcaagatgttgaaaagggtggaaatcccacacactcaattttcgatagatacaacgatgcatatctccgacgggttggtaagttgctatatatttaattacttctatatggaaacaaacgtgaaccaaagacatttttattataacggtatattgtaacactttagttattttattctaattatttgaaacaggaagtgtagtattatcctacgtcaacatggtttgtggaagcttaaggaattccataccaaagtccgttgtctattgccaagtacgggaggccaaacgtagtttacttgattattttttcgccgagttgggtaaaaaggaggtgaaaatttatgcaccttggattatttttcagagaaaagaaaataaatatactaaagaaaattcaataaaaccattcataatattataattaatatttcttggtttgcagacaagacagttggcttcattactggatgaggatccagcagtaatgcaacggcgtacctccctagcaaagaggctggagttatacagaagtgctcaagcagagattgatgcagttgcttggtccaagtgatcatgaataataagaaacgacatccattttttctcattttaaattatttgcctataatatatatgatatagcattatttcattcttttattcatggtttacagctctttttttgacattaattatgagagaagatgggtaggttagtttgttacagcttcgttaaattctttgctgttatttgttttcattaactattgtcacactccaaaatatctgaaaacttccatatttacacagtaacaataatagaagagacaatgtgaacagagttgagtgttcatgtgattatgatgtagtgttaacatgatatttacaacacttagaggcgtttggttgggaggaa

SEQ ID NO: 113108 - DNA, 13489 bp, Cannabis sativa
tttattccattccattcctattcttattcccattcccattcccattcctatattttcattcctcccaaccaaacgcctcctagttaattaaaattatttttattatgtttaattgtatttttatacaattaattaaattattatttataatatataaaatttgaattataagaattaaatattacttcttttagaaaaaatatctaatatagtggctctttttgtgggtcactatatatatatatctccaaaactaatattaaagaataaaaaaaaaaagaaaaaaaaaggatatactgactattatgtgtgttgttgttacattttattagtctgacaaaatctaaatctaaacacttatgacgtgcagagagtgagtgtagtgatacgtataaagtgttactgaaaattatattttaagtcaccctcattaataacacgcggtaacatgtcactaaatacttttagagttacttaacgtgaatcactaaaactcatttttgtaacggcttgatttaggattaaataaagttgtgaaatgagtagaatgaagcacacaagtctttaatctcttttttaagacaaagtactaagatagaatggatgaaagatggagatgacagtacgaaattattccatcaaagcttgaagaggggagcaaagaattctgtttattccatatgaatggaatttggatatagatgatgtgaataaattaagttcctgaggcttttcttagctactataaaagcttgttaggaagtatagcctaatcgataatggtgagacaaggatccagtattgtttctactattcaggctaagttcctaatgagaccatatatattgggagattgaggttaatgaagccttatttgctattccagattgtttctactctcttttgctggccgcattaattataatgagtattcatacatacattaatactgaggtaaacacacaacacaatcatctctttttctcatcttctctaacaaaacaattacaacatgggttctaagtctttggatgggtattggagtggctgcaatgaaaatattgatttgtacagagatctatggaaagcttattaattatttaccaaaaacaaaaaaaaaagttattgacaaaagagagagtaacgctgaaaagaaaaatgatgaaactcaaaactattaaataaaagtggtacttttaaaaaataaagtttaacttgtccaaaacctaaccccaaaagtacaacagccagcctatattagactaaacttactgtccaaaacagtggaaattgtaccgtatactattttttttgttaatctattttttttttttctatatatttaatttatacgttatatctcgattatacatttatgttaaaccctaaacatttaacatgtattttcaactaaatataatatgacacatacaatatacacaacaacagcaataaatgaatttatctacttacatgcatatatttatatatataataataatacactaacacacaataatctttttgtttctttttttttttttattagattaaactatttagaaagaaggaatagagaaattaagaactgatcacctaccaaatcacaacttcaggtggaacaatagcagtagtgaaggccaacgatgttataaggataatttggaaaatgtcatgataaaagtggtataatttattaacaaaatagattaagcaagtatttttagttaacaaaacataaaaacaggtagttaccaatttatccctccaaaataagtataattagcccattataatgggcgatttacatgagtagaaaatagattccaaatatttggcccaattggaaagctcaattacataacatgaaaataacatttaaataacaacaaaaaataacatacatataacaaaaaaaatcaataataaattaacaagagtacaacataaaaaagaccgtattttttacaaataaaatcaaaaaaatataaaaatatttaaaattctgtaaagacgtattttttataattttttaattatttttgtatatttgtgaaataatctctaataaattaaaacttacaccctataattatatgggtcatacacgataattatgaccttttttttttttttgaaatgataactatgacttattatcgcataaaataaacgaaattggcattttcttaaatagggttatgttatttcggacttataattaataattagacacctaaatgatgcatttatgaattaattatcaagtcattttcgaggtggcttccttgttataaaggagttgtaaacaatgtcaaaggtgtcataaatatggtaatgagttgctaaattaatcaaaattaaacatgtttgatcattctataaagtcaatcaagtttcaaaattatttttgatagacacgagcacgaaaaatagaatatccacttatttcattatatattattcgtacactgtctttgaatttttattattgtcactcttatacgaaaaatgttaaaagatactagtggttactacaaaaatttttacttttatttataataaaatttgtgattaaaaataaaaataacgttgtgattaattataaattatcatttttatatattgtgattaaaaggtccatgattaaaagtactagtcacaaaaattataatttactgtgaccaaatatatttttagtcacaaatacttgttgtgactaaaactaattagtaacaaacaacttgtatctaaatattacattttagttacaaataatttttcattgtgagtaaaaatcacatttagtctaaaaaaaaaattatgttgtgactaaaagtagttttatttgtagtggacgtgcctacctagcacctttcaacttgtcatatttttattgatacaattaaatatcattaggtctcatataataatttaatataataatttttataaaatatcacaaccaatcacaaagcactacctttgaatgttgttaggcgtactactaatactttatagcaatgctcgtcttataatcctaatatgcttaaaggtaaaaatgtggccctaatttattgacctattcaaggatggtcttgaaatttggcggaccttataaaaattattaaaactcttattttaaaaaaaaatgtagcattttgaaaatttattaaaaaaaaacatgtatatttttaaagagaaaattatttttttgagctctagactgagtgagctctacgctcagacctagtctgtcttagcctaagcccagtcctaaacctatgcatgatgatgctagcaaagattggcccccttacgaaatcaaaatttgcgtatattcatatatagtttttctaaatatagagtaataataagttatgagtttaattatatgttgccctagagacaagagttaattggtaattaattattaattaatatgataaagagtacacgttaattacctaccattctcaactacaattctcactacacatatattattcttattaagccaaagagattatttttaattgtgacataaaataaatgaaattggttcttttcttatatttgttttaagttattttcggactaagacacctaactcatttataaattaaattaataatcaagtcattttccagttgacttccttaccccaaaatgaaatgacaacaatctatttaaaatttatattattaaatattatatttaaattacattaaattagttaaattacaagtatcgccttataaactagttgtaaacaatattaaatgtgtcataaataggttagtgagctgctaaattaacccaaattaaacatgtaaagtcattttataaactactcttacacaaatcaaattggaaatataaacacatatgcttacgctttagggttaattaattaatactactataaattgtacgtgttagttttaaactgacacttacacttttagtgttggttcataaaattgacacttattttacagtaacaaaaagtatattctttggtgccagttgtgaattgagacttttggacattgatgttagttttaaactgtcactaacgggtgtgcaattcatttttacactatatatctcgatttataactgtaaattttgactcgtttttaaaaactttgaaataataaaattttgtagatattatattattaaatataatatcattatataatattatattgaatacatttcaaataatagacccgaaacaaatattatcattatatagtaatagattcagaataaaaaattcatagcaaaaattattattatacaaaaactttatacaaaaaataatatgccaagaacaaaaaaaaaataataaaactcagatctggtctgaactccattcctggtcgttaatagaaaaagggttgatatcctgtttccacgagctgatctcaaacacgaatccaaaacactggctagaaccgagcattgtcaaacatagaacccagtcgagatactccgcgagctttaagaccattcatctgcacacacatacacacacagagaacaaatgtgaccttggtgttatggattccaccaccactcgcgcgctagagaagagctaggtactgatgagagaaagaaagggagaggtgagtcgaaatccatcgttacctagttgcccaactactgagacaccactatatctccggctttgctttcccaaacagtggcaacaatggaaggagagaaagagagatcgggatgggttgttgattccctctagcgctgcactaaagcaagagagaaagagagagagaggtcggggtagagagagaaagagatggagttagggtttaaatttttttagggttcatcatgttcattttatacccaattattatttatctatttattaacgaaaattagttatatttatttatttaagtaacttttttatctttttggtgtcggttctaaactaagatttaaaggttttttaaccttttaagtgttggattagaaacgacaccaaagaatttttttttcctaaagattgcattacctttagtgttgatttttttttagtgctgaatttttaaccgacacaattgagtactctttagcgtcgattataaacttatataattaattgagaaacaacactaaaagtgatattttaattttcaggacaaatataattaattaatacataatcggaattatttacaatacatggattttgatacggtactaacacaattcaacctatgaaacaaaaattttcaatctttttccatcaattaattatgatttgtataatatttcgcagcctttgaattttcaaccctaatttattgacctatccatgatgatcatcctatatatatcttttaattaatattacacgaatcaaactattcacgtattcattgtttatcttctaaaaatagagttaatataagttaggcatctctttctttcacgtccttttttcagtttaattattttatgtcaccctagacaagactagtacttaattggtaaattatatatattaattaatatatataataaagactgtaatgccagttgataaagaataagtcacaaagatatttatatatgatgttaactagggttttcgcctagctatataactagccatgcatatataccacacgtttgattattgatcaccaaattattaaaattgacttaattaccaactattctcacaagtctcacctacaattctccctacgtacacgtacatatatataaatatttatatatatatttatatcttcttaagccaaatagattatttttaattacttttggtagtactcatagtggaataaagataagatttttatattgtatatatacaatgattttgtgaatctctctaatatgaatatgaacaaaggtttataattaattaattaataattattatcatcaaaacgcaccatgcacggttgtcacatttttagtcaaacataattaattaagaagtagaaaataattaaacttattcgatgaatgtttccaatattgaaaagtattcgtttttccattttaactaaatttcatggtccccaaatgagaaaaaggcataaataaggttagaaaattttgcatatgcatgtatttgaatctcctataaatataaccctagctagttctctcatcgcaataaaattataagctatagtttttatctagagccaaatattatcactcgaaaccttttaaccctagctaagatatattattttattttatttttacttgaaacctcatctttacgaaaagaatacttctccaatctattgttaactaatataaatatatatatatataatatatatcataagagatatatataatttgtaattagatatggaaggaaagtataggaatattattaataatccaacaagtttgcaaactagtcctcgtttgcagcctccaacttatggaaatctaataacagttttgagcattgatgggggtggaattagaggtcttatcccaggaactatccttgctttcttagaggaacaattacaggttcgaatatatatatataaacatatatgaatatatatatatatatataaaactagacattttagtaataataacaatataagaatgatgatttataatatgtttagttataactttttcacttttagtcacaaattttcattataaaattttttacttttagtcacaacaaaatttgtgaaattaaaagtgaaaaagttatcactaattataaatcaccattcttatgttgtgacaaaaacggttcgtgactaaaaatattagtcacaaaaatcacaaaaatattagcttttgtggactctatggctaaaagtgctcgttgttctgagaacgacactccttgttgtaaaggggagggattttctcctgtggatcccattttctcagtctctaatctaagatgaatactttgtcttttttttttaaatgtgttttcacatacttattgtgactaaaactaaactagtaacgacttgtatctaaatactatgttttagtcatatgttataactgaaggtaatttttttgtaataatttattgtgattaaaagtaagatttttttatagtgtcgaaaactctgtctcttgtaatgatatttggtatctgtgcagaaatacgaacacaatcatatttcttaaataattgagattttttttagagattaatttgttttaattttcagaaacttgatggtgaagaagcaagactagctgattattttgatgtgattagtggaacaagcacaggaggtcttgttactgccatgttaactgcccctaaccataataaccgtcctgtctttgctgctaaagatgttaaagatttctatctcacacattgccctaaaatcttcccacaaaataggttaattataatatacttgaatctttattattataacatatataattattacacatgtttttttttaaaaaaaaaaattaattaattcttatagcatgatataccagttgtccagtgtttcctcaccttacaaagattgttaaagcattatctggacccaaatatgatggtaaatatcttcataaacttgtgaaagaaaagcttggtgaaacaaaattacatgagactttgaccaatgttgtcataccaacatttgacattgaacaactccaaccaactatattttctacctatgaggtaattaattttattggaaaaatacactacacctggtatattatattttcatataatttttatctgtttcggtattaaaaaaaattaatttaataattttttgtaatagtgtatattatgtcagtcacatgtaaatttttcgaaaaattataaataaattacaatttaaaaaaaaattcaaatattttgttacacaattcgttttttttcttatagacaaggtaagtaactgcttgagtcttatttcagcactttaactatttggatttttttaaaaaaaaaattataagtaatcttaaataactataacgtacacaaaattaaaaaatgctccggatgcacgaaacatatcagaactatcattttttgaggtatatatattggagagatacccaattttatatatatacgtaataataataataataatatgtacacctaaaatataatttgcaggtgaagaaaaatccatcgtcaaatgttcttctgtcagacatatgcattggaacttcagctgctccaacttatcttcctccacattacttcgaaacgaaagatcccaatggagaagttattagaaaatttaaccttatagatggtggtgttgctgcaaataatccggtatacaaatatttaataaacttttatataataatattccccacacaaattaaattactttaacataaaaacttcattactaaataacactcctctttagtgtaaaccctaaaaaagatgaacttgtaaatccttttccatttatagcatgtcaagaagttataaaccaaaaaaaaattatataacaaaaatattcaatggcaatcctaagttgtattgggttttatgaaaaataattttttttgaccctttttataaaaatagatggtatttttaaaatttattttaaaaaataagtgttctttttaaaagaactttttttttatttaggcccctagactaggtgggtcgtaggcacaggttcagcccgtacctcagcctagggtcaacttaataatattcattgtaatctctatatgttaaaacaaaaataagtacatcttttttaaagggttattacactggaaaaatcactcaaaaatatagtgacattcattaaagatataaaacattattaatatttagttattaactatcgttaagtggtgtatatttatagactctagtggcaattggtgaagtatcgaaggagataatgggagggagtgatgcattttttccaataaatccattggattatgctagatttctggtgatttcattaggaactgggtcaccaaaaattgaaaagaaatatagtgccctagaagctggtaaatggggtttattgaattggttaacgagtggcggttcgaccccaattattgatgtattttctcatgcaagtgctgacatggttgatcttcatctttctgtcgtttttcaagcattgaactcaaacaaacactaccttcgcatccaggtatgtaattcaccacaggtgcctaatagcaatgctcattaagagcattgctattaggcaccagtggtgccgaacaccctcctatgtgttaatatcgttattataggatgatactctaacaggtgacattaataatatttgacgagaattaatgcacattaatatatatttttattataggatgatactctgacgggtgacatgtcatcagtagatatagctacaaaaaataatttggaagatcttgtcaaagttggagacgaattgttgaaaaagcctgtttctagggtaaatttagagactggtcgttgctttgaggtttctgatagtaaccacgagactaatcaagacgctcttatcaggtttaattatataatcacattttttttatgtttattaattaaacttctaataaatatatgtaagatatttgtagtggtggagccaggcaacttttattgaaaaagaattacaaattttatgagaataaaaataaagaatatgtggaaacaaaaacaaaatatatatatataaattttatgagaacaaatataaaaataagtaaagatatagataaaaagaattatttttatgtggtcaaaatgtaattaaatattcaaaaatttatatataataatttaaaaaaaaaaataagaggggcaaatgacagacatgcctcccttctctcttactaggtatatgattggtcatattattaggaaaaaaaaaaaaaagcctcccatttattaaaaattcaacactaatttttacaagattttgaaagaaaggtaaaatatttaaattattttcagtgaaaagaaccttctacatatgtgtgtataaatataaagtatatattagagaaattggcattatcaattaatttttgaaataaaatccatcttacaatattctaacaataagaataatttcatttagttttgtattatgataataattattattagtattgttattatctaaagttgcttaattataattaagatataaatacgtacatgtgcaatataatatatatactaattaataacataactaatttgcagatttgctaaaatactctcagaagaaaaaaaacttcgtgatgcaaggtctcctcatgtaaatcataatacagataataattagtacttaattagcatcgatctacaatgctaattttatcaagaataaatatacaattattgttcaatccatggtatttgtaatttcaataattttaattttattaaaaaaaaaaaagctcaagttcattagcacaattacaaaaaagtaagtgagattcacatggacaattcttccccaaaacatttgtaatttcaataactatttatgtcaaagaaattggatttgaagatacagacatagagagaaaagatgttgctgacgtggaatgcaatgatgagtgaatgaagtaatctcaagaaagattttattgttgtattgattttccaattctgttacataagaatttgtaatattctcttctgtgtacacgtgtctctttttttgtggcctttagccttattcccgttgtaatacctctgctaaataatgaaaaggccctgctcataaattttgagcagatttaatcattaatgtatttactcctttaatttctcttggtatcagagcaacacaagttgttggccatgtcgaccgatgaaagttagactccatcaaccagccgaagaagatcggtcctaaaaatgttagcaatgctctaaagagctcgaatgtgtagtagtgttttgcaggacctgctgcaacatctctaatattggtgactccattcaacaacactttgagtcaacctttttttactcaaactcgacagaaataattttttgctgtggaagacgatgatctcaaaaatcattcgaggtcattaatttgatggatacctcaaaggactaagagcttgtccctcagagtttctcactattgagaaaactacaaaaagaaggaatcaagttcttagaacaggtgatgaatcctaaatatgaatcgtggatagtccatgaccaactcctaataggttggctatatggttcaatgattgaggggattgtctctgaaatcatgggttgcaacacaactgcttaattctagaaaacactgcttatataactcaagtacttgaaaggaaccattcatcatggtctccacattttttcaagtgaatctctcaattttattggtttttttatgccaattgggcttgttttccaaatgatagaaaatcagttcaagaatctgtgtgtacttaggagattcactaattttgtggtccttgaagaaacaaataatagcagcacgctcaagcacacaaatcagagtatcaagccttagctcacattcttggccattaacaaacacttttcaagtttcatcactacgtagccacaataatgcagtacgaaacagagtcatgggtagggtcgaataacggttacatggatattgacccggttgagcacatagagaggttagcctcagacaacgccgtggtcattttcagtatgagcagctgttgcatgtgccacgcaatcaagagactcttctgtggtatgggagtaaaccccactgtacacgagctggaccttcaccccactggatcccacctccactctgcgctactcactcttctcggctcctcctccgcccttcccgtcgttttcatcggcggaaaactagtcggagcaatggacagagtcatggcttctcatatcaatggtactcttgtccctcttctcaaagaggccggagctctttggctttgaacatttcaccaccaccacaccaccataacaaccaccgtcgccgtcgccgtcgttttcttttttttgtttttgcatagaattagaaaaaggttgaagcttgcagaggtagtggagtttgagtgttcttcttcttttgaaaaatctaatctaattaagtaatcagaatcactagttaatatctatatatattatataatcttttttttttcatgttatgatttttctttgtattttgcactaattaatcttttttttgtgtgtaattttctccctcctctgtataccaaagaaaacagaaaatgaaaaagaaaaaaaaaagagttaattaattaaattttctttttttgttttattttatttggtctacttttgaactgttttattttatttttattaactagctagtacattgtctttattagcttgttatagctaggactttttttttagctccaagtttatactgttaataatataattgaatattcagtcttattcattttaatttatatatgtatatatattttttagaagggtcaacatgtggagtagtggacccctgttcttttggtcaaatgagcaatattgtaatatacgaacggtgtcgtttatagacaaacaaatccatatccacagcaattagcatcatagcatattgtgtgtttggccaaaagagttaaaaaagtgcttatacttatacagtgtgtttgactttgaccatatattgtttgacctttgatgacgtttttgatgtataatcaatcaccaaatctagatttgcgccagaaaagtagcttattttattttattttaatttatttaagttctctttagcttaaaaaaagtagcttaactcaaaagctcaatttgggcccaatttttgttactgtggcacccacttgccattttgactgggcctgacctcacttttcgacggtgatggtgggcttgagtccttttcagtgagcggtcatcaaatatccgtactcatagggtcccactccacttctttgatctttctacgtacggccacgtaagacaaacaactagccacttcttctgccacgtaggatttgatatttgtaatttttttaaggtcggtatatgtatgacgtatctttttctttttaaccacaatttgcaatttcattaatgcaaatcagctattaaattaacggtctaattttcagatcgctttataaaatttactaaaatagaaaacatagaaatagactataaacttaacggtgttcgcggtgcgggtggtgcggttttttaccattttttcaaaccaatctgcacatgcggtttttctaatttttcaaaccgcacccgcactgcaatactaaaaaatcacaaaaaccgcaccgtaaaaaataatgcgatgcggtgcagtttttgcagtttgaactatcacaatttttttttttttgaaaaagtcataaaataattaaactatcattaatataattattc

SEQ ID NO: 113109 - DNA, 1645 bp, Cannabis sativa
  modified_base (31)..(36): a, c, t, g, unknown or other
  modified_base (316)..(332): a, c, t, g, unknown or other
ttaaaattctgtgaaaccgtatttttgtaannnnnnttgttgtttttatatttttgtgaaataatcccattctcttgcccaccaacaacaacaacaacagcaacaatagtatgggtttaggctctttgggctttgagccagaaattggttaaacttggacatgaaaacactctactactcaaagttatatttttgccatattattaaaacaaagatttaatgtttggtatttttaagtgggtattacactaatatttgaatttttattcgagtattttgaagagaattttaaacatctttttttttaaaaaaaaannnnnnnnnnnnnnnnnataataataaaaataaataaataagtaaaatatatataagaaaaatcaatgtgtaatttttttttagatttctagataaatgtatatgttaatagtaattttacgtaattaagttataaaagctgaaacataattccttaaaaaaatgccatttaaacttgttaaaattaattatatgttaataaggtcatatttttataattattttttaaattatatggttaaacaaaaatcatttttatatctgatatcagacatatgaccaaatatatattggatatataaatatgtaaatttcatttttgttttaagcatataatttattaatctaattctctcttctctctattcaggatgatgaatgaattaaaacatgactaaatgtaaattaacaagcctataatatatacaaattcatcatttttattaacaatgtatatatgaataaggaaaatgaagtgtgttaaataaaaagcgaataaaaggtgcttggaaattaagtaagcgtcttacagagaaagtcaatcatgactcgaccatcgcataatcggccagttgggcggtggaagaaggtacggccactcggaggtccgaagatgattccaaagccaatggagaatccacctgtgtctgaatttgagtcaccaaagttgaatatcactgccttttttttacacttaccattattaccacacttaaccgatgcaccaaatccaaacaacatcactaccactactattactgtcgtccaaaacttcatcttcatattcatattcataccaattactaactacaaaaatacaatactgtgtataaagttaaaccctcccttttggttattgtatatagtaataaacacttccaataattttacatgtgaaaacagaccctcttgtgttagtttatcaattagtcttatcaaataaaaggcttgattattaatttatagttttcaactctaacatttgtgttcaccaatgctcatggaacgaatatcaagactattaacgttatacaaacaatcatataataaaatagagttagtggtaatgaccaaatgttgctaattaagaagaaaaagacaagttgtccttttaaaattaaaattgcaagttgaagctgcatctaatgctacctagcaagatgctttgtaatctaagttggactgtatgttcctttttttaggccttaattaaaggattcacatcaaatatatgataactgatgagtctagagatggaaattggtcggttaatgtacggggaatgcaatccccgcccccatccccgctacctatttatacccccatcccc

SEQ ID NO: 113110 - DNA, 3794 bp, Cannabis sativa
taataaccacacgatctaaaatcaatgattaaaaaaaataccctaccggtagggaacttttactaggtcctaccataatcttgccccatatatatacatatattcatagagttactacattagggtctctctttgttccttatactatgaggacagttttctcaccaatgataaaagcatacaattttaaattcacattaaacaaaatggattctctgcatacattttttttttaattatttatacatatttgttttacttaccattatatacatttttttttatttgctatggttatcaagaaaagcaaaaaagtagttttagtgtgtccctttcgagaatgaattagttttaaaatttgtgtcaaattattttctcatttttgttaatgattcatatttttgtttatgaaatataacaattaaataaaaatatattattatagagtttagtttagtttaataattattaaagggttgttttgatagattttttatttgttacggcatgtaaaagaatttataatttttttttttcatgatcgtgtacattttatgtatttaggatcatctgtaaatttttaaaaattctaaataatttacaataccgaaataagatttgaatattttgttgcacatgtaacttttttttttcttacacacgtattgtttgaacgttaatttcgacattataaactattcaggattttcggaaaagtttataagtaaccataaataactataaaaattgaactaaaaaacttatatggatttcaaaacaaataagagcttctaccaaaatatccggtactacagaaatttccttaattttgtacatgaaactttttaatatgtattattaatacagttttttttttttttttttatttcaattagaaaagtaaaagtatttttctattataaatatatatttttaattttaattattttaatttatattattagtaattgtttataagattttatattattggaaatataatacatttttttaaaagattgtttcggtaaactttttatttattttgacatagaagagcttttagtccaattttttttcatgttcccgaacgttgtaattatttaggaccacttgtaaatttttaaaaaattctaaatagtttattgtgccgaaaataaagttcaatgagtttcttatcacacgcatatgaaaaaataatcacgagtgcaaaaaaaatatttgaatcttattttcggcactataaattatttagaattttctgaaaagttacaggtaattctaaatagctacaacatacaatcataaaaaaaaaaaaaataagactaataaaaagatcttttgaatagtaaaataaatagagggtctattgaaataactcgggtatattataaatttatcttgtattatatatttgtatcattgtctttgtgatagatattttaattttaaatatatataattataatttcaacattttttatttatgattttcctaaaaaaaataaaaaattgtttgtatattttttttaatattttattatatgtcttaaacaattacaacgaatacaattatgtattttataaaaaataatatattcttaaaaggcgaaaatacaagaaaatatatgagtacacctaggtataccacaaaatcttctcatattatatgagaaatgacattggacaattaataaaacaaataataataaaaaacctattaataattaaaatcaaacgaccacactaacaaacaaaaatataacaaaatcaaattagataaattaattaaaaaaatatcctaaaagggtgtttggtacaaagtattcaaaataatttaattataaaaaatattatgaaggagaatataatcgtagggaaacgtgcaaactgtctttggttgtaaagagtaatatgtaatcatattattgttaattgaataacatttgtttgattgaacagaaaaatcttatctaatatttttaaaaactaatataaaaaatatttttttattatatgtatttgatgttaattatacatagaaatcaaatatttattcgctaaagaaatatatttattgattagtaaatattaaattttattgtatttttataactaaaatgaacattttcatttattttattagtatgtcatttatttgtgttcgttatgctatttatgtacaccattcacataaaatttatgtataacatatattcttgacgtgattttttgtcaactgatctaagaagatcgtaaaataaaagatgaccacggtaaataatctgactgataaaaccgcaataaattaaatggacaccagtgatttatagtagttcacctccatgtcgcgatggtaatggggctacgtctacttgtaattttattaattggatccgacacaccagagttatgttctcaagagtgtgtggataaaagtacagcaaagaatttctagatgaaatcttaatcgagatttatgaatataaggctcatgtaggagacttgatattcatgaatatgatctaaattaaaggttgtaaagttcttgggaacaataaaccaataatttgtgaaaaaagtatatattaaatggtgttttgaggtctggtgtcgcctgagtatggtggactcaatgaagaaggtgatggaaataatatagtgtttttggcagttgtcaagtaaacttcaaggggaaggtcacgatgaggaagatccaaaaaagagagaaagatctccaaaggaagaagctagatagaagaagaagatgaagatcaagctccctttctcagcctttacttgatgtatatataggctagagggtttgttagtgatcccttacatataaggatattttactaacaaatctcgtatacaactcctttttatgaataaaatattacaaataaataaatatcaataacaatctcattgtatctaggcaaatatcccaccaatactggacaattggttattttcggttgatgatgcaccaatttgaaatggagtgctgaacacacgtgctttggactgccgatgcttgcgcacaacgccacataggctgtgacggtgtgctccaccgaatctcacagcgtcgcatttcctaattttcgagtaaaatgcaccaggtttccttgtaagctaattttggactcgataacttcagaattaagtcatgactgcgagacacactttgatccgtttcaaaattatctttacaacgcaagttgaaccaggtcctttgaataaaaattgagagagttatacctattttactaaagtctgtttatgttgtcttataccagttgcaagcactgccattaccaaatggcagaggtcggaaatgcatgttctcaaacccttcggggtgtgttttgacttgttcttttgatggcgagtcatactttggaggtctcatgacccaaaaacctcatttcgacgtccgagaccctaaaaggtgaccactgctatcagttggggatggataatggcacacgtcacccatggcttgtaagaagtcatggggtgatgtctctcacttctatttggtacatggatgttgaaaatataacttgctcaaaatttcctcttcctggtgtggtaatccggcctgtgccatttcactatggcacaagcctccaatttggcgagcactggcgttctctatggcacgggtcttcaaggccagagagcactgtcattgcttgtggcacaggtctccaaggctggagagcgctgccattgcctgtggcacaggtctccaaggccggagagcactgccattgcctgtggca

SEQ ID NO: 113111 - DNA, 1339 bp, Cannabis sativa
gacaaagcacgctaaaaacactcgtgttggtttgtagggtcaatcgtcaatccaagaaacagccaaagtggcatactcgtgtataagagcgataattccatgggtgtaagggcccaataaaggcttaaagcagggacattattctcacatgtcacctaagatcttctccctaggttttgcgtgtctatagagagctctctttatttagcctgtggcttgaaaaatgagaaccattatcatttttttaagtgttgtttttttaagacattggtggatttactatttacttggttggggtataaagcttggcctcttgactatgaaagctggataatggataaggtggataagtaactctcgatcaagtttagtagcctctattgttaatgatttgtttgctgctattgtgtacaacttgtggactaatcaaaatagatgtgtttttgagagcttctcctatacgactttatatgtaatgactgatgttaaacatgttctttagtaatcgaagacaatgacatgttatttttatacccttatttattttttcaatttgtgtattataatgaatatcatattaatatgagagccagtgatatggaaacaaatggtaaataatgtttagaaaaatttgcagtaaaagttttcaaaaagttcactttgttacagattagtccataatctttgaaaataacaacaatagtcctcaaggtcacactttttgtaagtctgttagtcctaaatctaactgctctgttaacttattcaaaagtgccatgggttgaagccttattggtccaaataataattttaattaaaaataaactagaattataaaacaaaactaaatattttaaaatcctaaaatctaatttttttctatttttttctccttcgtcttcttaaacataacatgcatcctcatcaggtctctcattcaccacagtaaccagacgatacatgtcgtgccacagacataacctatttacctctaaacccctattttgaccctaggcactctcctctctcgctcgccctcagtcatctcgtcttcatctcgatgtcaccacctgattccctttctctctcccgctttcactattgacaagaaaaaatccacaataattcctccttgcttgtctttgtcttcgtctctctctttctcgactccacctccctttctcactcgttttatatttttatgtgagaaaaatgtgggtttagttgattttttcttaacttcgtggtgaacgacgaatggagctttggaaaccacgtgtaacatccccgcttcaagcctccattgggcccttacacccacgaactaatggctcttata

SEQ ID NO: 113112 - DNA, 6625 bp, Cannabis sativa
tattttcatagagttatcaagtataaattttgatatgacttgtattattaaggccaaaaagtgaaatttcccaacaaaaataccaaaaaaaaaagaaaagaaggaaaagtagaagcagaacgatgtcgttttgatcggtccggtcccggggctaatattggaggcaaagtagatctgtccttcgacaacacgtgtctcaacatgattggatgctcatacatcattcttttttattttattttattttatttttcaaagcaaaattagagaaacagcatagagcagaggcagaatcaatcaaacaaagctttggaatctgaatttgaaggagagagcgtcttatcaggtttccattttctcctaattgttgttctaggccagtttttgttccattttattcttaatctgcattgtttctttcttcaattacatcaactttagggctcacaaataaatgaaattctgtttttggttgatgttgaaatttcgaaatttcgaggagaatgggctttgatgtcttttgtgttgttcttgtggtgttaaattgcttgaatcatcacgagtcactaactaatttcaatatcttcctgtttttttttttggtgtagataatcatgtctgaaattttcgttctttttagtttctaagtgacttgattagtatgtataggaaatggattaagaggaaagaaagacgtgctttggatttgaatctattgggcaattttttgatttttattgctttatgtattgtttggatcaaatccaaccaggagataggtagatttatgtgtgtagccattatcaaatttgagagtttaattttccctttgcctgtgggttgtaattgtgttgattggttgtttatgtgtgtggcagctcacataggaaaatgatgaggttgcagtcgtatgcagggcttagtttttttgctactctagcagttatttatcatgcatttaacagtagaggccagttttaccctgccatggtttatttatctacttcaaagatcagtttggtactacttctcaacatgggtttggttattatgtgtatcttgtggcaattaactaagcgggttttcctcggaaccctccgagaagctgaggtcgagaggctaaatgagcaatcatggagagaggtcatggaaattcttttcgcaatcactattttccggcaagatttttcagtttcatttcttgccatggttactgctctgttattgatcaaggctttgcattggctggctcaaaagagagttgaatacattgagactacaccatcagtaacaacattatctcatattcggattgtctcttttcttggtttccttcttacgctagacagtctctttttgtatacttcagtaaatgagttgatacagtcacggaaagcttcagtttctcttttcttttcatttgagtaagtaatcttatccattgacttgcattgtggtcttgttgatgagttttgatattatggtttctgcttatgatcgcatattaaaatttaattgaagcctctctacttatgatcccatgtgtgaagtgatacagttgcggagagatcctgtttagtgctaaaatgcttacaacttgattcttcttttgtcaaggtacatgatccttgcaacaacaacagtgtcaacattcgtcaaatatgttttctatgtcagtgacatgcttatggagggacagtgggagaagaagcctgtctatacattttatttggaactcatacgtgacttgcttcacttgtctatgtatctgtgcttcttccttgtgattttcatgtgagtattatttccaacctttagttgtacaatttcttataggtgctaacaagcttcccagattgcccttttttctcacatagaaaaatgtgtaatatatgtttcatatcttatctgacctgctggccattcatttgcattgcatatgtctcatttttatcgaatcaaccattgaatgttgggctgcagatttttttctttctttctctcatttataataccttcgttaatttgatttggtttccaggaattatggagtacctctacacttgatacgggagctctatgagacgtttaggaactttaagattcgtgtagctgattacattcgttaccgaaagatcacttcaaatatgaatgaccgatttcctgatgcgacacctcaagagctcattgcgtgagtagacttagttcagtctcctgtgcattattcttatgattattacgttcttacagacagtgttatggtttatttatggacgtgcagaactgatgcaacttgcattatttgccgtgaagagatgacctctgccaagaaattgatttgtgggcaccttttccacgtgcattgcttgcgttcatggttagagcgacaacatacatgtcctacctgcagagctttagttgtgcctcctgataatgcaacaagtgcaactggaggacagaatgtatctcgatcagatacacatcaaggtgagttatttgttgggggttttctttagatattttatattttacttaaatactagatagtttattggggtagttgtccccttataactctccaaacctttcctccttttgtattaaaatcactttgcagaagtattaacagcttcaactatattattcttttttttttttttaaataaagtagcaacttcattaaatcaaaccgttcatcaatacataaacgaactccgggggagcatcgctcactcgtaaaatacgatcagaaatataacaagtagaccgcgcaagacagtgcgctacattgtttgctgactgcttaacaaactttaaagaaatctctttatcaactaaacttaacaggagatatttgcactcatcaataacctttccaaaataagataacatgtgagaggagcttctaattgcttgaacacctactatgccatctatccaactatattattagattaataatctgtgaaagtgtaatccaagaacttttatttcatgattgatgttttcgcgtggctttaatgttataatgccatttggttcatttgatactccggttcatttaatgttataatgttataatgttctagtattatgtccaagttctgcagaaccatttaagtaactatttaaccgtattggggaaacaggaacaggaacttcaggttcatctgctcagggttcagctggtggtaatttgagccagcatcaggccaggctccaagctgccgcagctgctgcctcgatatatgagaaatcttatgtttatccttctgcaaacactccagcatggtacgtgccttctaatttttttttgttccaaccaatggtataccaaattctatttttcctggatataagtattttctgtattgtcctggatgcagtcatgaattatgtgcatatacttctgatcttaaaactgaatacattgtggaagcatgctctttggaaccctatcctatatctacaaccataagatgttttaacatattagctactcaaagttttgaagtgcgtaagagttgaaataggcatacgcttagggagtttcatcctattttctcttcctgtatatggagtcttaattttgcattctagtacacaaaaacttgttgggattgttgccaatgttttactgctcctgtaatgagtagtgaccactttagatgtcagacaagagcgattatacaaaaacattgaaacaattttacctcttgatggcaggtatcctggatatgtatgcccccaggtgcaggaacccttacccagttcgtctggtatcgaatctagtggcgaacaggcaaatttttctaatgattggcagaggttgaacagtgatccgaaaatacaagattatctacgggaagctcaactgaagcttgttcagcagcagatagaggtatcataattcattaataatattgttttgacctataaactttatggggcaatgatcatacatatatttcttatagttacttattctgtttagtgataaattttcttctacagaacctacaaaatcaacttcaactattacaaaaggctaaagcagaggaaagcccgaacgcaggcagcaaagagaagaatgttgaatcttcattcgactcgcaatatggacaccatgactgatttaatagcccccttatatattgactggatacatatctcagtagactcaggatgtgcatatagggaaacacaaatggataagaggtagtgcattgctcttaagactggaactttggttgtttcacaatgatggtgtctagcaatgtcgtatattttctcttgtagccggtctttgtggaatggtttatggctttttggattttgatgtaacatgtgtagtgctaatttgcacacagaatatatgtttcttatctcactgggaaaatttggactatgttagagcaattactaaagcaatgaaaatcttgtttgaagaacatccccactgttagttattgatttttgtgtttgcaaaactcctaatttgaaaaggatgaccagttaaatgaattagcataacttattagtttcataatgacattttaatatgcccagataaattgatagtaatgaattccaattatacaaaacatctagccattttgaacatttctcaaaagaacctgaaacttgtaaaccttgcaagtaaaatgtaaacacttacatcaatgatcgatcaaaatttttaaatactattattgatccattattggatattttgtaaatttatctgggtacactgaaacaaatgaaattatattattaaaaataaaaagtcttcccacaaatatcatatagctagctagtaaccccattgacatatatagcaaaacaaggactaattaattcaattagtgttagaccacaaaaaaaaaaacaatgatcacaatccacgtaaccattttaatttggtaaataacactcctcatctacaataaattaataatgtagggaattaattaaaccattagtcagtactaactactaaataaaccatatttgtcaaaactatgtatctcattttcaactctattaaactaataaccaaaaccaaaacatacccccaaaacgtgcataccacaaaaacaaattccaccccccaaaaacgtttacactcacatatatagtatatataggttggtcacaactaattataatgtgatcattctcatcatcatcattattattactcataataataataataataatagtcattgagatctcccatggcggtgtctcaacaacaacaacaaccgcaggcaccaccaccatcatcaccccacaggcatagaccacccatctctctccaaccatcccacaaatcatcctcaagaccaccctccaaacccgccaagctcctccgccgagttcgctctgtctttagatcattccccatcattaccccagcatcatgcaagatgccgggttcacacagcgtcacacgtcaccacgtggatggccatatccacggtggtacgcgcatgacgggaaccttattcgggtacaggaaagcgaggataaacctcgctttccaagaaaaccctaggtgtcttcccagtcttgtcctggagctggcaatcccaacagggaagctgctccaggacatggggacgggtatggtgcggattgcgttggagtgcgagagacacccttcggagaagacgaggatggcacaagagccgatatgggctttgtactgcaatgggaggaagtcggggtacgcagtgcggagagaggcgacggaggatgatcttgtggtgatgcagttgctgaatgcggtgtctatgggagcaggagtgttgcctacggatcatggtgataataaggaaggagagttgacttatatgagagcattttttgagagagttgttgggtctaaagactctgagacttaccacatgatgagtcctgatcacaccactcataatgccactactgaactaagtattttctttgttagaatctgattcatcatcttcatcactacctactttttacacacaagaaaaataattaagaaccttatgttatgtaggtttacttttacacagtttatcagtgtataatttatttatatatgatgagaccataccatcaaatgataacttattaatcattgacgataattcaagtactatgtatattgtttatattaattatttgaaaaagaaatatataaaggcatatatattgatgatcatcacgtatacgttgatcaattttcaagaattttctaatatatatttcaagaattgttattatagaaatatagtatagtattcttatcgatatatcatagtgttgttgatataattaagtattgaatcttatatataacttaaaaaaataatttttaggaaatatcgctaactaatcataaaacgccaactatacaaaatgctaagtactattagtatccaataacaatactcattttttgatcaataataagcagatgagtaagtaactatatgcttctcacgttttatgaattgaatagtttgttgtttatatatgagtaatttgcggcataaatacttaagtttaattcccagttgcaaataaatacataagtttaatttttggcattaataatacctaagttata

SEQ ID NO: 113113 - DNA, 3293 bp, Cannabis sativa
ttcttctcaattgctcttctgaacctcttcaagattttctctcttcttgcctccaatggcacagactctccaacctacctcctcctcctcttccgttccccaaaacctacttctgccagaatccgagtctgaaaccgaccccgcctattccatctccgccttcgatgagccgcaaaaccctaaccaaaatctgatttctactcctacccagaccccgaccctcctccacctttccttcaaccaggactatggctgcttcgccgtgggcaccgacatggggttccgtatctataactgcgatcccttccgtgagatcttccgtcgggactttgggatgcgtggtgggattggattggtacagatgctgttccgctgcaacatacttgccctcgttggtggtggagcttgcccgcagtacccgataaacaaggtcatgatctgggacgaccatcagtcccgttgcatcggcgagctatcgtttcggtctgaggtcaagggggtccgactcaggcgtgatcgaattgtagttgttttggttcagaagatcttcgtctacaattttgcggacctgaagcttttgcatcaaattgagactattgctaaccctaaaggactctgtgaggtctcgcacgtctctagtcctgtggtacttgtgtgccctgggctccagaagggtcaggttcgagtcgagcattatggttcgaagcgaaccaagtttataatggctcacgattcgagaattgcctgcttctctcttacccaagatggccggctgctcgctacggctagtagtaaaggaactctggttagaatttacaatacattggatggttctttgctccaagaggtataatttgatttttctttttcttctgttgttagctaatttattcatttgtgtgttctttcataaagggtatatttatatttattaattggagtagagtagggtctgtatgattttattcatttatatttactggttagtaatagtatgttagacttaaagtttgtgaaaagatggcactgtgaattgatatttgttaaataatttgttggatgtgattgggcgtaagagatgggaaatattggtatttaagtttggtggagcttaaatatgtgattgaaaactctaatgttttggtgtttgatgccaggtaaggagaggtgcagatcgagcagagatatatagtcttgctttctcatctactgcccagtggttagctgtctcaagtgacaaaggaactgttcatgtgttcagtctgaaggttgattcgggacttttagcgaatgatttatcgcgtactacgccggactccagtctttctaacccatcagccattccgtctctttccttcatgaaaggtattacattttgcggtgtgataatagtttgcttgaaatggaaggagtattatttagttactaatgaactcttttgtattatgccatagtgttgggtatggtcaaatgtgttagttccgaagagccattatactttatttgtttaacttctctatattttattatggtttgcaggtgtgttgccaaaatatttcagctcagagtggtcagtggcacaatttcatctgcaagaaggtttgcagcacatagttgcctttgggcatcagaagaacgtagttgtgattcttggcatggacggaaggtaaaacaaaattaaaatgtatttttataagaaaagtaaaagcaaactaaataattgaagacttgtaagttggatgctttgggtagataacatattaaatttgaaactagtggcaaaacatagctttgggtttcataagttgaactgaagtatctattatcttgaacataaactacttcatttttccgcatttaggttatatatatgaattctagagttgggatatggggaatatgaattgaatagaggattgaacagattccttaatagatttcagttttcacaaggattttttcagttctaattagatatcactgctatagaaacttttcacatatccttatgtgattggcatctttatggggatgtttatggaccttgtagtagaggatagagcaggttttttattttcaaatatattttttttatgtgagacttcaagttgtatagagatcaaaaagagatagagtaaactctggaactggttattctaattatgtgcgtataagagattttgttatgatatcgcctatctgtgatcacgatccatttatttatttatatttataaacttgttgtgttgtaagttttgtaataaaatgaagaaatgggtggaattttgcagcttctaccgatgcgaattcaacccagcaaatggtggagagatgaatcagcttgaatattataattttctgaaacccgaacaaactttctaagcaatgattggtatatacatacggtcttttatttctgttaatactatgttctttgttttatcttttcaaatatcttctagggaactgatctacaatgtaaatataacgggaaaatttgaaatggataacaatttttcaatcacttatttataagattgggatgtatctaaacaaactttggctgatttactttgcttgtatatgcttaatatcgaattccagaaatctggagcttgttttcaagtattattggaagaaattctcagtgttttcttttgtttttatttatgtaaagcctattctattgtacaatgcgtttttcaagtccaataactatcaaggcattgcattggatatttgaaaattttactgctgcttttactcctagcaaaataaaagataaactcatgtataatttagaaatatgggataattatcaatggtgcctcctaaaataataggcacaggataaggataatcaactaatttcagatgaaccatcaaactgaatatttctcttttatattcctacctttttttctagttcttgaatgttatattttttaggaaacaataaaaattattgtttgaggagagagtgaaaagaagaaataagtttgagctgtaagaaaaatggagagaagagaaaagtgaagaaaaatgtagtgtggaactcgcaaattgaggggaaaaatcttgtgtacatatagcatacaaatgaagatactaaattatctttataaaaataatattatatttatagttttggggataatatagctagaggtggcaaaacgggttttaacacggcacacaaacacgatacgaattttacgagttagaaaattagatgcgggtcgaaaacagatcgacacgacttgacacgaaataaaaacgggtcaaacacgaca

SEQ ID NO: 113114 - DNA, 5721 bp, Cannabis sativa
tgttaagtacaaactcttcccagaggattttatgctgaggcccgtgaaggagaagaagaaggcaaaacttaggcaggtcggggtgaccgagcaggagaagctgagcaagaagaagaagaagaagaaggctctcctcaatgaccaagcaccagtggagcgtgctatcaggattagagagcctgatatgcctgtccggccgtccaccccagttgttccccttgaactttcgacaatactgattttggcatctaaaatattcgatttgttaagaatctcccctaaactttacatttacagaaatttagtctttctgttaggttccgtcccattattctgtttaaatgatgacgtgtctttgtcaattagcaactttaccccgtaaactttgacaactataaaatcgtaccccccaaaataaaaatgagaaatattcaatattttttttagtaaatcttaaaaaattaatatagatcttaagaaaaaatattttgaatgattaagaaaattaaaaaaataaattaaaattttaaaactaattaagcgatataaaaaattatttattttttattagaaatttcatttagatattaaaaaatatatattaaaaattaattttttgtaaaaactaaattttacgggaacaaacttgagtatgttttatttttatcaaaaaatgtagatttgtttaagtaaacattatatttttttttagtttaatatatatttttattgaatttttaattatatttttttatttgttaagatatgagtttataaatataaatttttttaaaaaaaaaatattagtttatttaaattatgtattagattctcaataattttagtttgattttttaagatacgtgtttataaataaaataaagtttggaaatactttttagaaataatttaagtttttttaagtaaaattaacattttttaatcaatttaatatttttattcaattttctaataatttttattatttttttctgaattattagaatattataagggtaaattaccacataaatacttaatgtttcagattttatacacttaaatatctatccaatgttataattctcttacactcgttactaccacttgtgttaactcataaatatggacacctgaagggtccagatgtattacatttatttatttatttatttatttatttaaaacttaatattcttaatatcaaatttttggtagttgtactataatgaactcagttatgggtaatcttatgagaaaaattattatcatagtatgaccgaataggtgtagttgatagataacctaaatgcaaccaatcaaagcaataaaaagaaattaattcattttcattcctttatttcattactttcaactagaagcaacctttaatcatgctcaatactatattatgtattcaaaaagttccattctactaacttctaattattattttcaaaataaaacttaaaaaagttgagattagaataagagacaaggcaattacgagtcactctcataaaatttgattggttttggtatgtgtagtttagtattatttttcttaaactacctaaactaagcaccaccaaggacatcatagttaaactaaagtgtaaaaaaagaaaagcacaaaaactataaactataagaaaaacaaaaggcactaaaacttgaaatgaatggctaattcttcactctttattttgatgatttaataatcaatatagtatataataatttattgattctgattctagtgtattcagttcaatctcgattcgacacatccttagcaggaccaccacttgagatgcctctagataatcttatgatgagttatgaccctttaatgaaaggagcttttgaagtctttaacttcacaaattttaagatataagaatccacaaaggattccctatgagtgcccaaaaagttagggtaggagagagaagaagaagaagaaaagaaaccaaaaccaaagctacaagttgaaaagaatttgatgaactagtaaacataagataacacttcatcacatattattgaaagaaggacaatgctgcataaacataactatcaatttaaaaggaattggttatgtacattgtactatgccattatacaaatccttttgcctaaataccttgttgtattgaaatttagtaaaattttaaaacatgtaaaccaaaatgttacaagaacatgattatgtctgttagagttctctaagaggactaagcacctttctcactggccttgtgtcagcatcagtattaccacaaagtaatcttaactgataaaatccgcaatcacattaacgtgcctgcaagaaggaacaaagaaatgaatgctgaaatgagaattcatgagcacagagaggaacaaaagaagacaacaatgatgatgatgattgatgatcaaaaacacaaaacccaaaatgaagagcaaacaatacctttgatcctcaatttcgcccttttgaatgctgaaatgaatctgataaagaaatctaaaaaagtgtaccatccaaatacattaagcagctttccatgacgatatggcaaagatgattcgtcctttccatccctgcaatagccaaccattgtcttcatcaattataaagtctctgtggtaagttgtctttactttctcagctgccctcttcatgacatagcggcttaaaggttgttgcacaaacccggacctcatgatcctgatttgccattgtttgtatgtttctggcctttccactctttcacatccctcacaagctatgacatttaaagcctccctaccaaagatctctttctcaattagcatccgctccggttcccagcggggtacaatcaattcaagcatatcaaacaatgcagaaaagtgaaacaatgcctctcgaaaccgagtaacaaaaaaaggtgcattgtatgctccatttgtaatcccatggatgaagagatcaggtttaattctctttatcaaatcaagaactctatttcttgcactctctgcagtcacactttcatcgggcaagttcttaccccgatacagacagttaactacgaggaagtcattcttgtcaatctttagttcctcaagtgtaatggtctcccatttctttgcaattgcatgataatcaaaagtaacattgaaagtttcagcataggcttttaatcgtcgtcctgtttcgtcaactctctcagctggtcgaaagccaggttgtggaaactctatcccagtgatccgaagctttggtggtccaccttctctcattgacaggcgctgaataagggtgggccattgaaaaccataaaggataccaaagtcaatgacatgaacacttgttgctttggctgctgtatccagtattgtcctgttcgatgtaaagttagatatcttcctaaatgggcaggcagcaaggtaaagccggtaagctttcaatatatcagcagcagatgttcttttattaacaagacctttgtagatctggctacctgtaccggccaagcgtgcctcaagaccatcagcaaaacaactagctaatctctgagaaccatccccaaaaggagaggaatgttgtctaacttgctttagcagttcatttgcactcctatgatcatcagctgcaactgcttgagcgcactgaatcaataaagatctcaaatccaccacctccttcttctttacttgtctcttaccacgactctttccaccacttaatccttttatctggccagtttgttgcatacttttcgtgagatcactctgcaagtctgcacggaaagatgtcaaatgctcgtgaccatccccaagactacaaagaagcacaagatcaaacatcttcgatcgcaaagtggattctatgtaaatggcagcttgcttgctactcctctcatcttccaaatcttcaacgtcactgtaaggatgttttcttcccctagagcttccaggagaacactcatcatttgacttaacagaaacctcacttgtcccaaactttgaaggaaccaaagccaacaactcgtttgcctctacagaaccaaccaagtcattttgagtgggaagaaacctgctagcctcctcaacccccttcctaaactgccacattgaccgattctcactacacagatcaggagcttgaattatagtactgttgggggagtccaacaatccatctaaactgctaattgcactatttgaagagctgtaggatgattgagaaactccaaattcaggaatacagtgtaattgagaggtataattatctagattttgatacaagggattatcaaccaaatactcattgctatagcaactactatgtacataattgttggagcttgtagtaaaattttcttctagactttcaccattttgaaaaacatgattttgttcaggggaaggtggatactttttaccaagaacttcatagaacgatttttcagcagctcgaagatccgaagactcttcaactatactagtcttgtcctcatgatcctcttcttccatgagcatctggcttatgtactgcaatactgtatctgaaaagtcacagtcttctggggaattaacatcatgggacaaagttgaaatagtgttttcgatagctggggttagatcaggttgagggtaatgaaaccccatgtggctgtgatccgagaaggcattgtgattatgattattgaatctagtttcagccataatattattgtgactggaaataactgacaaaggtttgccttttccaaaatgaattactccatttccagagccagtatatccccttagactctgatccattctcattcaaccaaaaaccaaaaccctttgtctagttcaatacacacccaagttccttctccaaacaaaaatagctcagtctgtacttattaaatcacatcactacagtctaccgtggagtgctaaatttcatcctaccctttaagaaataaaacaaactttcaacaaaatcatagaagaaaaaaacagtaaaagcaattatttttacaccaaaaaaagaaacatgtagcatcgttcattttcattttcattaaaaagaaaaaaaaaaatccaaaagaaaagtcaacatcaaacgaaaatgaaaacccagaagaggaaacagtacaatacatatcgtatatattttcaaattaaatacaattagatccaagtgcttacctcattgaagaagctgaagtgccaagcttcaaggcatagagagaaaaggaagaaagaaaatgtgttagagagaaaaggttcttttagtaattaaacatggtctatactttttgacaaaagaaaaacatggtctaacacttgtagtcttctagaccgaatcagagccgtttgatttcaatcaacactcatctagatccacccgcctacaacaataaataaaataaagggtgtttctttttctttttttcttttaacaatataaaataaggccagggtgttatataaactttgttttatatataacttatttttttgttttagtaatatatattttttttttaatacgaagttatagacaaaaaaaaaaataatagattagatattgacactaaaaccactttaattatatgatttgttacttaattctataaattaattattgactaattagtaattttttttcttgaactttgacatgtactaaatcatgttccttgaatttttttggctgttaaaaattctccctgaactattaagattgtt

SEQ ID NO: 113115 - DNA, 1888 bp, Cannabis sativa
tattctatgtgggacaatattcacaacattccccctcaagatgatggctattttttgctcatcaatcttgaaccgtatcagagtggacatggtcactatctgcataggagaggatcggataggatcacttgcccgcaagggatatgactctgataccatgatgagaatcatggggttccatctcaaaactaattggtgatgaatggagtagcccatgttcttatatatgactcaatacttttacatttaatccatgtgggataatgttctccaatagagcaaaaatggattgtgcaaattctttgccaaattcgatgtccaacttagaaaaattatctggtttcacaagagatcatgttggtgatcctcacttgtacaaaagcttggttgaagctcttcagtatgcagtcatcacaacaccagaaataacatatgatgtcaacaaagtttcatagtttatgcataatcttcttacacctcatttcaaaatagtcatcaagaaaattccaaagtatctaaaaggtacacttgactatggcctgcacttaaggtcttgatccaaactggttctcacatggttctgtgatattgattgggcatctgaccctgatgatagaagattaacttctggtttccgcatcaatctaggttccaatctagtttcatggagctctgtaagataaagagaaagagggaaagagagaaaacaaagctttgaacagagaaagaagaatttgttattgattgattagttttggattaaaagaggtttgatatttatacaattagagaataacaactaaccaacaactaatcttaactaaccacccaactgtcaagactcgcagtgcttaatagtattaacagatttaactaactcatctcccttaatagcccccttcaaactcagggaggtaagagaaaccacactgagtttggatttgaattcgttgaacttgctgctgcttataggcttggtaaaaaaatcagcaatttgagcagaagcagggacatgtttaacctgaatgtgttgttgtagaactttgtctcgaacaaagtataaatcaatttcaatgtgctttgttctggcgtgcaaaatagggttagcagccaacaaccgtgctttgattatcacgccatatagatggagaggcagggattcgaatttgtagttcttgcaacaaagactggatccatacaacttttgtgacagcactggccagacttcgaaactctgcctctgtggatgatttggagattgtcacttgtttttgggatttccaagcaatgagattaccaccaaagtatacacagtagcctatagtcaatttttgatcatccaaatcagatgctcagtcagcatcacaaaatgcatctaaagcaaaatcttgagctggtttaatgtacaagccatgatcaagagtacaagcaatgtatctcaatattcttttaacagtagtccagtgagattgcaaaggagactgcatgtactggcatactttgttgacacagtatgagagttcaagtcttgtgatcgttgcatattgaagggcaccaactatggacctgtaaagagtagtgtcaggagcgggttcactgccatagtttgacaactttaagccactattcataggagttgattgagggtttacattctacatgccagcttgggtgaggagatcttaaaggtatttggtttgggatagatggataccagcagcagtttgggtaacctgtatccctagaaaatagtcaaccaagccaagatctttaagagcaaattaggtgctcagataagtgacaatagatataaccaaggagtcatcacttcccatgatgaggatatcatcaacatgttgggttttatgccctaaataaaattccattt

SEQ ID NO: 113116 - DNA, 3684 bp, Cannabis sativa
attgtttagtccaatcttacatattactctcacttataccatcaaatggttaaataattatcatcatcgcattctacattcaaaatcgagttcaacaacatataatgtgactatatttaaaatttagggttccgaagcctcacctaagcggtgcacattaacaatcagtggcggtaaaaattggtgtaccgaaaacgtcaccaaaaataggggtagtgtatatcaaaacgaccacctcgacgagtagatcacacccaagccaaccgtttgtcaaaaaggtacacgatatcgccagaaagtcatcggaaaggggcggagctataaaaatgtcaccaaaaaaagtagtgagctgggcaaaatggtttagtgtaggttgttctcctcgatgagctgagtttagtggtgaagacgtctcgtcaaacggacaccggaggtgaccagaaaatccgttcaaagtttgaacccccaaactttgacttgcaatcccgagctaacggcggtgaaagaagcggtgccgcttggggggtgaggtcgccgacaccaggggttttgttttgtctagcgcatggggctgcgcggtggcaagagatgggtcgctggagagtggtggtgatggagttttgtggcttcctttttgtgttttgaagagagagaaaaagagagagatagataaagagagagagaggaacaatagatttgctatatttttttttatatatatacatatatattattattattatttaattattattttatttatatatgtttgactcggtcaaaaaccgagtcgttacaaaacgccacctaagtgcttacactaatgtagattggggatcataccacgacttgaggagatctagtagaagtttttacattggtatgtccttgattccatggaagaacaagaaatagcacactgtttcgaggtcctcaactgaaattgaatacaggataatgaccaatacaacttgtaaaattttttgacaactttttggtccaaaaagagctgaatcaagatcatagtgtagttgttaagttgttctatgacaactaagctgcaatccacattgcagcaaatccaatctatcaagaaaagacaaatatattgaaattgactatttggttagagaaaaggtccaacaactaattaaaacctcacacatctcatcttaagaggaaatgggatttacataacatatacactccattttgagggggagtttcaaaatagttgagctaggatggaattagttgttataagagttagttgtaacaaaaaataacaagttgttactagttcttgcatcttgtaaactagcataagatatacactcttgtaaccatttctatggtattcaatacagaatcattttttcattcattttttgcttcatagcattctcttattgttgttctattacttcttgctagctacaacagtaataagcattttcttttcttttctcgaaacccttatatttgaatgagtcaagagaagttagagataaaactgatcaatataacagtcttaattaccacacttgactattaagttgctcaaattataatcttaaccaccacactgataggttacagacaaagataaagtggtggttatgtttttatacaacccaaataacagtcttaactaccacacacacttgactattagtctattactacagtagactacataacaaccataactaattacatttaacaaacaaagcaaaggaggcccatatatattaagtgctagctccagcctctctataattaggaaatagcataaaaatacacttaattcaatagacttagtacacacactttgatcatatatatatatttatattcttatattggacactgatcatcatgtacacttaggcatcttgttgatcagcatgagtctctccaacactgtccatctgaaaaaagattagtttgagtaattaaaaaaataaaagaaataaataatatataagtttataaccctaaaaagagttattatagaaacattaattacctctgctgtcattagtcgaagccttttattctgttcagccaatacaccaactttaatctccaagtaattcatgtgtgcctgtacgaaacaaatttaaacaaatatcaaatatatagttttataattaacaaaaaatctcgaatatcaaatatatagtactttcctccattctagcattatttgctcgaatgtcataatcatcatcatctgacaacattcggtttgtgatgctgcgactgtgttggcgggtgtcgcctgagacagatgaggaatctaataaatcattttctgtaactatgtctttccagatcatcccttccatggttctcgtactggtgttattataattagtattattattattattattattattaacattagtagtagttttagtagtagtacgagacaaggatgaatcagtctgactctgcaataagctagtaacacttgtgtcacttgtttctgtttccacactaagtgacgacattataattaattagtttgttaaagaaataagattcaatgaagggttttacacgaaaaaaaaaaaaagaaacaaagatggagaaaagtatagtaatagtagaagaactggtgcgtttagctatgaatgcaagtgttccattttatagccaaaggaggaaagagaagagaattgctaaaaggtattactagcaccctcttccgtataatactgctattggtataattaaacatcgagtctcatgtaatttaataaaattacttttaggcaatatcgctaactaatcgtggggtgccacctacgaaaggtactgggcaccattggtgtataaaaacaatgctcaaaagaaaattgctaaaaggcttaaacactttatgtatcatactcctatttgtgtaattatgtattgagtcatgttactaactaataataaagcgttatctgtaaaaaaaaaatactaaaatgcccaataacaatgctaccaaaagaaataactataatgaaagttactttggtattgagccacgcgaggatagtactatttttttgcttttattgggaagatgcggtgaccatatgttgagactcttttatagatagggcttgcgtaataactcgttggctatttgtttttgtagtacaatttttaccttaacagtaaaaaaaaaaattattttagttagctcttatctacttcttgtacgtactctctattgaaaatggggaaatctgatttgacaaaagattaaaaaaaaattaaaaaggagatatagatcagaggaagaccaagaggccccccactaggagctctttcaaaagtttttttactctatctacacatgtttttattgcattatacattaataatttatattttttttttcaatattattaaattaatattatttttatgttctacactattaaaataataacttttaaatatatatataatattatttatatattatattaaaataaagttagaaaacctttttttttttaatttttttatgcaaattataaagagattattgtgagtgttctgaaatattacaaaaaactgttaattttagtaataattttttagtcataatataaattttttgtgactaaatataacttttagtcacaacaaaaatttacttgtgattaaaatatggtattt

SEQ ID NO: 113117 - DNA, 1954 bp, Cannabis sativa
tcatgaaataaatcttgtgaaccacgcaacataaaatgatttctgatcttttattaactagtaaatctaattatatgaaatgggttttatttagggcccaaaactgaataatccatttcactaagattgctagagtttctaattctgctcggttgaccccatgggcggtggtctgcatcctagttggagcttctattattcgggtagggtatcctttagaagttcctgcttccaccgaacgtcttctagccaagaggccactcacgcctcttggtcttccaagtcaaccatcgacttcagtctacttctgtcttgtagttgtctcttgaccacggggtcgtgaaggcaactctagtgatgcttttgggatgaactctagatcatcttgggatgacccgttgtcggagtgatcatctagagcattgtagtggctacttctcttaaagtagtcttcttctggatcacaattgtgaaaagaagtgaactggttgcacaagttcaactcctctccatgtacttgagggaagtactcatattactagccatcggggccacgagcaaagttatgacataattcacccctttcatcctgaaagtacttttatgtatgaagtggttcattggtccttacctgctagatctcatagcctctagtctctaagtaagttctttgtctgcctcaattgtcttgtgtggtaggtccctttccctttgcatggtctcgaggcccggtctcatgagtgtgatgaggaggacttggtggaagagtcatgttggttctctctgtgttttgaggtcactccacatcaagtggagggcccattggctagctcctacccatgagcttgagtcctttaaggctcttgctccaaggtgccttccctctgagaggtctccatgcttggtgtttacttagtggttacacggttacaaagtttggtggtgtcattccgcacgttaagggtttccccttgagcagtagttcctatgtgaccaatttgtcgatggggagtctctctaacaagcttagaaatacccatgtggggagtagttctacgactaaagaaataagcttctctaatctcctaaaactagttagctctccgatgttcctatagctcattggctttcaatgttctggcagttctccataaaccagtgttgaaactgttcgtgttgatggtcaagaaagtctcgtaactattgttgtagatcagctataattaaggtgagttgttcaacctgacgatcgagctcctcaagatcttgtagttgcacatgtggctctccagatgggatttactcactggttccagtaccaagagaatgcagtggccttaggggaagagttatggagctggttctagggcctcctccttgcatgtgaggtgcaggagtagttctagttccagcttcagtaactggtgtgcccccagttgcttagccagaagttgggattcccttatcaacacttgtagagcatgttgtaaccatcttgctagtaactttcttgagttgtggctcttaatgaaagtaccaaaatattaactcagaaatttggacgcagacttctaagccacacccgctcgttagattagcgagaatgaaatatttgttaagtaaaagtagagaaacacacatcaatttatagtagttcactccctctatcatgataataatggagctacgtctattttgagttgttttttctcgcaagatggtattacagaataaggctaagtgtcaaagctccaatttctagagagaaactatgaccttgtgggtagttttctgaacagaaaaaatgaactaagggatgtaaagaccgcttagcattaatttgaaaattagcgaataattaggatttaattatggaaataatttattaattttgaattattaatttatgatgatttatttaaatttagaatgcatttttatgtcatatatagaa

SEQ ID NO: 113118 - DNA, 3176 bp, Cannabis sativa
tgacaatatttttgtaaaaaaatggtaaaaattagtataccatgtaaatttctgaattgttaactcattttcatgttgattgatactcgtctccttgttaaacatattgctgaggctttgggcatctaggatcttgcttgcctatgctaccaaaagatggtggtactcttttcaatgtcatttttcctaataaggttagaattgcttttagtgtggctcacatttttcctaatggtcattctaattatactaataccttagcactctttgccctcttaaggctgtaatgagatcatttttttcaaaaataaaataaaataatacttaaactccaaaaaaatatttgtagtaaaatagaccaactgtaatgatcactaataagtaacaactgcttgggtttgacaaatttaaacatgaaaaacttcttgtctataaataagccaatctctatatttttcattaataataaatgtcacaataataaaaagatatttctttttcattttccaaaaagccatttcaaataaaattcaaaacaatgtaaagacagaaagaattataagacatgataaccaagaaaaaacagggtgtgtataaatcttcctgatatagaaagaaaatgaatagaaatacatgatttccaatcaatcaaccaaataaatccacatgaaatgaaacacctccggtccatcgaaccgcctattcaataatcaaattacaacgatgcagagctatacaaaagcagccttcttctggcatggtaatcccatgaaatatggctattaaaaatgataaccaatcttcatcaccacaccagtatcgtattgtgcgccaagccatggaaaacaatccaatcccctccgtccgagctaccaactagtagagtagagtttctcaacaatacacagaagtaccaaccaattatgataatgagctgctgaatctatgatcatgccaaattttgatatatattattcctaagcagcaccaattgatcagagaaaataatactaaattccacatcaaatcagtaaccagaagaagatacaagaacattgtgttctttcagacgcttctgaaattgtgccagacgggtttgtaattgcatgatccccgcagccttctgagatagaatggcattcaatttggaaacataatcatctagctgattccctggttgatccgcttcaaccaaaagattcatctcctgcacaagaatataagaatccaaaatgaagaagacagcatagattggaattgataaaatttacactcagaaataaaattctgtgtggagcgttcttatccaaaaaatatatgagctacggtcaaaatgtggtacattggtattttaaacttgatactccaaacactagttctattttaatgaattgtatacctctttaacaatattcatagtatcctccacttgtttcctgtgagcattaacaagatcttcctcttcctgcagcaagtgcaccacaaaaacatgttaaaagacttactattgttttcatcacttgtcaaatgagaaaagtcactatcttcccagtcacctgtaaaaggaaattcaaatcatcatctgaatgtgagcttttggaatcaacccttggcgtttctttccattttggctgaccattgggtctccgtaatttttcttctgcatttgaaaaaccaaacgatcctagcttctcgttctttttccataacgattttggtggaggctcatatgtttcttcaggagtgtcaaaatcctcactctcaccttgttcatcctcaaacgtggaggaagtttgtaaagcagaagataggggcactgttgttgactccttaaggttcaaggttggaggcaacacatccttctttgggttgtttccctttgagaggctcttcaccctggattagaatttttcataataatgaacattaaaatgccagatatgacaagcgagtaaaattaataaaagaaccgaatatgcttttatcagtgtgattcttttttcttttttacctatctgcatatctcagcgtattgagagtatgctcgcaagatcccgaacttggtgatatgcatgacaccatcacagtgcgtgaattacccatgaaagaatccctaagaacttcagttaatttactgcctctgaatggaatgtgaccttggtcattgtcaagagctctaatacattctttcaatgctagcaaactcttgttgatttcagcaccttccattctgcatcaatattagaaacaactagtaatataagtagactacagacagagaaagaacagatatcaaggggtaacatgacaataggcaatcatagcgttccaaaacattaaacacaagaataagtgattaatgggaaccagagagactgcatttatttaagataccatcctattcctaaagatgttctattaaagcccaattaatagctgtattggggataataccttgtctgtttatcattatctgtagtgtcagcacctcgttcacttccagcaaggtcaatgaaggagagcttgccaacaagacggggaggctttgattcactgccgtcagctgatctctttatagcaagctgaagtatggcatgtgaacgagaggattcttcatttgcaccagttgtaccagtacttctggtggcacttcctctttcaatgagctcctttatggtctctacatcagacaccctgtattcttgcaagcccacaatgcaaacttgctgctttccatcctccctcatacaaagtttcctgattgaaatagggttctacctttagggccaaatctttgaatctcaattagaatgtaaaaagatcaatgacaaaaagacttactttcgttcattgaggagatcaaaaagctttcccccgtatatttcaaaaaagctcacaaacaactgaaatccatggttgcggtatgtgtgatgcatcaacctcaagatgtctcgtgatgccttaagaggcaatggtttcattgtgtatgtctttccactacctgaaagggatacaaagaagaaccagaataatgtaagcacatttgggtttattgcagaactcaaagatggtatagaaaagctaaatccaagtaatacagaggccaaatgtctaaactttcagtagataaataaataaatatatacaaacacatcttcaaagtaaaaaagttgtca

SEQ ID NO: 113119 - DNA, 8298 bp, Cannabis sativa
cagcttttttccacagttctgctacagctgcttttcccacagcacagctacagctacttttccccacagcacagctgtgccaaactggccctaaattaaaccaaaccaattaatagtttggttaaaaaccataatttatatttcatagttattctattttttaaaaaaagagtaattgttcttttttttttggtaaatatttttacttttaataagtatataatacataaataataataacaaaatattctcaaaaacaatgctaaattaatcaatattctacctaaaattatcttaaatatcaacattccctttaaaaaattatatatattaagtataaataaaagaattatatgaatttggcttaatttgaaccgctaaaaattttaaaaccgtgatcgaactagagaattgtaaacggtttaaattgaccaaactattcactccaaattaatttagtgaaatcttaaataatttagttcaaattcattcgggtttaaaactacaaattacaaattatataaagcccaaactctttattgtttttcattttttttttaaaaagaacaccatatagaagattgttgtaatatatatttgtaattgatgaattaagagtgagaataaatccaatttgtaggtgggagatgtttaagccattaatcatgttataattgacgtttgctttaggtggggttattagatcttcaaaagaagattagtatatataattagtgtactccttgatttatgcaagtttgtttgcctcttttccttttaattaatccatatttatctcaaaacttatatctataaataaatcaaagcaataaattatgttttatttgttggtgtatgtgtacggctctttcttttttactactttcttgaaaatcaatgatgttgcctcattaactgccacattatctgacttgtgtttcacccaaactttttttcttttttcaatttattttttttattaaattaattaataatagtcacactgcattgtaccaatgtacggaatcagaattcattcatttattattaataataaaaaaaaaaaattacccagagaaaaataaaacaacccacatttggctaaatcatgacttatttatcattaccattattaatttgactaattataatttttttccccaaatttatcatgtatcaaattatagtagtgttcgcggtgcgagtgtacaatttttaatcattttttaaaatcaacttacacatgcagttgcactgcaaaactaaaaaactgcaaaaattgcatcgcaaaaaatagtattgtgcaatttttacaacttctgcagttttaactataactaaataattaaactaatcacaaatataataaatcttgagctaagacttataaaaaataccataaaacttaaaaataaatataaaaaaaattaaattttaacaatagaataactattgagttttgaattgaacagtcacatattgggcgtaagagaccgtaccgcaaaaatttttaaaccgtatttttttttacaatgcaaacaatttgataaacactcctaccaaatcataagctaaaaacttctgaaactattaaaattaaaaatcatctcttcaaattttaatatgttgtttcatgtaaatagttcaaaaaatattattttgatacatgtaaaaattgaaaaaaaaaataattagcttatttatttttatataattaataatgaaattaaaatattagaactttggagttttcagctaccaccgtcacaataggcatattcctatcattatcccacgcagtccgtacaagccaccaaatttttttttttaaaaaaacctcctaattttgctaatttactaaattaccctcgtctcagatccatattcacttatttgaagaaccaccgcaaatcacggaaattactattctgacctgtctaaaagccttctttcccgactcagatccgttacgaacgttacaactaagcccaaacccagacccattttggtaatttcaccacattcgagatcggccgtagccgtagcccagaaacggaaggaaaattttgctactgttgtttggttgtcgagaaaattaccaaagaaaaaaacacaaaactgcttcgctaccccacccccgaaaattttggatgtaagaactccgacaagagaaaaaccaaactcattttcttgcattttaatctgaccaaagaaaataaaaattaaattctcaattgtctggaatcaaaaattaactttctgaatttcaatacagaaaaaaaaaatgaactacggctatatttatatatatattcgtttgtagtaacagagaacactaatagaaacagagagtagaatctatctctttacactgaacaaaaaaaaaaagagagagaaaaaagaagacctaaaattctgtgttcgttatgaaactgcgtcgttttgaaggagaagaagtatatttacagcaaatccaaaatcatttctcctaatttacgaaatctactaagatctcactcttcttcgtctcttaaaaaaaaagatgaagaaggaaaaaaaaagttaaaaagagagagaggaagaaaattctgatcaggcacagatgaaatcatcggaggaatattgagaaccgagaagatcacgtaagtcacgtgactgaacatgacctaatcggagagcttcaaggactcgttcaaagacaagaacatgacaagggatccgaagaacacctttctgttcgtaaccgtattcctgagccgatttatcgagaagttcaacaaaaacaggatgattcaagagttcagcgttaacaacaaacctctccatctcatcaccgacgtaaaccggaatatgaccttcaggaacgacggtcgtcggcgccggagtagaagaagaacgacgacggagcttaactctgaatgagtctgttctgagatgacgacgagtgagggaagaggcggttgaagcatcggaacggagtagacagtattgtgatgagtcggcgactcgggagaggcgtctgatcaagtgcttcatgagatgagattagatcggacggttgaggttgaattgagatggagaaaggagagagagagaagtagaggaatgaaatgggtttgggaaagagagaaagggagagagaggtatttaaaggggtaagaaagggaatgtgtgagtgtgtaatttgtattgtaaaagacatggaaaggtgatgatgagagaaaggttgggaggtacaggtaggcgtacttggcaggtacaattactcactttttattttttaattaattttttatatttcttaattattttattattttcagtcattttttttaattatttttggcatttattgcgtctaaaacttaggacttaatcacgggcaggtaaaacaggatgtttggcattctttttgtttttttaattattttttagaggattgttataacatctctaattatattttgtaatttgtggtataaattataaatacttaaatttaatttttagttgtaaataaatatgaaactattatctatgcattattttttttattgaaatatttaagctaattttttttttaaaaaaaataaaaatttaatgaattggtcaatcgtggcaatttacttaacagtcatgtacttaagtatttatgccgcaaattactctttcgagcataattagagcaaaaataataaatatggctctgtactttaactttttagctactttacctaaaattagggtaaaaaaaaaagagcaccattagagatgctctaacacttagcgtctttcaattgatttttatttttatgaccatgtatgttataattgtttaatactagctgtaaatttttaatttttttttgaataatttgcaataccgaaaataaaatttacatattttgttacaggaccgactgttttttcttatacgtgtgataagcaactctttaaatcttatttttgactttgtaaactatttagaattttttaaaatattttaagtgatcataaataattataacgtacgcaattatgaaaaaaaaattgactaaatttttttcggtgccgaaacacattaggggtctattgaaaattatgaggttccatctcaaaaccaattagtaatgagtggagtaacgcatgtttttatatatggctcaatattttaccatttattccatgtgagacaatttccacaatatggtctatcagaacgaccctttaaaggggtctactatcgaagtttccaaagttattatagtaaattatatgggaccaaatacttaaatgtacaaatatcaatatgacacataggaaggtactagctacaactagtattttttaacatttttttttatttttattatattttattttatgagctaaggcattggtggcgtagtgttttttaattaaattatgtgagacccaataattaattagactaataataatataataaattgtgctaactatcacgataacttttagcatttctctttttttttttttttaatgtaaggtggtgtttgtattttactatatttttgttcttgtgagaaagattcagttttgttttattctagatttttaagcactaatttgtttaattagttgtatttattcctaattcgatgtatatattagttgttaagatctgatttaatgttagaaaaaatatattacttctgtctctctatttcaacaagcatcttattttaatttttgattttgcaaaatcttactcgatctaactttattatctagtaaaatcaaaaatattatataaatgtgatattttttgtaaatatttattattaaaaatttcacaagaaatagtgaaatcatattagttaaaaccccacctactaagtaattttttcttattttttccatatttttttgaagaaaaatcttctttatttaaaatttagtgtagaagaaaatttacattgactaaagggtcagcatattcccaaaaagatttgacacgtttacttggtacaaatatggcgcttggcttagtaataatcttcaaagaaagggacataattttaacatttcattaggttatttgattattcatcattggcatatttactattcaaaccaaaatttactcattttatgaatacaacacaaaaaatttatacatttttattataaataatattattattaagagtaatttgtgttataaatactaaattttaattctcgtaagtttaatttttaaaaattctgtaagtacaaaactattaagtgtaagttaatatccacttgtatcggtatggaaacaatgtagcttataaaatcatctcaaaggtttgatcctctaattcttttgattattttttaattgtggcctagcatatggaatattcgaacaagcatagatcttggtgaaacttacccaagagtgaggaaaatggttgaatggtgtggcaagtttttacagaattaatatagagatgccaataatggtaaatgactcaacaatgaagaaagtggcaaagctaaatgggtcaggtcagataggggcggccagaatgttaatgtggcgagaggagagcatggggaggtgttgtatgcagcaaccacaccgttataaaacaaggcttacagctgcaagaggctgagctctgtgccattcatgtcggtttgctagttggtatacaacgagggaagttctgtgttgaaattgattgtttaaggattgtgcaaatgactcaagagaaagaagagaggtgccatgaaattgacgggctactacatcagattcgcattctccttcaacttcatactgttttgggtttattttttatttttagaggagccaattgtgtggctcatacttaagccaatcaagtttttaaatttcaaagctagcgctatatggattaaagttacaacgtgttgtgtttatcaaattctttggaatttaatgagtcatttcctttataattttgtttctctatttcaacaagcatcataatttagtttttgatttacaaaaaacctacctcgatctaactttattatctagtaaaattaaaaataaaattaacatctcatataaatgtaaattttttataaatagttattagtaaaaattccacatgtaaaagtaaaatcaaaataattaaaaccccacctactaagtaatttttttatttattttttctccatatatttttgaagaaaattcttctttatataaaactttagtgtagaaaaaaattgtcattgacataagggtcagcatattcccaaaaagacttgacacgtttacttggtacaaatatggagcttagcttagtaataatcttccaagaaagggacatgttttaacatttcaatagttgatttgactattcctcattagcatgtttactagtcaaaccaaaatttagtcatttattaaaaaaaaaatatacattttattttataataaataatattattaagagtaatttatggtataaatacttaattttaatttttgtaaatttaatttttaaaatttctataaatacttgaccattactttcttgttggtatattttaaatagatgtttaaataaaaaataaatatttaatgatctagaccaaaattgttattgatttgaaaataacataaaatataacttaggtattataattgtgaaaaattaaacttaattatttacactttaaaaatctctattattaacttaaaacatattattagaagagtttaaaaaatcaatcaagtaattcgaagcttaattatatatatttatatattattttgcaaataatgcgtgttgatgtcactaagcaactaagtcacaacccctctcactcataaaatattaatgtaaattatttgtttcataatttatattttatagatttatttgacttgaaattgaaattaaatatacttgaaagaaaataatgattaaatttaaagaataatcttttttatgtatattaaattttttggatattgagttgatcaaattctcaaatttataacaataattatatatttatgtttacattagaagcttctaaattctaatagtagtcatttcgtggcacctttccaataaaaagaactattttgagggagaccaaataagtttggatgagatcatttttttctatataatcaggctcttaaagacttaattaagatataaccactgtcattagaaataaaattacttagtcaaaaagataagttactgttttaattaactaatctgaaaatcacacacgtttttatttggtcaaaagaaaaaacaaattaccctttttatttttaatctgaaaacaatattattcgtttctgtaaatttttttgattttttttaataattaatattttgtttttaaatttttcaatttactaatttctaccactgtaatatatgacttgttaatattacctctcgaaatatagttattacaataacgtagttatggatatgatggataataattgaatgcaaatttatttttcacacttttttacattaatgaataatagataaaatgtattttatatttttaataatattttttattttattttttaataaaacattcactgcatcactcatttcatgataaaattgaatagaatataataaaaggacaaatttatcgtaaaaattatatttcgatgtgtattattaacgagttgtatacaataaagacacaacttaatagataaaaaatgcaggggcaaaaatattattattcgtttatatataggctagttatgatttttgccttttgaattttgaagtagaccttatcataccctctaaatttttaactattgagattgttgaatttaaaaaattttgtccaattttaataaggaaaatctaatataaatgaaagttcagagatataatttggtacatgtcaaagtttgagaaacataatttagtagacattaaagtctagtatatagataatcatcgaattatcaaaattgaataaaattaaacaaaaaattttaaacccaataattttaataattcaagagaatttttaacaactaaaaaattttaaaaacataatttaatccatataaaaaaatttaaggagtaaaaattatatattatataagcttaatatccttgggcaaatattggtgtactattactatttcggctaaatataaaggaataataatcacctgttttcaacattttacaaagggaaatttgaatttatatgcttaaataattaaaaaattttattattataccaaaaatttacactataaaaaaa

SEQ ID NO: 113120 - DNA, 1786 bp, Cannabis sativa
  modified_base (28)..(44): a, c, t, g, unknown or other
taggatgttaatcaaacatacttgttannnnnnnnnnnnnnnnntaaaataatttccaacacttctatatgtgccttccccttgaaaacacaaagatttcaagagtctaaatggaaggatcgcaacccttagcagatttgtttctaaatcgacaaataaatacatttcgttctttaatgttctacgtgaaagcaataagcttgaatggactgcagaatatgaaggcgccttctaaaaactaaaagagcatttagataaagctctaattttgtccaaaccgattgagggagaaccattgtacatgaatctggccgtgtctgatcatgctatcagctctgccctagtgtaagatgaaggaaaggtaaaactttcagtgtattacgtaagtaagatattgttgggcacaaagtctagatatccactgatgaaaaatctttctactgcttactaattgtctcccaaaaattaagaccatacttttaagtccatgccatcaaggtacttacgaacaaccctctttgcaaagtgttacaaaaattggagtcctctggaagattagtgaaattggccatggagcacaaccaatttgacatttattatcgatttagggtttcaatcaaagtccaagccctagcagatttcattttagagtgtacaggaattaacagaaatctagaagagccagttctggaacttgaagactagaatgtttatgttaacggagcatcaaacgaaaaagattctagagccagaatcattttaatctccttgcaaggacatcaattccaaagtgcccttcggtttgaatttactgcctccaataacaaagaagaacatgaagcaatggttgtaggcctaaaattagccaagaaagttggagctcaaaatattgaactttatagtaattctcaattggtggtaaatcatatatccagagagtattaaacaaaaggtgagaaaatagtagtttacgtatccaaatctcgagagctacttcaaaatttcaagagatttacttgtcaaacatgtccctcgcttggcagatatgttggcaatgctcgcaagggatctagaagttaattttttaaacaagttaatttttttggtaaactaaagagtaattttataaaagaaaaaatcttaaaatttacttctaattttagcatacaataatcactttttttaattctttcacttaaattttacttaaatatattaaaagcaattataaatttatcttttatttaatatgcttttatgttattattttttgtaattttttaatatcttaaaacctattttagaaactattagtttagagctaaacgaacttaccacataatttattagtaaaatttatagacaacttaatataacaattagtttcttatgacaccgataagatatcaatgagttaccttttataaaatgcttcatttttatattatataatttgagatatattttagtttctttcaaaatttatttgtatacatcttaataatctgttagctatttttaggtcatattatagtatctaattatttaaaatacatttgagtaactttcaaatctatttttgaaattaataagttgtcatgtagaatatcatatatgtttaagttattggcatttttttaaatgtgaattatatttgtattttttattaactaaataaaaaataaatttataaataactttaaaatcattattaataagaggaatttacaccccatactgtttattctcattttcttttagatttactgttgtaaggaaaatatta

SEQ ID NO: 113121 - DNA, 4540 bp, Cannabis sativa
  modified_base (2460)..(2463): a, c, t, g, unknown or other
atagaaaaattaagcataaaaactcaaaattttctaattttaccaattcatggataatacccattaagagtacacccttaacttatattaattggttgtcaaaagttatacttatttttagatttatttgtaccgtaggtgctaaattatatggtggtgtttgattagaggtaatgaaatagaatagataggaaataacttttattctattctttttttgattttattttaaagtattagaatgtcattcttattctagctatgctttcattctttctaaccaaatgctagctaatgaggtgtttgttatgtgagtttgagttagagaaaataaagttggagggagtagacttagagggaatatgaaactcatatatttgaggagattaacattaccaccattttaatttaaaaggtgaaactaacttaaaaatacaaaccccttatcattcaatttaatttaaattttatattttcattctcatcaagtctaaatcttataccaaacgctccaatataggttttagtaagttggtctctaagctttatttttttgacaaattagtcctcaaactatatacattttgacaagtttacccctaaactttattttttggtaaattaatccctaaacttttattttattagcaacattaagtatcccactcttagatattgatatttttattattttttttatttattttacttattttaatttactttttgtgttaaattcaaataattttcatttttttaattttaatagtttgataaaataattacatgaatatattttatttctttatttttatttttaagtattcatacaatatttaattttttatcaaaatatttaaaatgtgttttattcatatatattatttaaattttacatcaacgctggtaaaaatttatgagttcgcctctgagtataattaaaaataaattctataatataagttacttggtattttatagatatatattattttgactacaaaataatattttactacatatatacatagatttcatattaagatattttatatattaaatgattttcctctcatggtaggaaaaataattagacaatctaaaaatttttattgacttatatatagttattttttgtgtgcatgcatattagctatttgatgataacgaatatttgcttgcagtgtagaggaattattcggtcttgaaaatattttgtgtaagtattgttcataagaaaataatttattggtttacttgtatatatagttttgtaatgttcaaaatatgtcttgatttgatttaaaaaatatatataaaaattaaaaatatttatttttcttcttattttagcatatttaaaaaaatatgtcttgatttatttttttcttcttcttactctaaaatattttaaaaaatacatacaaataaaaaatgtgcatttttttttaatttgataaggtataccaacataaaaatatttaaaattaatacaaaattaaataaataaataaaataccatcatttaagaaaggactttatgtttccaagaaaataaaagtttggggactaaattgccaaaaaataaagtttgaggaccagcttgccaaaacttatatagtttggggaccaatttatcaaaaaataaagtttgaataccaacttgccaaaacctatatagtttcggaacatgcagtacaaataagccttatttttactataaactcggcctcaacctgacctcagtcttgaaaaaccaaaccccatctctcgccctaagccacaaaccctggtctagactcaaacccagacccatccccaaatcttgacctcagacctaggtcttcgtttggggtttgggtctcgatctagagttaggtttgggagtccaaagccactttgggtttggagtcctagttcagggctagaattcaattcttggtcagggattcgggtcaggattcaagatctagggtctgagtttctaaccccaaaccctttttaaatataataatatatgttaatataaattatttgttatgtattaaataatacgattcacactgttaaaatttgtaatcgtattaagtaatacaatataaaattttatttaaatatattatatattattatttaatacaatgagagttttataagacctatcaaactagccataggtattattttatgaaatatacaccttatttttagttttgatgtgttattcaggaataccataccaaccaagttaccaaccaccaaccctgcctaactaaaaaatgccactttcattcctttactattcagctgacttgattgctagtggtggtcccaaaattaatttgtaaagtaaacttagttatacatttaattaatataatttaaaataaaaaatagaaaaattactttatatactatttttttaatttttttttaaaatttacggtttgagtttctaannnngttgcagcgctagttgcaacagggtttctatacaattttttgttgctattcaggttacagcgctagttgcaatagagatttctatatagaattccgtaaaaaagcaaaaaaaaaaaatatatcttttgaagtgtaaaaatgaaaaaactcctaaaaaataactagctaaatttaagtggaatgatgttttagcagcatcctcctattctagtggtcataagtttgaaccttatactttatttgtttttttaataaataaaatgtagatacagagaaaatttaaaacatcttaaccaattattctatttaaatactatgtgtatatataaaagtaataattgtatattaatttattttaatcttagattgggctttaaccctccctcaacacccctagatcataccatgccaatattatatatctgtggtttttgaaatttatacagcttaatactacaatgtaattagaatttaatggtgtaggcagaaatttgtttttgttttctattttcttacataagcagtttattccatgcaacttgtattgagaatccaattaattttttattccttagatattttggaaaaaagaattatccaaaatgctttcgattgaacattttttcttttgtaaagtgttttcaatctactctgaaaataattaaaaagtgctttcaattcaatcttatgttaataaagaacacaatgatcaaatggtgttgtggtgtgtcttacatcgcacatgcctattcttttttttttcttgtttaagaaactatatcttatttctttaaaaattattgctagggcctaggggtataattttttgtctttattcatttttgtttttagtacgtaaataaattaagataaaattatagtacacctcttaaaatgatattttagtagacactttcgattaggagtgttcataaaaatcgaaaaaccaaaactgacaatcaaatcgaccagaccgtaaccgaattttcagttccacgtcatcaccgaatttgacgatcggtttcagtttcggttcgtttgacatggcggtcggttttaatttttgaaaaaaaaataatttaaccaaaaaactgccaaaatcgctcaaaatcgccaaaccgaaaaccgtcaaaaaccgtacggtcacttttatacggttatattttctaaactatcggttacgattttcgtaaaataaaaaccgtaaccgactggtcggttataaaattataaaaaccgattttcacccctactttcgatattaagaagagttttttagtctattttttatgatcgtgtatgttatagttatataaaattatatgtaaatttttaaaatttttttgaataatttactatgctgaaaataaagtttaaatattttgttgcacaagcgactattttttcttgtaagtaactgtttaaacctagcttattttcgacgttacaaactatttagattttttaaaaaaatttataaataatcttaaatagctataacataacgattttgaaaaaaaaaggtaaggaaataacttttttaaatgtcaaaatggataaaaattctactagaacgatgcttaaagaaagtgtactactagaaatttttaataaattatacttcatttttaatttttatttatatgttgatgtatattgtaatgttttaggatctttcactaactttaataaaatttcaaataatttttgctatcagaaacaaactttaaaataatcaatttcatacataaatttcaaaacataaacacatgttattttgtacgttcatgaaataaaatgttttgaaatatattttaaataagagtatttattggaccacatcgaatgttattatgcttattcagatctaatttaattatatattgagtattagattttacaatccgatctaattcaattaattttaatcatccaatcgattcaacatttattatatattagattggatcagttctatttattggatgtattttatatgtatttattggtttaatttgagtttatctaatattttagacctagtattttttgaatcagatcagatccatctaatatt

SEQ ID NO: 113122 - DNA, 2324 bp, Cannabis sativa
  modified_base (27)..(45): a, c, t, g, unknown or other
  modified_base (88)..(114): a, c, t, g, unknown or other
  modified_base (2273)..(2278): a, c, t, g, unknown or other
agaatttatacattaaatataatcatnnnnnnnnnnnnnnnnnnnatgcaacataaaatgatttttggtctttattaattagtaaatnnnnnnnnnnnnnnnnnnnnnnnnnnnagggcacaaaacccaacatctgcagcagtatatggtttagtgatttcagcattcatctcagctgtaatagagcaaggaacaggagatgacttgctgtacaacatcataatcgaccccttcagaagtgaaaatactctgaaaatagtcttcaattacactgcttataccagaatgtgaagtgtgcacgattccatcatgatcaatgagagacttaatagtattagcgttcttcctactggttgctttttgatgaaaaaatcgtgtgtttgaatcaccatatttcaaccacgaggtgcggtatcgttgctaccagtaatctttttctggagctaacaactgttccaacacattctcacttcgtttcagttcttcaaaataagtaggagtaacatcatatgaattgtttaaagtagccacttttctcttgtgaaagcctaatcttttttggcaaatcaccaaatttggactgatgccatgtctgcaactgagaggcacaagcagtaaaattttcaaggatttgtttagcaggattagtgttttatttccaattggtaactatgatagaagaacgggactcttcttgtaaccaaagtcttttaaatctaaactgagatttgaattgttgaggaggattatgcagtaatgaaggaatagtagccttcaatgctctatggtcagattgaaagaaatccaagtgtgagataactggcagtgagaaattgtcgatccaaagggagttgacaaaaccataatcgaagtgctctttaacattgataccacgcgagtttttgttgtgccaagtaaatctatctccatcatagttaagttcttgtaatccacaaaaatcaacagtatttcaaaaggcattaacttgtgattcatgttttaatggtccaccaatcttatttaaatgagagatagtttcattaaaatcacccataacaatccaaggcatcaacggggcagtgtcctttagtttcattaagagttgccaagtcaagttcctttgagagacataaggggcaccataaaaacctgagaagtgccaagaagggccatcattgagagacatataagagtcaacaaagtttttgccataatttaaattagttacatttacatcaaatttctaaagagaaagaagacctccactaaaacctattctaggaacttcaataccataagaaaacttaaaagcattgcaaaatttagaaattgaaccaatactaagtttagactccataataaaaattacatcaggttgattttgagaaatgagcaaacgaagttgacggaatgctctcgagttgctcagaccccgagcattccagctaataataatcataacatttggtgaggatgaacatcagcctgctccaaagaagcattacttccatcaatctctgatgacaagttcgagaaatctaaggaggtgataagttgttcatgcagcaaggaactagtggaattagcaagaggagtggcttttgtacgccatctttttaacacattgtgaacattaccacctgaagtaaccaatttccttttagagaatagagacgacaatcggtttacattactagtagtatcatgagccaaagggacaacaggggtattgttactggtattgtccacaccaaggagagtagtaatcaaggttgagtcagagaaaaaggcccctggttgatgagtagcacctgtattattcagaggtgatgaaacatggatatatgtaggaggaatggccattgagataaccacagaattgctgactggagattatgaagatgtggtgcgtgtatcctttgagcaatctcctgattgatagtgacaagttgtagtcgtggtatttgtctcagtgttgcaatgtttgtcaatattgcaaaagtatcagtagtagcagcaatatgtaaataatcatagtttgaacttggtagttgaatatgtgtattggaggggctacaatcatcaggcagtgttagaaaggtgggttgataagttccttcagtagaacttccagcaacaacctttcctttctcgcggctagtgatctgtggaggaaaaacatgtagagatctttgaggaggaattataagggagattgtgttgtgtgcaaggcgagtaatgaaatgcctaggtttgttgggttttatgccctnnnnnnaactcatttcaatataatcagatgtacttattaatatagatcagaa

SEQ ID NO: 113123 - DNA, 1040 bp, Cannabis sativa
gtaatttttttaattattaatttttaatttaattaataatttttaaaaatacatatttttttgtcaataataaattatacgcgtgtcactaataccataatttttatatatatgtggagtaaaaaatcttaattagccttattgtacgtatgttatatagttatagatagataaatggcagccaatgagtccacacatcattttatcactctattaccaaacaccattcactcactcactcactccatagcattaatggctgatcatcaagctccgctcagctcaaacaatccaattcgtttcggaatcatcggatgcgccgacatagctcgaaaactagctcgagccatgtccctcgcgccgggcgtcaccctctacgccatcggcagccgttcgatcgacaaagcagagaaattcgcgtccctgattggagtttcgggaactgatcatgagataataaagctttatgggagctacgatcaagtgttggaagacccatgcgtagatgccgtgtaccttcccctgcctactagtctccacatccagtgggcagtgaaggcagctaataagaagaagcacgtgctgttggagaagccggctgctcttaatgtggctgagcttgatcagattttggaggcatgccgatccaacggtgtacaattcatggacggtaccatgtggctgcatcatcctaggacgatcaagatgaaagacttgatctctcattccaataaaacttttggccaaattaatttcgtaagtttgttaataattaataaaatgtatattgggattattttgaaaatttatattaagtagttagtaaataattttaacaattttattatctcaaaatagactatgaattctgaaaatttgattaatttcattgtagagatctatttgtttatcaacaatttgagtttatctaattgttttgcttaactaattaattacccacattgtagcaaaaaaaaatgtatatgtattttaactagttatatttataataaaatatgatatttatagacataatagta

SEQ ID NO: 113124 - DNA, 2944 bp, Cannabis sativa
aagtaactgattaagatttccattataagttattatagctaataatttttagaaaaggttgtttgcaactaaaccaaacacctttcttgttattaaatttaagaactctcttttaaactggtctaacattgttttgcaatgatgctggtgtggcttgtgttgatatttgtgaatatgatgaataaaccaaatgttacaatgaatgcgggatatcctgtaactgaatggtagcttttacaaataattgtaagcagaactttctgtttccttttttttactagggaataaaagtaactagcatattttcaaaaatccccaagtgttcagcagtgtggtcttttattcttgcatttggttgaatcagaacatggtcaatcctcatttctatgtatgtatttcactaacaatcacttaaaaatggttcaaatatgaaatttaaatactaaatttacaagataaatcagtattttggaggtatgacaaagaaacatcaagagtagaaatttgaccaaccaaaaaaaaaagatgatctctctgatgcatggcttgagctagtacatgaattgttttcttggaagtgttgaattcttttgattgttcttcccctggatattgcatgtaatataccatttttcattacaggtatatattcttctttccatatatttgttagaccttgtaaagtttaattttggcatggtttaggttgattgaaaatgaatatttgggtctgaaaaacggcatactggatcaatctgccattttactttcaagccatggttgtcttttgtgcatgaattgcaaggtaaaagttaaatgtgtgctagtctagacacgcagactccatttctttattattttacattcatgtgctagtttatttatttatttattctattggttgatgctattgattgtatttttccgtgcatgatttcctcaaatcaaatttcattcatttcagtttctttagtatcttttatttttcccattgaccattttccagaaaaacattccatggtaatctattcataagctttgcgatttcctcgtaaaattttgcatagttttttaaaattggcctctttgttcaaaattgaaataggtgaaattatgtttattagtgttgcttcaaatgatgtagtttgaattgttagcgatgtgcttctcataatctagtttgaattttgcagactaaagaacataagctcatacgttctcctgaattgcaaaaggaccaaaatattgagttgcagaaaacatacaaaatattactggcattttcaggcttaaagcatgctttaactaacaatcctggttataatcgtcgagtttcagagtgtcaagaggctgcaagaattcttttaaagtatgcttaatccctttaaatttaggatattacgttctctattttctcattgagttcatgggatcttttttctcttgctactccgttccttgtgttgatgggcctgggaagtttcttttcccctactttttgccctgttagtgataaaattttggtctaagaggacagtctctttctgtatagtgtatagattttagtggaattaggttaatgagatttttaatttttcatggggtttgataatatatgaattttgcgtgcatgtctaatacacatatgtatattagactaatacatatacattcatatgtttacatagatttatatttgtgtgaattttggatgtagcatgcaacttgcaacttcatacgagaaaacaaatcaggtctgatacatgtttatcttcttccacagtgcttcaggatttggagaagtggagcctcttctctcaaatggcaagtatttttaccagacaattttagattattgccctaatagctggataccaattggaaaacatcggttgtattaatactttgcgagagaccaaatctagattatatagattacaaaaattaagaatctaattctttggaatattgactacgtttctaaatttcctataattagctttatacattgatgatccttgttttgaacactttaaaggtgcactaatgcgactacgcaaactaaaaaacccttttaactctaatgcatagtgaacaattttcgaaacatacatatctacgtatataaatatatatatttcttgtatgcctcatcaacctgatttcgcttctatttatatatatttttttccatggaaacagttcaactggaggcctatcaagcacacaaggttagtactttggcattaaaagcttttcatgttttaactgtgtgacagaaacatacacatatattataaattgaagagatagctgaaatgggatattgcaattatgccttgcacatttcaggtcactgctaatacagcacttctgaaaaaaaatatgaatactatagaatttctattattggctaagcttgagcttgaatatatgttaactgccgcgaaaatcttcttaagaacttttgctctagtgttcaatttgaatttgaaggaaactgatgacgtacaattttggttttctgcttattaagttggttttctgcttattaagttgggatagggctggaagattatgtagcttatgtgtagctagagagtagttagaaaggtaggctagaatcaagttcaagtccatgtgtgagattatataaagttgccttttagagataatctaataaaacatgtaagaagactagtccttttttctccaagatccctgcttgtttctcaaatttaataaaaattaatatttacaaaaaagaataattgttttcttatgtatattgcattgaaatgactttttttttgttccatttttcagaagaattcattccactaaaataatattctaatactttaaaatttaaccaaacataaaaagaaaataaaaatttattccatccattctatttcatttcattactctcaaccaaatgcac

SEQ ID NO: 113125 - DNA, 1398 bp, Cannabis sativa
atccaacaacttacaatgaagtcatcactagacatgacaacaagaaatggaattaggaaatggatgaataaatgcaccctacaaagaataataagacatggatcattgtcaaaagaccatttggtacaaggccaattagtttgcaagttgatttacaaggaaaagaagggcatatgtgctgaagaagaaagatacaaggcaatacttgtagcaaaaggtttcactcaaaaagaaggcctaactacaatgaaattttctcacctgtagtaaaacaaaccacaattagaataatacttagaagggttgccaaagacaagcttgaggtggaccaaatggacgtgaagatagacttcttacatagttaaaaagaagagaaaatatacatagttcaacccgaggactttgataatagaaatttagatgaagtttgcttgatgaaaaggtaactatagggactcatgtaagctcccaggcaatggaatatcaagtttgacaacttcactactcataatggcttcaataagagtaagtttgatccatatgtttattttaatcaggatgtgtttttattgttatatgtggatgatattctcattgttgggaacgacaaaactgagatatcaaaactaaaaacacaatgagtagtgaatttgagatgaaagatcttgtaaaggctaggaagatcttaggtattaagattgatcaaagtactctaaaggtaataaagctcattcaacaagactacttgcaaataattctagaaaaatttggaatgaatgattccaaaattgtgtcaacaccccttacttcaaactcaagctatctcagtctcaatgtcctaagacatatgcagaaagaaaactcacggagaaggttccatacactattgtggttgaaagcgtcatgtatgcaatgttctgaactgggccagatctagctcattctttacgtattttcagtatgtatatggctaatctaggtgatgctcactggacagcaatcaagtggatcatcatgtatgttaaaggatcacttgatttgggtttgatctatgatgggaacccagggtctcgaggagaagtggtagggtatgtagacagtgattatacgaccaacatagacaccagaatatctcttataggtctggtttcactggactaggaagagctataagtcggaaatcaaatctacaaaaagttgttgcctttataaccactgaagctgagttcatggctacaacagaaaccttcaaagaagctttatggctcaaagatatctctcaggagttgggtttaaactctaaaaattgactatgtattgcgataatcagagtgccctacatataatcaaaaaatttaagggctttttcatttttacacttcaaaaaagttttttttt

SEQ ID NO: 113126 - DNA, 4565 bp, Cannabis sativa
taggcaatggtttgaaaaattctccaatcctcttgaagaggaaggctttacacattctgttactgatcattccttcttcatcaaacattcacaaataggtttcatagccttaattgtgtatgttgatgatgtgatcatagcaagtaacaacttgaaagaacttgaagctctcatcatcagattggacaacaagttcacgctaaaggatatgggaaaattgaaatactttcttggttagaagtggccagatctgaacaaggaattcttgtttcccaaagaccatatgctctacaaatttggaagatctaggatacttggggtgcaaaccaatgaatactcctatggaagccaatttaaagttgtgtcaagattctaaagatgatgctcttgctgatgctacttcatataggaaaatcattggtaaattgcaatatcttaccataacccgacctgacttgagtttttctttcaacaaattgagtcaatacttgggaacaccaagagcatctcatcttgtggttgctcaaagagttctccagtatgtgaagggcacaccaggtcaagggatcttgttttcagctcaatccaagatcaaatgggaagcatacactgattcggattgggctgcttgcccagatacaagaagatcgaccacaagtttttgtattttccttgggaaatctttgatttcttggaaaagcaaaaagcaacatacaatctctagatcttcagctgaagctgaatatagagctatggccaatgctactttagaaatcatatggttgctgtcaatgcttaaagagttgaaaattgagcacgaagggccagttttgatgcattgtgataacaaggcagcacaacacattgctgcaaatctgatctttcacgagataacgaaacatattgaaattgatagtcaccttgttagagagaaagtgcaacaagggataatcaaaacagctcacatctcaaccaaagaccaaatcgcaaatctactaactaaagctctgtttcctggatagtttaagaaccttaaagacaagatgggattgattgatgtctactctccatcttgagggggagtgttgacagttgatttattgtaattggttgagtttgttagttacaaaggttgttgacagttgctggtttgttgttattgtttgttactgctttttgtatttttttgcttcagtagcatataagctctgtggagctatcttgtatcaattgagatcattcaataaatattttaattcatttttctctcctaaaactaaaagaagttaatgaaatgaaataaaaaaaatatatttttttttattttattcatttgtttagtttcattttaaagtattggaatgttatgcgaatgtaatgatttttccatcattttcatgagatgactattctattttacaaagaaatgaatgaccatttcgataaaagataagaaaatttgaataatgttttttattattttttatgcattttaaatttgattacattccattcttattcttattcctattcttattacaattcttttattttcattctttccaaccaaacatcgccctaaatatttataattataaaaataaaattaataggaatattttggtcaatgtatcttttattccattacattctgtaaaattctctattggcatatttgataaaatagataaaaataatgtttacggtattttcaaaaataattttgtatttgtatttatgaatttcaaaaatatactctctttgctttgtatgaaaagtctctcaaatcaatttttttttttgaataaacataagtttttcttatttagattaattgatattatctttgtattttgaaggaaaatcatcattatatttatttgattcttatcttatttcttagccaaaaaatcgtgtacatgtgtatgaataaagattgtcaaagtttccttattttatatggaaactttgctgaaaaactgtcgaggttcaatgtacctattcgaacagacaaattgtatgtttaaatagattttgactttcttatttgggaaatcttttcatttattgacttgattttttcttagttctttgaccacaaccttgagagattttatgtgtataaatacacacttaggtcgttggcttcctttatctctcttggtatatcatttgctaaacttactttcaaatttagagagaatttatttattgtgtgaagaacgttagtctaacaggtacttaaatttttattattgtgttattatgtattgtttcttgttaaaattgtgcagtttgaagaccttggatatcgctcatcaagcttcgggagaagtcttgttcgtgagacacttttaaggaggaaaagtgcaagttagacactctttgggaggaagattgccagtgagtcactctttcagaagaagtgtgcaagtgctacgatttgaagggagatcaagatcttgacacttcagaaatttgattagaagaatagattagaattgttacggaaaattcaaaaagagagtctttatttatataagtcaattttattttgcaatcactttagattcatctaataaattttattctcttggagtggtcccgtagactaggagcaacttgaaagggttgttgataccacgtataaaatattgtgtgtcattttattttctattgtttaattctgttttgtcagattttgtgtctgatagaacaaagttcatttctattcaaataattttactacagttatgcattatttaaattgtttgataattttacttggtaattataaaaaagaatttaaattggtatctttttaccgagatttttaaaaactgaatatttagagcttaagaaagaaataacatattaaataatagacacaaaatttttacgtagctcaggcgttaactatccttagtccaaaagtctatttaaatgccactttggcaggcgaataataatacaaaccaatatacaatggactgaaactctttattcctcttgttccttttgaagaagaagaagattaataggaaattttttttcgtagagtttttaaataagtagtatatagtgtttatgtcttcaaagagtttccctatcatatggaatgtaggggaatttataagccaccttcccttcacatattggctagactgatcatacttagagaaaatctgatcgttcatttggtaggtggctgattcatcacatggtattcaagggtgtcagcttgtacagtccggtcatcatatacgtgttgccctagggtcttcccttttgaattgcccttatcaatggtcgtcgaatcactcaggcaggatcgacttggcgcgcaggctttgtactacgacataacatgggggacaaatcctgacaccgaagttgaaaaagcctcagctaccatgtgtgcagtctgacatgtacaggcagagcttccccgtgatacaaaatagggttacaattcatctagacttcttccacgacttatatgggcgctttgtgagaagaccttgtccttttcgggagaaattgacttcagtcctgtgggagcatttggcttcaatcctcggaactgggagagattttaaatcacagatgttacccgcagtgctgccttgcatgcggtgtttccttcatggaggcgctttccgcaagttagggctcccacgttctaagaatcattgtcaaaggtattgatcggccaattagcattgaggcttcctagattagagtccatgtgtcaagcttcagatatccatataacatttacccccaagcttctgggatgtcttatagttcgagagcttgaagtgtttctttactttctcatgattggcttccaacacatggcatatcttcaagtttttcaccatgtcatgcgagtggtcgtcatctgacgcgtcactagtagaagaaattatcctcgttgtacactgatagtactttaagtgccgactcttgtaattcacgcgcgtactaggtgcctggctggggaaacaccaaaatgagaatgaatccattaagtagacctttcatttaataagcactttttacgatgcatgctatgaaggaggttaaacgtttggaatcgatgaaccttctcaactccccatttgttaggttttcaagtgtcactttagtgaatgatctaaatcattttcttcttgtggaaggcacctcttcttgggactcaataaatagtcacaacgcccatcattttttgtttcaaatttttcgtccttcacaccatagttatggcacttgatctcctcttctcgcttgctttacaagacttgatcatttgaaccattttcaagcgtgaacataacctatcacggcgtagtagaaccatccctcataatacttttgttcatcaatcagtaagtgtcttttgtgttgggttttgtgccctaaataaaactcattctgatataataagatttactaattaataaaagattagaagtcgattttatgttgcatggctcacatgatttatttcatgattatacttaatgtataaattttatttaagtccagaacacatatataaa

SEQ ID NO: 113127 - DNA, 1775 bp, Cannabis sativa
  modified_base (1745)..(1745): a, c, t, g, unknown or other
ttgaaaaatatttttacttttctaattttaaaaacaaaaaactaattaaaaaaatattactaaacgcactttttgtttttaatttttaaaatttaaaaaaaaattacggcaaaaattcttatacaatcattttttcttatatatctattattacaatttctgtattgtatttatttagttgtattgtattgtgtatcattatttaaaaatattagcataaatgctacttgaatctctacaaaatttttagtgcaaaactttctaaattttacttctatcttgttttttactattctgttagttaagagttgttaagtgtcaaatagacatgtcatagtgtacacatggtaagtcatcgtaatccatgcattttaattattaaaattagttttaaaatatttaaaaagtaattccaattaaataaataaaaaatagttctaaatttataattataaaaaaatattctttttcttttttcttctacctcctaccttcctcattcagatctcatcttgatgaagctcaaaccataaaagattctggctcccaattcaacttggtatcttctctttcattatcatcatcgcattattcttcaccttcgtcggcttcctaaaaccgcttaaaggggcagtagatcttgtgcgacttcttgagatttcgtgacttcaacgatgggcttcacaggcactagccccgttctaaacgaatccatcttcacgcctccacctttggtagccccattccttaataaccacactcgcaaatcctcaatacccctctaaatcccccacacccacgaagttgtctccatcaacttccacaactacgatgccccacaatcgtagccccacctctgcgaagcccatctctgtcgacaacagggtctctggcgcaacccccaactatgatctcctacaatcgcaaacctctgagaacaaattagacatagagagaaagaaagagattggaatgatggtgacaaggaaaaagattgagagaggaggctgatgagatatgagaaagagttagggtgcgcagaggaagaagaagaaggaataagagaaagatggtctccatggttcaagagaaagaagagaaagaaaagaaagaaaggtaagaaatattttttcttttgtaatttatttttatttttaaatggtttttaaattttttaaataatttttactatatttaaatagttagaatgatctggaccgctaaaaatctaccacgtgtatacttgtgtacacattagcagtccacaatgacacttaacaacttttaactcatagaatagtaaaagcaaaacaaaagtaaggtttggagggttttaccccaagaatttggtttgtaaggttaagtgttacaagttgtataattcaggtagtattgttgtcaaaatccctattatttaatataatactatggtattgacttatattaatagattgtgtaaaattatactatctttatcataaactagacatcgatcccacctttccctagacctagtgccggaccccgggccctagacctgggacccaaaccccaacctcgacccgaccccaacccaatacctcaaccttgaccccaacctcaaacctaaccttacctcagacccagtcctagccttggactaagaccttgaccctgaccctaaccttgaccttaaaccctggcctggatatggtcccaatcatgttggaattattttaccaggaacttctaaaacgattataaanaaacacatataaagtatgagaaacgttaca

SEQ ID NO: 113128 - DNA, 1300 bp, Cannabis sativa
acagctcattattataatcatattttattagttgccgaaaacctcggtcaacacaacttaatatcaaaaatattaaaagtacgtacaaataaaaaaaaataattattatctaataaaaaaataattattatccaataattttatatatatatatatattactaatatggttgtgactatcaattttaatttattttatacaatattgagatttaaatttttattgtataaaataaaatatatattactcaaaatcttttgatagtattttttttttattgaaacaataatcatatatcaatattattattattattatcttttaaataatactaaattaaattacaactatcaaacttttattctattcctttaagaaaaataaattaattgaacatatattattttttttagataatataaaatataacataattgattttaagcccaattattttattatttgataatgaatgatatgatgataattttttttaacataatttatagtataatatgtaaaaaaaataaaaagatattatcgttattttattaatgaataatttgacgataaatgtaagtaataaaaattattaaaattaatggtgggatattatgagaatttcataataaatgacacaaactataatcaatgcgcgcggccataaatctttgttcttttaaaagttcacgtgtttttcttattttctttttaaatgggaaatagatcatgatctcagttctaaaataacaatactatcaaattttataacaaaaaaaataaatttaattgatgaatgattgatatcgtaccatgcattcataaaaatacaaaaaataaatgactgatatattatactatttactattatgataataaaaataatacaatacttagtaaattgtgagagagatcaggttttccttaaaattattagaagacaaactttcttggataaacctcttagcaactgctaacaatgaagtttgtattatcaatttatgttgttgaatattaatatgagacactcatcattccgataaatagatataactaaaaagtgagaggatgagagttgcggaaaaaattcaacataggtgaggaactccatcttaaattcctgaatacatatatattttccaagattaattaaatgataacacattttaatgtacatataacataacaccaaaaaaaattgaagataaccatgaaaactataatattgaataattataaaaatcaaaatcacaatagtcttttgaatccgtttcaaaaaaaaaaaaaaaaattttctttt

SEQ ID NO: 113129 - DNA, 5406 bp, Cannabis sativa
tatacaattttatattttcgtatacattattgatatttgcaaaaactcagtttttcaatttacaaggttacaaaaatcttcacaaactctcagagattaggggaagacatttctctctctagtttagactctctcactcaaccttatactatcacgatttacactcaagcaattatggtttgattctttcactgattataaagattaaaagttatttataaatttgtattgttgcctaaaatagttctaagaacattgtggcacatttacactgccttaaatgtttcaactcattaccagcaacaataaactacgtcagctttgataacccgatttcggtacagacaatctgaaagttttaacacaaacaagctatctagatacatacaagcgctccttcccggatgaacaaccaagattgatagtaagttatccgaaagtgcatctcgggactaatgacaagctatccagagagacaattcatacacagtacaagctcatctggaaatacccttcgagttctacaaagtcttccgcgcaagaatttttgaattcacatcaagcttttcgaatctactctccagattcacagcttcccttccagatgacaaaatgtggaaccataatcaataaatttctaccttagtttcaagttgaagtcgcttgaaaaattgttgttataaatactgttcttccccttagctccttcggactgaggtgacttcaatcagcttcaggcaatgctcaaacttaccactcggcattatcttggttgtcatgttagaaggattctcttccgtttggatcatagaaatcgtcacagcttctttctttacaacttctttgtatgaaatgaagcttaaaatcaatgcttaatacattcatggtgcatataattcttggttaattgaattgcactctaattatcacaatgaacagtaataatcttctgttgagtttcaactctttcatcaacccaattaatcacagtgcttccttgattgcttccatcaaggccataaattatgcttcagttttcgaaagtgccacaaccttctaaaggtttgctttctaactaatagttgttctggacatagtaaacacatatccagttaatggtatcaatacaccctacataattaaagtccacgtaaccattgataacatcgaagtcttcattctagttattcatgccaaataccagtcccttctcaatagttcccttcaaataatgtaaaatccattttagggcttccaaatgctcctttctaggatttcccatgaatctactcaccatgctcagtgcatatgctatgttcggtctagtacagaccataacatacattagggagccaacagtactagcatatgaaaatctcgacatttctgacttctcagtttcatctttcgacatctaagtaacacttaatataaagtgttgtgcaagtggagtactcactgccttagagttattcatttcaaaagtatctaaaatctttttgatgtagcttatctgaatcaagtgtagtagtctcttcttcatttcccttcttatgtccatgcctaagattttactaatcggacccaaatccttcatttcaaactctatctttacctagagtttcaagtacttgatctcttgtacacttttgctcgagatcagaatatcatctacgtacaacaatagatacaaagtatctccatttctttctcaaaaatatatacaaggatcaaactcacttctcctcagacctatcttggtcatataatcatgaaatctcatgtttcactatctcgagcattattttaaactgtaccaagacttccttaacaagcatacccagtgttcctttctagcttcttcaaatccttctggttgtttcattagaattatttcatccagatgtccatacaggaagacaatcttgacatctaattgttctagtttgaggtcttgtcaagcaataagtgccaaaaaaattctaattgatttatgcttaacaattgaagaaaatacctcattataattgatttcttccttttgagagaatcccttcgctaccaaccttgctttatgtcgtgtctcttgtacacctggaatgccttcttttcatctatacacccaataactttaccatcttccgacattgatattacatcccaagtccagttctttttcaggaagtgcatctcttccaacataactttattccatttcttcctacccttacttttcattgcttgtgcatagttggtaggcttttcacgcacaatgtgattagcaacgtgaaataaaaatgcgattaaatcagcatgtctgtatccatctagagcctttacttctctttgtgttctgtctctagacagtttataacttttcagattatcacttctgaaatcatcttctaaatcaccactgctgtgatctataagtgtttcagtctctactcttattggaggctccacctcaagctcagttctcgaagctttgattcatttcatgtcagtcttggcttaacttccaacaagtttgtcaataaataccataacagattcattaaaagtcgcatccctactaattatatattttttcattctgggctccaaacaccacagtctatatcctttaacttcttttggataccccaagaaaatacactttaaggccctcacttcaagtttgtcttgcctgatatgtgcataacagacacatctgtatacctttaagtgttcataacttgttggcttccctgaccacacctcatttggcgtcttgaaatctagtgttgttgacaaacacttatttatcaaataaactacagtggacacagcttccgcctataacactttgggcaatccagaactcaattgcatgcatgtgactctttccagaatgattctattgaacctcttcgcgagtccatttttttgaggagtcttcctcacggtcttgttcctagctattccttctttcttacaaaacataacaaactcttcaaaacagtattccagaccattattcattctaagctgtttcacttttcttcctatttgattctcaatattagctttcagtacttaaatctttcaagaactttcatctttatctttaaaataaacacctataaatttcttgagtaattatcaacaatataaagaaaatacctacttccagagtgtgatagtgttctcgagggtccccatagtcactgtgaatgtaatctagtgttcccttggtattccttttgtcagtaccaaacttaactctacaagccttaccaagaacacaatactcatagaaatcaaactgctcaagctttacttttccaagtaatccctgcttgtttagttcatacaatcctctttcactaacatggccaagtctcttgtgccatactttagttttatttatgtgcttgcttgaaacacatgcttttgtgttttacattgtagtgctttctagaggataaatttcatttgatttccttcccctcatcaccaccatcaaacctctacaaactttcatgactcccttcttaatttaacaagaaatccttgatcatctatcaaatttcttttgagatcaagtactagtcggacgtccttcaacaccctttccacaccatcgtaacatttcaatcttacggtttcaatccccccatcttacaagactttttatctctaagctactaatacatagtcccataatttccaaatataaattctttgaaccaagatttattcagcgtcatatgaaatgaacacccagaatccaagatcatttcagaatctgaattctctgaggttgtcagtaaagtaccagttgagtcataactatcactactcactgttgcatccccttttgatcttgaatcacctgtcttatgtctctctagacacgcccttctgagatgccctattttcttgcaaattcaacatctaagattcttcaggccaacaaactgcgatttagatattgattttacttttgaacctttgtgactttctcttttctcacttctgccccttgtaaacaatccatcacactatgagactttgcaagggtgtccttcttgtccttttcaaacatcgaataatctagaagagacttgtctcttagtagagcctcatacaacccttggtgaaccaacaaagccttcatcttcatcctccttaatccaaagtccttcgtaccagtaaacttttcaacatcatatttcgcggcagtcatgataacaaactgtgctctaagaccaattttttgtacgaaatggaaacaatcaatgacttacgatttagtataccagaccaacaaacacgtaacacaatcaagagatatcaaaattcaagtaatgaattaagtagtaaaataaaaaagaataacatcaagtttaatgagtttgaaccatgtgtaatgctctacatctcagtcggaacaacaacaactatatctttattgatgttagtgtttacaaggttacaagaatcttcacaaactctcaaagattacgagaatagatttttctctccagtttagactttctcactcaaccttaaactatcacgatttacactcaagaaataatggtttgattccctcactgattaacaatattaatagctatttatagatttgcattattgtctaaaatagttctgagaacaacgaagcacatttaaactgccttaaatgttccaacagtaataaaccacatcaactttgataacgcgctttaagtacaaacaatacagaagttttaatacaaacaagctatccagatatgtacaagtgctccttcctagatgaccaactaagactgacagcaagctatctaaaagtgcatctccgaactaatgacaagctattcgaaaaaatacggttcatatgcagtacaagcttatttagaaacaccttttgagttttacaaagtcttccgcacaagacttttcgaattcacttcaagcttcccatgtctgctcttcggattcacagtttcccttccagatgataaaacttataaccataattaacataactaaatgatattttatatttaaacttgaagaagctaagttatttttatctgttacttatttatttatttttaataaattacattaatttatctaattattaaaattttattaagtggttgagacttgatagctattaattgtaatacaagcaccacaaattactcatattggagcaatatgggacaaacaaacaagttttttttatgtataaataatatcaaaaatgatatttacccaattatcaaaacttaagacatagtaactattaagtataagggtatatagcggcataagtacccaaagttttgagtttataagtggcataaattcaatgattttttttagtggcataagtacccaatgtttgta

SEQ ID NO: 113130 - DNA, 3783 bp, Cannabis sativa
tttgataaaataatgagaataaatcgataatataaaaattgatgagaaataataaattaatctacgaaatacatgtgaagaagggttggtgaaaattgagcgaaagataatatttttactaaaaaatagtttttctctagatctcacttcttttgatcttctcgggtttagtattgtacgaaaaggtactctttgtgagaaaagaaaacgtgatatgtttttaatgaataaaatatctattttgttgtataaaagacgaagaagatagattgtcgtctgtatcgagtttaagataaactatttgccaaagcatataccaccattaatggacgatcttataataaaatccaaatcttaagaataaaataaatattgaaacgaagtaaaattttgagagaagacttacagaaaacagattcaatgaccgaacactcgtattctgctaattacttttgtttctgtgacttgtttgaaagagaaaggtcttttatttatagggtaaaagtgggtctaaggggtaaacttttaaggaaaaaatatatattatgttaaaagaattaccatataccattaattccatatgactacaaaggcctccaattttaattatcgtcgttttaatgatgggcccatattataatcgtatgattaaaaatttacctatataaagtagactatatgattataccacattacatttatggatggtgataaaatttatagagagaatcctttttattatttctctttggtaaccttgtataattatttgtcatgtagtaattattcttggttaaaaaatttatgctccaaatggaaaattacattaaaattttatgttattgtaacatcaaaataattaatattagttttatttatttttcaaattatttttattcctttttttaatttactatttttgaacttttatgtccgataactaatgcttgatttatgtaagcactatgtaataagtataaattgtgattgactatataaagtgtatgtagatatttcctattaatatattgtattttcatattttaaatgttatatgatattattgattttttaatctaaagttttattcttcactttttctttgtgaagattttatttaggacctattagtttttgttgaagtgttaagctctgataccaaatattttaatttgataattaataaccaaatgataactagtggaatgacccttatttttacaaataagttgacgtcgttactattttcgatgtgagagctaaattaaaaataagtaagagatttttaaattttttatttaatttacaacgaacatgaagttattttaaattagtacaaaatattgcttacaattattacatatacttatttttaaggtgtagtttaatttataaaactattcatgattagcctagtatataaattaatgcctacatatgtattcttttgagtaaaaaatttttttggatcataaagcttttctttgtctattttttgtatatatattttatttttcttaaatataataatattatttcaaggcttatacatgcttattaataaattatctggtaatatagtagtcaaaattaactattatcaattaaggaacgatatctcatatatattatttataaaaacatgtaataatgaattttgaaaaattaacattacattcttagtatttatgtatatattaggtattgtgataaaaattattataataataatatttttgtaatatacataatttatacaactctatgtttaatatttttctagtttcaaataaatagggttgagaagaaagaaaatataaaataattttagaatttatataaataatataataaaaagaattagaacattatactatagtgattttatttatatcacttagtattataaatacgcagtaattttaaaaaaaactgaaaaaaaatactacagtattatcaatataaataaaatagataatataaataaaatcacatcaataaaaaatacttatttaaaaataattaaaccgatattaaattgtatttttttgtatgaaaggattaaattgtaactattaagtaatcttaaaagagatttgatggaacatgttacttttaaaattatatggattgtttacaatcattacttatgattatttgaatgtatggtttgatttattaacactattcatgattagtttagttaatatattaacttcataagtattcttttgaagaaaaaaatattttttatttatgatttgcctttatatttatatatatatttttttaaatttcgtatttttagcttgttttttgtttgaaaaatttaaacattttttttttcggaaattccccataaaaaaattgcaatcctatttataaatagtcattttacataccatactctataatcactaattatagatcatctaattataatcactattaggatctacaattcatatttatttaattttctataaatttaaataaatgtatttatatatatatttctctattttctttcatgaatatattttaacattttcaatctataattgatataaatatatctacatattaattaatatgttttaatagataatttcacttgactatttgcaacaaaacaccctaacaccatgtttatgattgggaggaagaaaataaattaagagggatggaaaattttggaaagaaagaaaaatatgaaggtaaaaaaaaaaggaaaataattttcttttatgttgtttggtaaacaaaaaggggagaaaattttctcatatgaaaattaatattttgtttatataatttatattttaatattatttgtgagtgtaatttaataaatttacttatacaattttgtctttttttattgaggagttttattttcaccctgtaaaattataagtacacttcattttaataatttttattttttatatatataccctttaaatttgtacctgtttttttttaaaaaaaaatttcttcttcgtcatattctaaaaaaatatacctataaaattatgtaattttcttactattttcgtgttgtttttatgaaaaaacgtaaaaatgtaaaaaaaaaattctttaaacgtaaaattatattttttttttacaaaaaatagtaatgtaattattcttattttttttttccatttccatcaaattttctcccataccgaacacactcatttttactttctctccactcttctctctcttaaattttctttcctttaatttttccaccacaccaaacatagggtaagtatatttttttttgtcacaagagcattcttttttacatgaatcataagaagttagtctagtttttatttcattaatgcatcaatgaaaatgtacacaatggaggctaataaaataaggccaaaaaaaattagcttaaaattaaagtttttgaagtgagtttggagtcttaatagtgttgaacttccaaaggcttcttataagattgcaacaaaagtgaagaacaaaccacactaagagaggaagccgccatgcaagcaccggctagccaaggtggcaatcggattcctgtaaaagggtacaagattcccgccgcaattggcatcccgaggatgttgtagccgagggcccaaacataattcaaccgaattctagacatagtctttttggaaagatctatggccgttacaacatcttccaagttgctcttgatcaaaactatgtcggctgcttctattgctacgtcggttcctgcaccaatggccatgcctacgtcggctg

SEQ ID NO: 113131 - DNA, 1039 bp, Cannabis sativa
  modified_base (95)..(99): a, c, t, g, unknown or other
tgataagatgaaccaaaacatacgcaaatgaatgaaaaatacttctgtttctttattgatgttgaataaaatggattacattgaaatagagtttnnnnnagggcataaaacccaacataccatgtatcggggagcttggtactggaccttctaggcaacaaatctgtcagtaggaagctccctcgagttcaggaacttgtagatggggcctatctaggaattaaaacaatccatggtggcatttaccccctgcattgcaatacttagagtttttaagtggtcaacaagcactactccaaattatgatcttcaggtctgtggcaagttttgttaacatgaacgcaaatgaatttttatcccatggaactttgcgggtgttgtagcttttaaaattttgtagaagttcccgagatatcatcacataggtagccatttttttgcctttggtctaatattctccagaaatctaatttaccactagcttgagggagtcaccgtgcacttcaattcattaggctccaatttccttagctaatcgcaagccagccaacatggcttcatgttttgcttcgttgttggaggcagggaattccaaatggagagaactctagagctaatgtccatgtggggagatcagtatgactcctactctggaccctttgttatttgaggctccgttaagactggtgactccatgactggcttttctaggaggtcattcaacctagaacattccaccacaaagtcagctagggcttgacctttgattgacacacttggctgatattggatgagctcattttagcagcctgctggatgactctatcttttgaagcacttggataagaggatatttttttgtacattaatggcgtggcttggaagtagggtctgacctttctacaggcaaataataagtaaaagttaattatttcaatcatgggatacctaggttctgtacccagtagtctttcgtgttggaatattattttagcaggatcttagatctactcacaagtatgttgtttaacaccttaaa

SEQ ID NO: 113132 - DNA, 5357 bp, Cannabis sativa
atcacttaatgaagctagctcaagatcgcatcagattattcgactggtatgactgcatcttatcacctcaaagttcatatctcatcacttgataactactttttcttacatcacaatattatgatttggttttctctcagataattgaaagctcaactcgcgagtttttaggaagagacaaatcgagctctctatcagctacagtggtaggactaattttttatgcatgtttatgtgttagttcaagaagataacagagttacacggttaaaactggtttgatttttatgctattatgcgtacagaacttcgttgatcttgcgggaagtgagcgtgcatctcagacattatctgctggtgcaaggttgaaagaaggttgccatataaatcgcagtttactgactctaggcactgttatccgtaagctaaggtcagttaaagtaccatgcactgtaaatgtggtatttctctcactggggtgtaaagctgttaagatatttaagatatttcattatgtttctagctaaacgcctgttttcctgttgatgtgttatacagtgttgagtctaaatcattatctaccattttgaattttctcttttctactaaattgatgctctagcttttaaatagtttttatatgtgctgctaattcctaaaatcctttgagacttaatgcagcaagggaagaaatggtcatgttccttacagagattcaaagctaacccgtatactccagtcctctttaggaggaaatgctagaactgcaatcatctgtaccttgagtccagccagaagccacgtcgaacaatcaagaaataccctattgtttgcaagttgtgctaaagaagtggcaaccaatgcacaggtcaatgtagttatgtcagataaagcgttggtgaagaagttacaaagagaactggctaggctggagagtgagttgagctttacaggatcaacaacggcttcatctgattcttctgcattattgatagagaaagaccttcagattgaaaaggtaaaaacaaatgagattttggaggaaagattagcaaaatagatcatttaacacttgaattttctcaaaccaagttgagccattgtaaatctatgaacataaatattaggacatgattcatgcaatagagctttcttgctgaagcttaaatttatctttctctaattttccgctcatgcagctcaagaaagagatatcagaggtcatattgcaacgtgatgctgctcagtctcaggttaaagatttgctgcggatagttgaagaagatagaagatcagaatcggtatgtgtagttacttatgcttgagtgatctagccttttcaccccacttcatctcttaagtttattccttgttgatactactttaggtggatctggatcagtattaccccaagttgcgagtgagaaattcgtgggattttgaaaatcgagcaccacggaccctagtttttgctggttctaaaggccttgatcaccataccaaaaccaattcgtttgatacagatggacagagcaatatctctgatgatagctttttccaactgcaagactttgacgaaaattccgttcccacggattcaccctctccacacttgtcggtcagaataccaaatttcattccaaaatttgttgaaattgatatgccagaggaaaataaagaaaattatgatagaaattcagatgacacttgcaaggaagttcgatgtatagaagtggaagagcaaaacacaaacagacacgttgagtcaaacatatcatcatatacaagcccgaaaagatctctaaactcaattgtgtcatctcccaaagaaaaagaagctatttcagaattaacagtggttgagaatggagatgtgacgaatgaagaaatgagatcacctaccttgatgaaaaatgaagtttcgaatagcttcaaaaacagtttgctaattccatcttcagaaagaccatctcaatgtttagtggataaaagtatgtctggcttctcatgctgggagctaactaggagcaggagttgcaaagcgcgtttaagttcacaatggtttgatacagaagaaaaggatgagagcacaccaccagttatagtagagagaaatttcacaggaagagccgggggtttgccgaagaaagttccccaactgaactatgatgtgagcattgaaacattatcaacaaatggttcatcagaagaaatgtcatcaaacaatgattcgcagaagacattattgataaatgatcatctaccagaaacgttgtcagtgaatgattcacagaagacattattgagaaatgattcaccagaatcgttgtcaataaatgactcaccagaaacattgtcaagaaatgattcacagaagacattatcaagacatgattcgcagaagacatcattgacaaatgattcacaaaagacactatcaagaaatggctcaccagaaagaaatgattcacagaagacactattgagaaatgattcacagaagactttatcaagaaatggttcacagaagacattatcaagaattaattcagataagacattatcaagaaatgattcacattcaacgtctcatacgaccctgtcaattgatgattcacattggacgttatcaacaaatgcttcattttcacatacgaatttatcacgaaatggttcaccaaagacattatcaagaaatgcttcacatgcatctgctttgactgattctgttgatgagctcaaagtacaggatatcaaatcttcacacgatgatgagaatactaacaccagttcttcatctagcagagtagaggaaacagaggattaccctttggagaaaacaattcctgattctgaggtttgtgtactaccactttagcataaactgtctatgcatctaataataactgcttttgaatagaaataagttaatgtttattttatcaatggttgtctttattaacaggtcttaaagacagaggataagctcatagttcctgcaagaaatgtaaaagatgtcggattggacccaattcagaatgaagaagtgggaagtcctccaaagtggccttctgaattcaagaggctccaaagagaggttatcgaactctggcatgcttgcaacgcgtcattagttcacaggacttatttcttcttactattcagaggtgatcagactgactccatttacatagaggtagagctgagaagaatgtccttcctcagagacatattttctcgtggcggtcaaactgtcgaggatggtcgaactctatcttatgcatcaaggtagataactcaatgcctggaaagttgtacattttattaagcaaaacatttaacaaatggaaacttatttggttatataacctttgtgaacagtgtaagagcactatgccgtgaaaggctaatgcttgctaagcaattactgaagaagctctccaaacaggaaagagagaacatctacctaaagtggggtattgcgttaaacacgaaaaacagaagattgcagttggctcatcgcttgtggtccagcacaaatgacattaatcacatcacagaaagcgctgctgttgttgtgaagctggttggttctggagagccagaggaagcttctaaggagatgtttgggctcagatttacgcccagacgaataggcgataggaagtattatggattgaaatagggcattagccttcaattctcttctcttaactagttctggatcagatcacctcaccctttttaatgtcttgataataataataatatattttgctgtagtagatagatgagtatgatttttctggagaaagtagttttctaatctcgaaaaaagattgtaaatgtccctagttagaaaatgaccacataaatttgtaacatgatccttttcttgttgaaaaatatgagtgataaatatatcttcagttgtgagaagaacaagaacgttgtctgtgtctttggaaatttatttattttgttttattttttgggacttgaaaattgttttcaacgcctacttggtaactcttactctaacggatgccttgtatttgtcattaatttattttattattattattcgttctctactcttaattgtacatgaaacttttcctttgatagatatgctgcactagtacattggagcaacaaagttattcagcaaaaatttggtaagtatctctctctttctctctcgctctctctctacacacaaaaaatgactgagtttgattatagattttgtataatttggggaattggggtgttcatgtatgcagcttttggcagttatttaattagggtagctattatattgataatcaaatatcatgttgatcacaaggtagtgaacatagtaagtgctaattgtttcttcgtaagtggtgttatatttctcatccctttagctcaagctttcttgagaatacttttggcttgttgggaaaatctacagcacttattggcaccaacttcaagatccaataatattggttgttgttctattgtgtagcatcaaacaaataatattggttgttgttctattgtgtagcatcaaacaaagtatgggatgctcttttatctggttaatcactatgaatttataattatggctaaaagcattttatcatttggatggaactaaaacttatggtgtgttcagaagttctaacacaatgataatcaaggggtactctttcttaattatggatgttgtccattaatttggaaagaagctcgtgtagaatatttagggttttatttcgagttttttttttcttttttttttttctatcaatggaaataactgatcatcatgtttagttctttgtttagaaaatgaagaattatctatatgtgatatactatttgaattaagacaacaaaattttgaattgtcatttattattatcattgtatgtcataaatcattattttttagcaataattgtgcaaagatgttcacaatatcatgatgaatttatttaattaaggcatgtgggtaatccactataaatatttatgcaaacattgattagaaatgcgcacctgaaaaattagactacaatccatcaaaaataacaaatttaaagattctaagccattaaaaaatgaagaattcttttaaaagcttataaaatgcaacttttaaacaaaatatttgtgacagtaattccgtaatctgtaagggggaatatcggataagctgtgtaatctcacaccgcttgaagaatattgtgatgattccgaaactatgtggatatgggactacatagttgaagatggcttaaataaattgattggtactacttatattaacgaggtgcattttgttttttggtagcccatca

SEQ ID NO: 113133 - DNA, 5062 bp, Cannabis sativa
  modified_base (29)..(45): a, c, t, g, unknown or other
ttattaaaattagataaaaatccttaaannnnnnnnnnnnnnnnnttcagggggaatttttaatggccaaaaaattcagggggcgtgatttagtacatgtcaaagtttgagaggaaaaattgttaattacccattagaataatagtttaggtcatttgtaaaaaatgaaaattcttatgtaaattagtaatatgtgtaaatatttttttttttatgtataagtgtaaatgttagttaaaattatatgttagaaagttccacatgggatacggagctatctttttaaaaagctataagaagtgatggcagaatcttataaatattatgctcttgattagtagtcattgttaaacgagatatgaaatgtaattatatcattgaaagttcagtgctaaatagtttatattaaatttcatggaattaataaaattggctagatttgtcgagatttttaccaccacaatcagtgaatagattgcaataactcatcttaaaacaactttgttttcttcctagacttgtatgttcatcgaaatatacaaatgtatttttctttttaaaggaaaaaaattgcttacatataaggtaaatgtgatgacttttctatattttaaattttgtcattatttccttacatatagaggagctccaggcgtatgcacctagaagctcgcaagacccacgaagctttgctataataacgagtggctagtttgtttgatatttaggggatacccgtctacttcgcttcaccaagtggaccccatgtactttaattgtttgtttgctactacaaacccgacccataggcccatacctttctcgattgaagccataagtagtagtcggtgataggtgcataatttgattaaagaatattctcactatttgtgtgctcaacccaattcacccgattgagagaggaagagacgattagatagtaaattggcatatgttcagaaacatgacaatgtcatttatctctctagttataatctttatcgcagtctataattttatcaaatttacaaaggcacgtctgaatttaaatttaattagataccataagtcgttatctccttcccataatacatgtacgatgcatttgtaatagtactatgaaaatttaattttttagcacaaaaacaacgatatttaacgatgtatttacaatagtgtgaaaacctaacttttgacgcaaaacaatgcatttggggtggtttgcgataggttgcaataaaatatgggttggtaatacataaattttcactagaatgttcgttgatgctattgttttaaattgtttaagtctcaaacattgttatgcttgttcgtacacattttaaacgtacagatctctaaaaaaaacgaataaacaaacaaatatttgagtgaaaagttatatccccaattgcattattttgcatcaaaaatcaagtttttagatcactatcgcaattttaagtattgttttgtgtcaaataaataccaaaatcagaaaatataagtaaatgttttaatttttatagcatcatcctaaatgcgtttaaaattccggaagagaaaaactcccaaaaaaatcttgtacagaagtgttcaaaattcataaattagtattttaagtaaatattactatcgttttaaatttcgaatcattaaaacaaaaaaatattagaaaagaaagaaaaaaaaccttgatgggtgtttggtgatgtatgtgttatttcagatgagaagaactttaataaaaaatggtctagacatttttgtttaagtgagagaaaatggtagagattatgcaggggggaaatgggaaaacttggttagaatgcatattgttgtaacaattaagtattaaagttgttattgggaataaatatagcatatttcatcaagttttccaatacaaatgatcagctaacatctaattagtgacaattactcccacttcatagctttaatctctcaaaaaataattattaatattagttgataatgataaaggatccaagagtatagataagagaaactctaggtcatagaaaataatgcatatttggtaccgtaccgggatacatcttacatatcatatcataaaatgtcgactttccccgtaaaaagggaacgacgtgtcttttttcctcatattagagaggggcgaaactacataaaatactaattttaatgaggtgtcctctttcatttagtagtaaagcatctacaactgttacgagacaaggtaccatccaccaaaacaagccaaaacccatgtacctgttttgtacagagtagcaaattcatggtcacacgatcaaattctacttggtttcagtgacggggaggtagacgccttccgctgccaaccaaacattgtctggacgcttttctgtgacagaacaaacctgtacagattcatttaagttgttagaaggaaactttatatgatattactcgagcaccaaagtttgtctttaacttattaaaagaaaatgacaagcatagacaaaagtaaataagtgtagagaggctatacacaatagcataatatttcccaactagtgaatcgtatgcattggttcttaacgagtgaacctgctactttcttgtttaataaccaatcaagggaggtactttgtgacaattaaaatgaatccattgtctacttctaaacactaatttcattgtttactcacacgcagaatcaattgagatagctaatgctattgtatgtttttttgttcttacctcctgctgtcctccagctatgcgtgtatactttttgtcatgactatgtagaaaggcacctgtgtcaatgtgctgaaggcgaatcctttggttttgcttccacgtcttcccacttccttcgactagaagcctgtaacatattacccacatttgccatcaataacaacagagagatgactaaaccaaacctcccatatataattaagttttggtctcacctccaatgatcaccagtgtcagactcattctccccaccaaagcagcttacctgtaccaagcatggtgtacatttcacttagtcaccaattcacagaagaagaatatagaagccagaaactatacatgacatccactagtaattgtggatgtcatgtataaacaataaaaggtgtgaaactgaaacatacctcttggttgcctgtaattggggatgcgtgcaaatggctgtgtagccatttcctagtccgcatgtgttgcaacctaatgactgtgccactttcgatggaatcaccttgtttagcagaagtttcaggtattggcctaacaatctgcaatacatatttactgtaatgagtatattgttttacatgttctttcaaagctccacctcttacagaatacatcattaaaaaccatcgagatataacaatcagtccaaaaaaacaatcatggataaaagcggatgaaagtagacttctcacaagacaaaatcaatcaaattagaagtagacggcatgcagcatgctcattaagaaacttaattcataaaacaggcatagataaagagcaggaattaagtcaaagataaattaacacgaataatgctttctccaaatctcaatataaaatcagcattatctcaaagtaatctagtatttaatatcaaacttctgaataattattatttattttattttaattttttctcttaggctatatttggaagttggattttgatgaacaaagaaagagataagaaaaatgtaggggaaacaaagtgtggagaacaaaaaaataaattactttttcaagtttgatatgaaattttttgttgaattgagtgtttttttatacaatttttcattccataacaaatatgggaatttatcattttatatttttcacattctccctacctttgtctttcctcaccaaaatcaaaacttccaacctaaatgttgtgtaaaatcataagatcaggtcatcaactagaccttcctgatagcagatatataataacctataacaacactaaaacaaacgagggaaatttataacataagtttagcacaaccagagaaagaaaggaagtacccaatagctattggcatcatcaacgttgggaaaaccagtaaccgattgttgcccactgccagaaccatatggcacgtcatgcgaatgcaagcgaaacttggtcttctcatgcatcagcttaagcaccgatccataagtgatctgatcaaaccaaatcacaaacgcgtaaatctatgttttaccaatttaacaccagcactaatgagcttcagcattttttctatgttgcctctatttgattctgattaacaaattctatctccgtataaacacaaatttgaagttttgtccaaaattaaaaataaataaaaacaaacctcgacaccctcagaagtggccgcagtagccgaggaaacgtagttgttttcgagatcgaggttaaggaaaaggaaaagagcgagagcaaagaaaccaatagccatgacgaatagcaacccaatgaaccagttctgttgccaaaaaggaagatcagactgagaagtcgatctggattctctaagaacgacccgagtggacccagctgaaggtggagaagaagatgaaggggaagaagaagtctttcttcgagtcaaccccgacgatcctgaggaggaagccacggtgagcgaaacaagggaaaagatcgaattttggtatggagcactgtgaatttggggatcagagctctaattagggattttgatttttgatgtgtgggtttcgatctggtgtggttgaccaaatggggtttgtgaaaggaacaggaacgggtttgaaggtgtagagtaaatgagttgacacgtaggatgacatggcagtaaccaatgaaaccattccacgtggaatttgaatgacgtggagttattttagtggactgaagtaagtgtgctttacaaactcttttttatagggggtgttcatcaaaccgctcaaaccgctcaaactgtccgcaccgcaaaaaaaatgcggtttgaaattctttacggtgcggtcgcggttcgaatttttcttaaaccgcgcggtg

SEQ ID NO: 113134 - DNA, 1966 bp, Cannabis sativa
aggttcatctatatcatcacaaaagaaataaataaacaaataaaaatagatgtctatgaaaacacaacaataaattgaaaaagtactttcttgcattttctctacatattaaaaaaaaaaaaaaaaaacagtgaaataagagaaagaaagggaaaaagtgttactttctgtgagctaaagacaaaattaaaataaaatatatagaatatcagaaaaaaaccaaaaatgaaacgacggcgtacagggaaagtagagactattggcagggtcaagtcggattcgccggcgtggagggagaagcgatctagctacagacgacaccgttttgggcttcggtttggaactctcactcacaagatgtcggctgctctggctctgaagattattattcgaagacgaagacgaccccgtttgaccccccgattgccaaaagggacagagtctaaaaagcttcgagtcggagtttgatttcgagtggtggtggtggtggtggtggaggtggaggttgttgtcaacgacggccatggagaatcagagatacgtggcagcttctacagcatctgtcactgaacttcacgtgtctttctttttgtcacactagaattttcactctaagaaggagaaggggaaagaaaaaaaaaaaaaagatgtgtgggagggtagaatttgattattatatatactggaaattagaggtagttccactgtatgtgtttagctttcgcttatcctccagttgagtacgtgtcgtgttttgatttggtcatagtaatgtcgttttctgtttgtgaaagttacgtggcgcaccttttagttgtcgttttgtagatcgctaaaataagaagccaaatccgaggactcaccgtgttcgattttgcgaattaccatcgcttgtccacttttcaaaccatcccttgttgattgttagtagtgctgtaaatatggggtcgggttttcgattaggttttttaatgacgcataaaattagcacgagtatgattagcataggcaaagccaagtgaggcagttgcacacgtaaaatttaactcgttctaaattatttgagattaaatcgaattaattcctttttttttacatttatacaaatattaatctaatcaaatattattaaattgtattgtttagtgtagccttaaatctatatgtaaagtttaagttggtatttaaaacttcacaccttcgctttactttttgtattaatgttgagatttgtacctaacaataaatttaaaatctcattatactaaagtttattttaacataattatttagtatttatattttattatagtcaattctataattattaattcttaaatgttgaagtcctattaatataagaataaacattattattaaataccataatttttaatactaccatgagtggcatgttagaattttatttgagcttacattaattttattagttttattagaatgtgagtagattagatagttttttgttgtgttaggccatattattagtgatcaatagttaatgaacttagcactatgtgtgtaaagtctagttgaagcagaagtgtgaacttttttaattaactgaagtctttgatgagcaggtcaagtacaactagggttatgtagctaagtctcctctttaactctataaatacatattgtctcattacaattgcatactcttttaataatcatataaataaaactactttctcatttagaaacctaaggagaaaaactttattgatagtattgcactatcaaattattgtaattattatggatgaatcagctatgtatacctaattattaaaaattattactgtgttcgatatcatatacaaattagcatcttgagttatttattttttctaaaatgtggtattaaattgccaattatatattattaagacatataatttgtgtaaaaatttaatatatttatgttaatttttatcaatta

SEQ ID NO: 113135 - DNA, 3943 bp, Cannabis sativa
  modified_base (1322)..(1325): a, c, t, g, unknown or other
  modified_base (2362)..(2368): a, c, t, g, unknown or other
tagttttagtcacaacaagtattgtgacttagaaatacatttagtaacaaaaaattgtgatttttgtgactaatacttttagccacacagactttttagtcacaacgtggaagtgataatttatgattagtcacaagttttttccttttagtcacaagtttgattaattgtgactaaaaataattttttttgtaatgagagaaagaaacctgttataaaaataattataaaaaagtctttatgtatttaatgcttgtagaaaatgatgtgaaaaaaaaaattaaaaatgtatatttatgggaactaaaaataatagagacaaataatcaataataaattaccataaaaaacatttattaccataaaacatcctaattcaaatatattgattgtagaacaaaaactagaacacaactttaatacttataacaatcgaaaataaccaattaaaaggttgatcactatgcaaaattaggattgaaaaaaaataaataataacaatttattctaaatatatctcccaaaattaaaaaggaataagtataaaaaagatcagttaaaaataataaaatataatatcagatcaggtatatatatttaatataaattaattatatataataaaagtaaggaattaattcctcatcaaaaaaagtatggattaattacaaaaatgtaatgtttcaaacaagacataaagaaaacgatcaacctaattttgaaccatggattaaaaaagaaacatttcttgatcaaatgatagataaaatattcaaaccaatctaaataaaaaatcaatattctaaacaaagcacaattttatctattaaaaaatgtaatacaaataaaaacctaaaactacaagattcaagtgtaaaaaaaatgaggatccatcaaaaaaagaagaaaattgaaaggaaaaaacaaatcaaattagccaacaaaaaacaaatataaaactaataaggactcatgaaggaaaattaaaagtaactctcattctaaaaatgggagaaatgctctctgaacagttttcaattttttgggaaggagagttgaaaactgagatagagacgaaggcctgttttatttttatgccaccctacaaaaaatttaagttggctaaaaaataaaaaaatttgagaccaattccaaagtaaactacaaatttttcttacctttaatcacaataaaacttatgactagttatgaatcattattcttttattgtgactaaaatatccatggctaaaagtattagtcacaaaaatcataatttgatatgactaaatgtaagtgttgtgactaaaattaaattagtnnnnacttgtatctaaatactatgttttcgtcacaagtaactttttgttgtgactaatattcatatttaatcacaaaaaatttatattataactaaaaattgtttttttttttgtttttaatattgtaagtattatttgaagatctaccacccaagtaaaccaatttatacaggggtagacttacatagaagcaagttcgggcagttgcccttctacataacattaattagtcttattgatgtaataattaaactatatttatagacatatctttggcctagctatagtgatagtgacaattccacatttcatctatacgttgatgagttctctaccacactctctcaaccacttttggtcccattattaattattctaccaaaattaatatcactaatcatagatatcctttaaatcatttctattttgactacttccaatcattattggttttaggtcaaaaacactattctcttgattagtgcataattagttacaattttgatgcaaacatatttcagtaatgttaaatggcaacactattgttagcactgcactataatttttttttttttaaccgtaataaaatttaaggttaaaagtaaaagaattataattaattataaattattattcatatattattattaagtatttcgtattagctagtgagaacttttatttaaatactttcttttatatattacttttttaacaaaaaaatattatatattagtttcacatcaatgatcatgagaaaaatctaatatcttgtattgtcatcacaaaatttatgtttcaatccaaaaataattaatagatttaacgtgttcccgattgactttatgaacccattctccaaattattaatgtgactttacgtacttttacactcaaatgttcggcatttattactccaatagagaaatatgccaaaaggccatgcgtacaactgtccaacatgcaattttagatttagaattgctaaaaggtatattggtgcctaacacttcgttgttatattgttattggtataattnnnnnnngagtcttatataacttaagaaaattttaaaatatagctaaccaattataaagcgccacctataaaaaatgataagtaccactgatactcaataacaatgctcttttagattacattatctagaactctcttctcaattgcgtacacgtattctagaaatgtgtagatggataaaattctttctatcacaaataattcttgccacatgtgttaagggttagatagtagctaccaagcttcaataactttattatgtcaagctatccatatataacacttgtccattgaccattataagtgcaccaactactcaaaactccaatctttaatctttttgatactatcttctatcaataagtctcattactttttacatggatcttcaactactttctttcccaataatcctcatcactatagtttttatgtttatggtagtcaaaatagttttgaaaagagctcatcatcaaacaaagaactcagtttcaaagctacccccaggaccatggaaattaccattagtgggaaatatacaccaaatctttggctcttcaccccatatttcattcagagacttagccaagaaatatgggccattcatgtacctcaaaattggacaaattccaactctaatagtttcatcaccagagtatgttaaagagatcatgagaacccatgatgttgtttttgcatctaggcctcaaactcttgctgctcagatcatggcatataattgtactgacattatattttcttcatatggtgagcattggagacaactcagaaagatttctatgcaagagcttctaagcccgggaagagttcaaacttttcgaccggttagagaagaagagttgtgtaatcttgttgaagggatcatgacatcttcaaaagatgggtcacctatcaatgttactaaaatggttacaaaatgttcttatggcatcacatctagggctgcctttggcaagaaaagcagtgatcacgacgagttcatttcgattgttgaggaagctattgaggcagctggaggctttgaatttgcagaagtgtttcctgctttgagatttcttgattggaaaagtcgtcctatttttgagagcatcaaactaagatcttcaagaataatggaaaatatcatcaaggagcatataaaagagaaggaaatttcatttgagaaaattggaaaggatgaagatttggttgatgttcttttgaagtttcataagaatggagatgatcttgggcggttcaccctaacaaaagacaatattaaagcagtaatctttgtaagtttttatcaatatcaacttcttcatattttattatagttcatataaaaatttatatatgtatataaaagaaagtaaaaaataaaataggtgacatttgatatgattttctttctatttttactattttgtaaagtttttttattttgtaaaaaaaatttgatgataaatattttataaataatctaacattgtttagggtgtgtttggaagtaactgtgtaattactaggtaggataattactagggtaataattacacagtttagtaattacactatattt

SEQ ID NO: 113136 - DNA, 1131 bp, Cannabis sativa
tgtcacaatataatttttaataaaacgttacttatgactgaaaggtagttttaattatatacaagttgtcattaattacttttagtcacaacaattattgtgactaaaaagtaagaacatatttagtcacaataaattgcgattttcgtgattaatacctttaattaaaaatatcttagtgataataacataagaatgttgatttacaatatattaatcacacaattttttttttttaagtcataaattttgttgtaactaaaaataaaaaaaaattataatgtatattatattataaaaaaatgtgaataatattatatttaattataattaattatatacctctcttagaaattggttgttgcagcagaattgacaatgatgtcaatattttggaacatagtttgtgtcatcaaattattattaatacctaagtcttcaccaacactaatgtctccacccacagcttcaactttttcctttatcaaactatcaaactcatcttctccccatttttcttttagtaccctaaacaattccttccccatcacctatacatacatattattgttattagtaattataattttgttgttataaattaataatataatttataagcatatatgcatgcatacattataatagagagtagagtaaatattattttaaattttatgttttacaaaagttatcaattagactttttaattctgtattttttaaaacaatactaaatagtacattgaatagtttttttgtcaaaataattcttaataataactcgatctaaaagtgttatgataaaattgattatattttcctatttgtaccattttgaaaaatataggattcattttgccatttaataaaaaagaagggtctaaatcaattatttttgttaaacaaaaagtctaaaatagtaataggcaatatagaatagtaatacctcagtatgaagacgttgttgagctgagttggtatctgaagctcttagaagaagatacaacttcttctaatttggctcactccttaatattttctctataaaaactatatatatatatatatatatatatataacatcaaatctttttttatatatataaatttatgacaaatacaaaataa

SEQ ID NO: 113137 - DNA, 9472 bp, Cannabis sativa
ttgagcaagagagagaaagggagagtgaagtggtagcagatgaaccatggctgccaccacatccatatctctatcaccaccagatttcatctccatgctccaccacaaaccttgtctatttcttaaaccccataagcaatccttctcacccataaccactttctcatccaaaaagactcaaactttccacaacccacttctcaaaatcagaaaacaaaacaacccaatttggagaatttatgccacggccggtgaaattcctccattagaagccaccccacttgagacttctcagcaaattgtctcctccaccggggacgagctcactgccaacatcatttctgctcttctcatcattgcctttgttggtctatctattgtcacagtaggggtaagttttaattttcctccgagctgtattatagcatgaaaatgaaaatcaagttgtgattttgggctaaatttgtgattttgtgaagatggactcttatagctaagttgtaggtgttggtggatttggttttctggttcaggttatctacattggtgtgacggatttcttgcagaaaagggagagagataagtttgagaaagaagaggcagctaaatccaagaagggtggtaagaagaagaaggtaaaagcaagagctggtccaagaggattcggccaaaaaattgtagaggacgaagatttttaatgtaatgtgaatgtgatgattggtgtgggaaatgctccaagtaagctttttcattccgtttgtaacttgtaattgaagctttcccacttttaaattccttttcctagttcctacactttgagtatagtcaaaagtattttaaaaacaaattgttatgaaagttggaggatttggtttggcaaatttaagttgataacttagaagggtgaaggtgaactactagtgttcatttttgggaacattaatgatgaaaacgaggcctagtattagcaaatgatgatcatacaattttcggcttaaaactttgttttcggttgtttctttgtgtgataataatatggcttgtttcgcaatatttacaaggagtgaataatgatgttttataagacatcattcatgaccatatgcaacaatgaataataggataataaacttggttggcccgcaaagcctaatgttatataatatataccataaacttcaaataagtataacgcgaccccttcattaattttgtattttgtagtaaacatatgtatatgaaaatttatgatattcatggtattatattaataacatggtttgtgttggtatagtcgtatagatatatattttgtagtcggaagtgaagataaaagaaaagaaaacaatttaaagaaaaaaatacaagaagaaaagcatttgggaagataagaaaattgtgttatcaaaaagaaaagtcaatacgcatacattgaaaagaaactctggcctctctcacctaaaacataaacagctctccacattgaaatggaaacatttgtacagtcacgttaacgtaacaaactacctcaacatcttcttatcattttcttaatattttttttacacccttaaaaaaagaacttgtatagttgcttatctctgcagggtatctttatcagtgtgtgcgctccacatctgatgaaacctctgacctttgctcgatcgattctatgtataaactttttaaactacacaatgtacaattttgtttcagtacaagcaacatcttttttcttttatttccaaataggctctcaatacctgtcttgaaagataggtacacccattcttgctcctaactaccgggggaggacgacaacaagagggaatctcacactagcctcagttagctgtacaaacaactttctttcctaagccaccagtgcagcagggtgtggagactgagctgcaattctcctttctgtaaccaaaaacaatttagactatcaatttactagtgtgttggccaaaatggcatctatgaagcactactatattacatgttatgtgagaattaccgcatgcaataaaaatggtatatacccacaaatgtcaaataatttaaagaactcaaaagcttatgcattttaaaatttatgggaagaatgaatgtacctccagcagcaacaagtttctctacacgtgcaacaatatgcttcccataagtgtatttcttcaatgcattcaaatgaactttaatacgcgaaaggatcaactcgcgttgttggtcatcacaagtctccaataccttctgtacgacatagttggcaaactgatccttcatcattgcctgcattaacacagacagttgagtagagatggtcgagcatattcattgagacggacaaaaaagtagtcaggtacacatattgagacatgcaacaattaacatattaaactaataaatgcattatcttacaaccatattttgatttcattgttgatgttcctaatccagattcactatacaaatccaccatatatttaccaagttggtttcacatgccgagaagataaaagttatcccattcaatcttgattctcacaatacatgtagagttatactactaaattgtgtctaggtgtttccaaaactaaccacctgaaaaggatggtatacatattaacaggtattatacaattacaaacgggtcaaaatatgtaccttctactataaatttatcacaacttttatgcttgcacggttatgccaactaggctaaacaaaaagtaggtagaataacaatatcaatgtgacaaacctgaagaggctcattttcatcagtagagccaagcatttcatttactaataactcacgttcagcagggccaccaaatgttaaacatttttctacaacattagaggcaaacttctgttgactcattataactattttcccagctaattccttgatgatggcggaacgctcatgaggttttccatgctccagcacatgctgttaacagtaagtagaggttacaacacgaagcttatgagaaaacagtaagaatcatatcacagaaaaaaaaaactacagcaaaacaaaaccaaacagaagaactaaaaagttatttcccatctcctatacttcgatgactaaattgactttgcaagaagaattttcccgtaaagttgctcatacgaaatagaacatcaaaatacagtttaaaccaatctgtgaatattagagtaaatgagcattcatatcacaactaccagaggggaagataatgaacctgaacaacataatttccatactgatcttgagctaacatgctaacagctcctaaaatctcatccatcactttactctgtgttgttggatcctcacaatgctccaggactctctgccaaataaagaaatcagcataagcaaccaatttactgtctggtaaacaaaagatgaagtagaaaaagcttaggaacctgtatgacgcgacacccataagggtgagtggatagtgtaaccacttgatcataaaaggttgaaacaataaactgaattgcatcttcaggaacacattcaatacacttctggatcacatggttcccgttctgatcacgaacacagcgcatgatattaccatcaagctccttgaccattttaatcttctggtccaggtcaacaacttctattgcctgaaaaattagcataaggcagatcaggtaataaaattcatcaattttagctaaacatagcacaagcatcttatgaatcagatcagcaagtaaggatactaaccacaacatagttaccttgaagttaaactcttgaaaaaccaggatatacgaatgtcagaaaaaattataataaaaatattagcacataactgagctaatattaaactaatccaaacaaattctagcatatcatgcaggctgaagcacaggctacaccagaaacaacaaaatgttaacacccatcaattaaaataatctaccttttggatcacccgacagccatacatttgaaggcttagtgtcaggacatggccaaaaagcttgttcgctagctccctcctttggtgtgcaagcccatgctcgaaaaactgtatgaaaaacaccaattgtttttatcttttgtaaaataattataccaattagaaaagcacagcactacaaaggaatgaataaatagaagtaccttctgaataacataattgccaaatacatcagtcatcaaagcaagagcttgaggcatgatttcctgataaaccatgttcttctcttctatggtggctgtttcaagtttttgttgaataaagcgactcccatattgatccgcactgttaatcaaatagagatgacataaccacctttggaacagtatcataaaattatactataaaattattaaagtacccacctgaactcaacaacatgtccagaaatttctgaaagttcaaatgatttggctttattactcttgaactcctccagcagtgaggatgcaaagctttcatccatgttacccccatccagatgccaagctcccatgacacccccaggcaagttcctcattccagaaggatacctcatattaagctcactatgcctcataggactaccaggaccaacaggagaatttggaacaggacttccaggataagacatgccaacaccatatgtagaattcccatagtaaccatgattattagaaccaccagacttcccacccaagggaacaccatactgagatttctgtggcgataagagagatagatatgctttttgaagttcaagtaaattaacataggaattacccaagtagctcctgtcagcagaaggatcattaagggcactaagctgtgctgcagcatactcagatgtcctcatgtactgaagatacataggatccacaaaaggggactgaagagcacctcctcccattggactccccattctaccaagattgtgtgaatcagatgcagcagctgctaggttttgtccagaagtcaaacctcctccaagcactcttgagtccattacaggagattgcacagctgaagccacagcaccgttatcataaaatggtggcacattaccactaccaagttggctagccatcatggatgctaatgcaggattcatagaatatccacccaacccataactagaaaacgatggatttgtaccatccaattgctgatatggagcatgtaagccacctccaccattgagggtggaagtaggagaccccttcaagtaagagttgcttgaagcagatttgtgaagatcgattggcttcctcatgtctgacccactcccattgctcttccctaagtcagaatacaaactttttgctgattgttgattagatgacatgtgcatctgcccagattcagacttcttgaggtagggatgttggccgttatgattctcaccaccttgtaagccaaagagataattctgatgactatcaacatcttgtctcatgtgtgatgagaaatgattctcatcatccatcacaccgtttgttgataagttcattccagacaaagcagctaccaaatctgcagactcgttagtgttagatgagacaccattaaaggagtttgggctagtaatgcctctcttctctgagacactagtcctccctccgccaataggtgtaagacaaggactgggagccctagcaacaagttggggatcaggagtagtgcttcgggacaaggaagcacctagagcagcagcataactatatgaagactgttgacccttactaccatttgcaccatcagaagtcctcatttcatgatgcaaatgtgccagatcagcttcagcagagtttacgttgtctacattttcctcaaaagcatttcggcttgcagggcgagaaggaagcccgccagcaggacttgctcgccccaagtcatcctgcattgacagcaaacttaaataagcatgatctaaaatacagtagaaagaaaaaaaaaataaagaatacactacaccataatgatagaattggaaaggaataaaatagcaaaattgcaattagtctttttcaaaaattcacatgaagaaccacacacgcacttcgactgcatgcaattttttgaatgccaatttatcaaattgatcagactcttttcaaagtacattagttagatgcacaaagggctacataaataaccttccaccaatttcttaaatcttaaatactaattaagatattcaaaatgtacctccccatagtaaattgtcttccgctacatgttttatttcagaggaaatacacacacacacacatcatgaagtttatttacagataagcttaccagtcaaaattcactcaatgtcaacaacatgactacacaagtgttgacaaagatctctgtgtaacaggaacaaaaacgttaatgggtgtaaattcctttaccagtttaatacctcaaagattggcccttttgaaaaggaccaaatccagtttaaataagccattaaaaaaaaaagcagtaatcgaatcattgtcataatttacataagataacttgactatggacaacaaaatgtcaagaatcaacaaagagtcaaaacatttttgctatttataaacaacagatgcatccgaataaaaataccaactttaactagacaccaatagataatctcacatgcgaccacatgtcattaataaattaccaatatttccagaaaaaaaaaattgcagtttgttgatgacaaaaaaaatcagttaggcaataagcttgttaaaagcagccttcgatactcaggctatcatgaagaataaatgaatataataacataaaataagagtcaatatcagtatgaaaatacagttaaagattgagcaggaccatagaataaactgacctgaataatttcagcaaggctcttttgtttgctcccaagtcctaaacccggtaaaccaatcagtccatcgccaccccactctcctgaggcacgtattttctccaactcaaactctccctcttgtttcgtcgagttgaaaccaggcggcatcgaaaacatcgatctaccgctgttatcatcagctctatttccttttcttctgtctccaatcccccccaaagctgagttccctcctttcaacctttgggaaaacctccaatcctcctttgaaagcaaaggaggtggtaaccgaggatttagattaacattcgtgtaatagtaggaaagataagctggatcagaccttagctcttcctcagagacaaaaccattgccattcttagctgcagacaactctgcaaaggcagcagcagcagctgcagcacccccacctccaccgccaaacaatcctcccacggcatttaaagagccctcaacagttggaggagctgatccacttctacacatattcagctcacgttcacgatcatcggaggagtcttgccgccgctgctcccggagcaacaaaccaatctccttctctagctcgtccccaaacgatccctcgttacctccaagcattggccttcttcccaattcagacagcattatctttaaagaaaacttttttacaataccataaatcaaacaaaacttaaatagttctaactaaacactacccacataaaaacaaatcagacccagattcctaaagtaaattccaaaggaaaaaaacttaaactttaaggaaaccccatatttacaaactaagaatttctccctcttacccgatcacggcccaaaaattatacaacacctttaagacaacccagaactccatacacccaaaagggaaaagaaaaaacagttgcaccacacaaaaactgtgtttcttcttcttctccaaaaatttccctaatcataaattattgaaacaattctttgcaacatgttctcatgttaaataaacagcctaaacaaaaaaaaaaacacagaagtataacaagaaagatgaaaagggaagtgagaagtagcgagctgagatcaaaatagaagacaaaatgagaagatatatagagagatgagacacagaacgtagtaagggctatttttgggtttacaaactaaccagaccggcggcgattggttcttacaagaacccttagggttttttccaatttgaaggagaggattaaatacagtgatgtagttagaaagaaatgtaaataattttattttattttattttttgttattacaaaaattaaataagctaattgctcttattcagttcactatactttattaatattcctatgaaatagggtaattgaccaagtgataatagaccaatgttagtaataatataaaaatagaaaatagaaaattattttattttaattttgtgcatgtaaggtaaaaatccaaggctgacacgtaaactctttagattcggtgctacttatataaagggcaaaaaaatatttagtgaaggaaatcaactagatactagtacaggtaatccttttagtaaattatcccaactaccctttctattacattattttcatattagtgtaacattttttttctggttttcttgtccctttccctaatccaaatgatttaaatataaaaaaaaaaattgattttaaaatcctctaattgattccattcattagggttttgtatttgtattccattttatattttatctttttgcatgattttatttaggacataaaaagaggaatttaaacttggtatttcattgttcctactatattgattacaaatacaatggattatatgtgtgatttgtttgaagaatcccttcaaagtttccacaaatgatatcaccttcaattgtgacttaagaaaagttgatgaaccctaagaaccaaacaagttgattcttaataagattgtgtgtcgtgataaaattcaaaaagaaaattattaatggctctttgaaactggactataatagcatcaagaatggaaagaggaaggagttgaatggagagattctccaattcatgttcaggctaccttgaatgtgcttattcacagactatggtccatatgtggatgatttctagttgtaacgtcgcagcctgttagattaatctctttaaaagtgtggtttgacaaaactcctatttaggtgaaagtaaaaagtatccccttttcttttggaacctattcgatctaaataacttgagtttcaaagcagctatgatgtaatcttcctccccgtcaaggtcagcttaaccacaaggcaatttaaacaatagcctaagacttcacaaaatttaagcctagattttaaaggtaatatacattgttttttatatatataatataggtgatatacattaaaaaagtatatgaaaaaagatttcttcattcaattaatttgaatattaatattcactattagtagtcaacattacaattcaattaattttaaatctaaaattttagaactattaattaataattaataatttttttaataaaaaatttatatataaaacaaatctaaataatatcataatgcttccttatatttatatttgttataaatatt

SEQ ID NO: 113138 - DNA, 12341 bp, Cannabis sativa
  modified_base (63)..(85): a, c, t, g, unknown or other
  modified_base (8647)..(8651): a, c, t, g, unknown or other
atcggtctcgggcattcctgctgaaccgctcttccgatcttatattaataagtaaatctgatnnnnnnnnnnnnnnnnnnnnnnngggcataaaacccaacaaaactgatctaagcgctgttatgcatgaaatacatgaagaattttgtagagatcatactttcgtaccgagtttgtccaaaaagaccatccgccaaggatacttttggccaactatgaagaaggattgcattgaatatgtctagaaatgtgaacaaagccaacgatattccaaagttgctagagctccactaatagagataaccttgatgagcagtttatggccttttgctgtttggggaatcgatttggtaagatcacttccaactagaaaaggaggagtcgaattcgctattattgttgttgactacttcattgagtgggtggaagttgagcctaatacagtgacttccaaaatggtcatggacttcgtcataaagaatattgtatgtcgttatggtcttccacacaaaattgtgtctggtaataaaaaataatttgataatcaattcatcaccaccgaaaccaccatcaccacgacgcaaacaccactactcactaccacttcaaccacaccactgtaataccaccaccaccattacatttattagatccaatttaacctaaaaaatacaaataaaaacataaaatgcaaaaacaatatcaaatccaaaacaaaaccaaacaaaatatcaaaatgagaaaattaatatacgaaaaaaatagaaaataaatagatctgagatgtttgatctcatcatcgatgagatctgaactcgtgggtatgagatttgagagtttaggaactttaatggcggtgccgacaactatggaagcttttgaagacaatggatctgggcagagggacagaggaggagcaactgaattgaaaaatggggaaggttagatgacaactggagctccgtgatggcgaccagatatgatggaccttgtgtgggacctctaagttcctcaacaacgttgatgagattttcgggttgagaaaaactgagagagagagagagagagaaatgagagagatattggcgagagaaggagtctcagggttgtgagtttcaagaccaggggatgttaattctatggtctatttggatcgttgatggcctgaggcgaccattagcaggccgagcaggggctgcttagattaaggcaaatagaattgaaggaagtattgtggagcacgaggttacataggtgaaggctattagttttttttaatgaattttttaatttataatattatcatttatctttaatattttttattttaatttttttttcaaatatttatttacttgagctaataaaattgtgtcatgtatacactatgtttatgtgacaatacactaagtacacatggacaatacaacatgtcatctaacagccaaaaatggatgaaattggcaaacttctaagagcatttccaatagaggcaacactaaaagttgtcaaaatacacacatcatgctaaatattattattttttattttctctctcatccacacaagatttgtcatagttgacaactctaaaagttgcctaccatagttccacatcacatatcacattgacttaatgactttttaggtcaaaaataactttttctaattataaaaattaaaaaaagaaaaaatatatcatgtggctattgtcattattgagcaatcattaacataaaattaaagagtattgatattggacattaagtgccgcctcacgattgattagtgatattatttaaaaactattttcttaagttatatgtgaccgatacttaaatatactaatagtagtatgatactgaagagggtgctagacactaataatattgtttaacaattctttaaaattaatcttaaaaatagaactatattgtatatgtggcaagaacactctaaaagataactcttattggagatagtttaacatagtaggggttttgagagttttggtaaggtggcacacgtggaagctgtgtgttattatcatcattcatcatcgtcatccatgatttcctgggaaacggaacccttgtaggttgtatccctttttcctttctggctgtctgccgattcaattcaattcaattcgattagtgagtgaagcaagcaagctagctcagatgaactctttgactataaaaccctcttttccaccaaaatctttactttcttcctcttcttcattttctttctctcacttacattcttcgatttggttcccggttaagccaaaatatgtaggaagaagattgactttgaagatccaagcttacgattcttccaatcctaatgccgattccaagcccccaaatggagctctggtatttatgaaatttctgtcttttttgtcttcttaatatggatgtgctagctttactttgccaagttggatttttttatttttattaatggaatccaagtaaaggttacgaatcaagatgattatgagaaaaagaatatgtattatcattttccctgactctgcttacacattgtcttggatgaaattatacagccaaatagtaggagagaacttctattagagtacgtaaagaatgttcaaccagaattcatggaggttttcgtgaaaagggcgccccaacaggtatttattttagtggtgcatatgctttgatatcctatgttgctgcattgcattgggtacttgttaattcatatctagagtttttaagggtattcatatttcatgtaatttttagctggactgaaagtctgaaacttgtttcatgaatcatgggaactcatttaggttgttgatgccatgcgccaaacagtgaccaacatgataggaacactgcccccgcagttttttgcagtaacagtctccacggtaaattttttcttaagccagatgtgatttgttatgtggcatgatttaaagtatactcgtttgaactctacaatatttggagaccgggaaattataccaatttctatttaaggtagatttcatgggagctagagctaaccgcataccgtttgagtgtagtactagtgtcttttgatttaaagtgttcacaacttcattttagtcatatggtttctattccaggtcgctgaaaatcttgctcagctaatgtacagcgtcatgatgactggatatatgtttaagaatgcacaatatcggttggaacttcagcagagtctggagcaggctgcacttcctgatgtccaagagaagaaggtgtcattaagctactgtgaaatttcagatatgtttaatgttatttttttttctttttctttctttctttttttcttttaaatacatcaactttttctttttgatacaatgggtatttgataccctcccctcccacacacactagtactaccaaacccaaaacagtgatcttttttcccccatgatttccatgtataattatttttgtcagtactcttttttttcttctgatgaaatctagttattaatttgctaccatgatttatgctgtcatgttacttacatccataccttttggtacacctttattatgcccatcagcttagttcttggctgatttggttttagttggtgcattaacatgacccagtgggtgttcaggatgcaccagattatgcacctgggacgcagaagaatgtgtctggtgaagttattcggtggaataacgtttctggtgctgagcgaattgatgctaaaaaatatatcgagctacttgaagcagagattgaggaattgaatcgacaagtagacaggaaatcttcaaatggacaaaatgagttgttggaatatctaaagtctcttgagccacaaaatttgaaggtaaataagaaggcttaaatgaaatactttattgttgtattgttgtaactaatatgcatgttcctggacttttaagttccttgtatggatgacattagctgacagtgtgttaggagaggaaaactaaccattaagaaattcaaaagaacaaaattaaaattttgaaatctacagaaaaaattatttctgatattttcaatgataacttgttagaagtgtagatataactttttagcatcataatgatttgcatacttcattcgttgtttcctattatgtttgagtcgtaagtgttggaggaggcattaatacactagcaatttcgtgtataattttgtaggacttgacaagtagtgctggtgaagatgttgtgcttgcaatgaatacattcatcaagcggttattggctgtttcagatcctgcccaaatgaaggtttgaggctctcactctcttattcactatgggtttaagctccaatcgtggactctcgtctagtagacatgttataaataatttatgaaagcagtgctgtaaacttgatgaaatgagatgaatttattttaatgtttagtaggagagtattagcaaaatatcactcctactaattctattagagcttcatgttcttcgtcactcttagcagagtattagtgttctcaattctgtgtgtttgcagacgagcttaacagagacgactgcgcctgaacttgcgaagttgctctattggctgatggtggttgggtacagcctgcgtaacattgaagttcgctttgacatggagcgagttcttggcactcctccaaagcttcaagagttgcccccaggagaaaatttgtaagaattatggggagagctgcatacatatgaatttataaattttcttatgatagagaatttgtggtgattatatgtctaatttaaaattagcttaggatcaaacttaatatatgacaattgttggtttttttttttttttgggaaacgattgttgggttagagggcaaagtttttgcatgccgcacaccttcctctagtatttggtgaaatttttgtgtgtttcgaaaaccatcttgtaatattaaaattgagtgtaattcggagtaattataatatctggcgtgtttgtttaactaaatcattacccaatagttatgaattagatgtaattgaggggtctcaattactctttaattttttaattcttatgatcctcataaaaattgggtgtaattaaaaaatattatattttttagatagttaatattatttttctaatttccataaaaaaaaaataataatattatttttctaattatagctctttcgccaaacatgaaaagaagaattttcatatgaaattactttttgacatacagacacatcaaaatagagtgtagctaaacacactctaagtttggtgtatttattatgtaattgaaggcaattaactccaattttttattgcacttataggaattatgtgtattatgtaattacgaaatattattatttttgtacaattaattactatataattattaacttgccaaatataaaaataaaaatttatatgttatcacaaatcactattacaaaaattagtattcttgttaattctcaaatcgttttttcttagagaccgtcattaataaaattaagtgagtatttaaaattaacgtctatagttgagaataaccatcgattttaaacactcgtttagtatagccaacgatttattattgttatataataaatttgcgaattttttaaatttggtatgcatgacaaatttaaacccctcttataaaaatatccaaaattccttgccattttctctcactctcacaccaaataaccccaaatccccccaaagacaaaagccccatctacaccgacgacggccacccatcagccactgtcgtctctcttgatctctctcacaccaaataacctaactaaaatagaacaataaaaaaaaccagagaagagaaatgagagtgtgcatcttgatccacattggtcaagtcggtaactctagttgggagctctattgccttgaacatggcattcaggtaggttttttttcgtcttgattttgtcatttatcttcatttgggtcttaatcaaatcttcatatattgtcgaaatttttggtttggtttttgtttcgtaagtgtttgttgaaattacttcgaatgtttgttcaagtttgtaactttttgcttttttttggcagttgggaaagagattgtggatccataccttgatagaatctgaaaccttgctgataactgtactgggcttcaagggtttttggtttttcacgttgttggtagtggaactataaaagtataggctacgattttaaactgtagcgtatagtataggctaaaccataacctatagtataggcgacagttttcacccgttggtaaaaaattttgcctacagtttttcactgttgtctattctacccgttttgcgatggttgaataggcggcaattatagagatcgaagagcatggacggatccacatagaggcaggggcagtagcccctcttgaaaaaaaaaatcagaaaaaaatatataattatattttgattagttacaacatatatttgtaattcaaggtgataaaatataaagataacattggctttggcatgattgttatggtcaagtcctaacaaaagcatctttatttttaatatttagtttacttccaccctccccttcacaaaaaaaaaaaaaaaaaggtttgctcctctcaactttagttttggatccatcactgttgaggggaatactttacccgactatttaacacaattttttactagtgaattatctcttgaaattcaaatacattttttttattttataatagttttttcgttgaatttaaaataatttaatctttaagttatgtatatacaaattattgctttgccttgtgtttacccagaatttggccctgatgacgtggacatcttttttgacatgtgacaagaaggaaaatactcttggagtttgacgtccctagtcatagtagtcaacctcgggaatgggtccctagcccagcgcccaagttaacataggggactcccaagtgggtgttcagatcacaccaaattattttcaagtcaccatccttcagctatctgaaccaacacgacaaaaagacccctagtcacggatcaggaacttaagaatgtcaagatgacatctcggatgccagcctggcacttagggtttcatccattgcccaagttgacatttggaactagggtttcagtttcggacctcaactttgggcagactactcaaaaattgcacttagacatatgcaagacttgccacaagcatgccagagaccccaaattcaactttgaaacacttcccgtttggagcacctgggcacccaacaccaaggttgacattctcagtcaacctgggcaacacgacgactagggtttgacttagaaacttctttgcttcccgactcctccaatccaacaaggaacgacactcgtacttgagtttttgcaagtagtgcacaagggggactaaccctggacccaacacacaggttgacctgggcaccagctcccaacgccctggttgacacattatcaacctagggtgcttccaaccattttactgaaatttttttttgagcattctctccgtcttcatcctaaatgaatatacaaatactttcgggaaacaaacggattcatctggtggccagaaagctgacccagtgcttaggttgacattgggccccatgttaacatattttcaacctgagacacttccaacgaattttccagagatgtcttttgggcatattctttgttttcatcaaaaattaagatacaagtgctctcgggaagcaaacaagaccatctaggggccaaaacacctagccaatgcccaggctgacattcaacctagcatgtgtggtttctttactcagatgcaaatttcgccctgcaaattctttgtattttggttcaaaatgggagaggagccgtcatgtcttgactaaaatatcatcaaagtaccaaaatgactctcggagagcctcaaaaggagcacctagcgcccaagttgacattcaacctagcgcgggtggtttcaagcatccaattttagttttgtcaacaaatctatggtagttctctatcacaaaaaagatgtagcacttgtgacaagtcaaattcacactttgatattttacattttcgacaaagtgaaatatcaacaaactggtcgcaactcggatagttttgagtctcatgatttcgcgaaatagcaaaatctccaagaattggtgaacaacttcaccaaacccaaaaaatcagctaagtgatgccatcatatcacttagacttaaaaaataagattctagcacaatttcccaaggactcagcacccaaatttatatcgtgcaacttctctattgcaagattgtcaacttgagtattggcggctgaacaattcgcaaaaaaagagacataagtctctcgatactactccaattgatgtgattcaaagtgcattggaaagatctttttacgaatgtctcacacacatatctcaattctgaaattttccttttagaacaagatctacctctacttactttatgtcgggttttcagacgtcctctaacgtttagtgcctctactgcttcattcctggtttctattttacctttctttctaatttcataaatgttaaaaattggtcaaaaaaatatatatatatatannnnnatatatatttatattttttttttgtttaaaaattcccataaataagaagcagtgtgattatatgcgagacagtacagggtaagaaatatgtggagtgtgatgatctccctcctattcctgaacgagtgaactcaactgtgcttcactcaccagataaactcagtttcattctttctctgtttccattttcccaaacctgtcttctcactagttccatatcaatatcatgcttcttctgccgacaccactttcggcaagattcccttgtattcaattccaccaccattacatattccctttactcctctcaaccacaaccgccccagctctcgcaaccaccaccaccaccgccttttcgggtgaaccctcttactcgtcttcaaaacgaagctcagacccccaaaacgacgccgttccctttcgtaaccgccgctacgatttcggtcccctgttgaacttccttaatggttctgagtcgggttcggtttcggattctccgacttcgcttgacccggaggagttcaagctggccgagtcgtaccgggctgtacctgccactgtctggcacaatcttcttaaatcgctttgctcgaattcatcgtctataggtctagcatacgccgtcgtttcatggcttcaaaagcacaacctttgctattcctacgagcttctctactcgattctcatccacgccttgggtcggtccgagaagctctacgaggctttcttgctttctcagaggcaaaacctgacgccattaacgtacaacgccctaattggagcttgtgctcggaatgatgacctagaaaaggcgctgaatttaatagctaagatgcgccaagacgggtttccatcggatttcgttaattacagcttggtaatccaatccctaactcgcaaaaacaagatcgattcccctattttacaaaagctttatagggaaattgagtgtgataagattgagcttgatgggcatctattgaatgacataattgtgggtttcgctaaagctggtgatcctaaccaggctatgcattttctatctgtagttcaggctactgggttggtagccaaaacagctacattgactgctgttatatcagctttggggaattccggtaggatagtggaagctgaagctttgtttgaggagattaaagaaggtggattgcagccaaggactcgagcttataatgcactccttaaagggtatgtaaaagcaggttctttgaaagacgcagagaccattgtttcagagatggaaaagaatggagtttcaccagatgaacgcacttatagccttctaatcgatgcttatgccaatgcgggtagatgggaaagcgccagaattgtgttaaaagagatggaagcgagcaatgtacagcctaattcatacgtcttcagtagaatcttagcgagttatcgcgatcgaggggagtggcaaaagacattccaagtcttgagggagatggaaagtagtggtgtgaaaccagataggcatttttacaatgtgatgattgatacttttggcaagtttaattgccttgatcatgcaatggctacctttgagcggatgcttgctgaggggatcaagcctgatactgttacttggaatacgcttatagactctcactgcaaggcgggacaccatgacagagcagagaagttgttcgaggaaatgcaagagagtggctgcttgccttgcgccacaacttataacattctgatcaactcttatggagagcaagagagatggagtgatgtcaatggcttgttgggaaagatgcaaagtcaaggtgttcttcctaatgtagttacttatacaacacttgtggatatatatggaaggtcggggagattcaatgatgctgttgactgcttagaagtaatgaaatcttcaggcttgaaaccatccgcaactatgtataatgccttgatcaacgcttatgcacagagagtatgctcttaggctttatatatctatctatctaagtatctatatttatatatatgttggatttgtgagggtgaacttctaaccattattgtaaacttttggcagggtttgtctgagcaagcactgaatgccttcaggggcatgagaggagacggcctaaaacctagtattttagctctcaattcactgatcaatggatttggtgaggatagaagggatgctgaagcctttgctgtacttcaatacatgaaggataatgtaactaattgcttattttccatgttcattttcattgttcttcctaaagtcaaggtgttcttcctaatgcagtttcattgtactgccttgattaaacttcacatggttctttattactacagggcttgaaaccagatgtggtgacatatactaccctgatgaaaactttgatacgtgttgaaaaatttgataaggtagatatgaattctttccagccattgtatttatctgatcattttagcctggtgtattgtataagagtaaaacaacaattttcatggtctgaatttcaggttccagctgtgtttgaagaaatgatttcatcaggatgcaaccctgataggaaagccagagaaatgctacggtctgctctcaaatacatgaaacagtccctgaaataacaattgagcagaatcagcagattcatttgagctatacaactaagtgagataacacatgttatctgttttagtacataacaccatgcatggtaagctagtttagacaagtttttttgagatttcatgttgttttttaacctcaccttctctttgtgttgttttctttttgagatagaaaaggaaattatccttgtttgatgcttgtttcaggatatgataacctggtgagcttgttaaaccagaagatggaagattatagatgatttaaaggcagcattagctctaccctgcataatttatggctcttcatgtagatttgcaagtataatcattttccttgtgtatactaatcatgcactatttatttttattataattattcataactcctcttttttgcactgaaagcaacattcattcttgtaattcttgtattataaagcaaaacatagttacaactttcctattgtgtattacaatagatattttatttctttcagtacttttattggaatcgaatattgaattggaacaatagttgtcacaaaaactaaaacgattagtgccaaggttgaaaaaaaggaaaacttaatgatttatgcctcttttttactaccctattaaaatttaagagtaatgatatgcacacatgaaattcaaacacaaaattatgtgacaagtaatttcattcaatcatgtttatttaagatggtctcatttataaaaatagcttgccacataagtgtgtaaattatgtgtgtacatattattactcaaaatttaatgccaacataatttaaagttggcaaaaatatagggttaagtttataattacctctttttgttatacattcacctacaaaacaaatttaattaaaatataccctattttataattgaactacctaatctaccctcaacttttattaatggaattagttcgacttctccatagaaattgaactcacgcaagctccaccacgagtctaccattgccggcgtttctccaattactctaccaccgattacaaccgcaatcgctactgtccttcaatatttgaatatgtacgtaac

SEQ ID NO: 113139 - DNA, 1723 bp, Cannabis sativa
ggggggggggggggggttatcaccatgattataagagggcccaataaggtttttacaaaacccaatttgtggtagaaataggaacaaacaaccggcaaggtatcatatggttgaatgttactatgtgaacatgtctaaggtgaggccaaccgaagcacatgattgtaggaagagcaactaagaatttctacatggtcccctccctttgttaccactacaacaagcccatcaacaaacattgggccatcaaatactatttattattattttttatttatttatgataatggagagggaaggtaaccttacattttagattcaatacacaacttggcccatatgtagtgcaaggggacgattagtacttgaacatgatgcaacccttcaatcaagcttattgtatttttgtgtatatatgctttcaaatttttagacatagaataaatatctgtactcatttcttgatggtgagctttgtacttgtacgtatgtcagtagaaaaatactttgattgaaacaatatttttgatgaatttgattgaaacaatatactatgctattttcttgctcatttgaattttccttctattttcatataaaaaagaatatagataaaagttgtaggttattacgaattagtgggtttttttttattatattttataatatagcttcaaacatggaaattaaactctcacctgaatttatgagctcattaattaccaagtcctacgtccgttccctccatgcatatgagcttatccatacattactagttgcaaattgcaatcaaaaaataataagtctaagtttttttttttttccaaaataaaaaataagaataagaataaagggatttactggctgaaggagaattgctgattactattcatcagcatacgtagagtaagttcttccacaaatacaatatgtgaatagcctcactcttactcttaccttctcacttataagccatgcacttctagatatttttagtgttatttttaccacttatgttttattgatagtgaactttgttgtcactgaaaagccaagaatttgatacgtgaatttaaattgtcagattttttttttttttacaaaaactccacatgttttacaaatgatttaggtattgtattttaagctataaataaagcattcttaaattcatattattttgttgtgtgattgaaattgaatagcataatcgtatctaattagttataattttttcacattaattaatgtgtgcatattagaattaaaatttaatataaatagtatttatatataaattttgtaaattccaaaatgtatattgtagtataacatttaaatttataaatttaatattatataattagaaaaataatataatatatacaggaaggattgtaaggtgtataacaaactaaattttggccctatatgtagtttaattattatcaaactaatagatctagtgccatggtttaatagtaaagttttttaaaactttgaagggcttaagtttcaatcatttatagctacacattaaatatttttttaagaaaataaaaaagtaaaagttgagaattgattacttgacctcttaacttaaagtaagactttttactactacacaaaattgtatttgtaatattttttttattatatttaatatgttatctatatattaataattttttttttcataatttcagggtcttgagcgttcgag

SEQ ID NO: 113140 - DNA, 1033 bp, Cannabis sativa
cttggcctccttcattctacgagcgcgagatcgagagtgaatattggttggcttcctaagaatgaaaccatccttaacaagcttcctaacattttgccctgtcaaaatggtagtcaaaaaggtttaaccacagaaaccaaaattgctacatgcatcttcaatcaacaaaggaaagaccctaaaatttaaaacttatatcattatgttaaaaacacattagaccatcactaaccctaatgaaactaccaatgtcgaattacatcagaaacatgatacaacatcacaaaatgaaaataaaagggcaaaatctctggttcaaattaatcatcagtgaatcaaatctaagaaccaagtgaaaacataaatctctcatctcagaacattaagcaatatacaccaaaatgctcaatattactccctaaataattctcctacaaaagaaactaaattagctaaacaagtactccataaaaactggattcaacacaatccggatccaaatgaagatataacaaaaacccaagccaccaaaaggactaacagttatggaaatgaaagagagttactcactggagttggccatggagatttcgctgacttcattagggtcgagccagaccttcttcttgccacacttgaggacgctagcggaaagccgcttctgcagcttcaaggacaccattgatacgcttctctgtgtcctcttctactctctccgtttatcggcaactggagatattagagattatatactaggggtattgagctaagagttagggttttgagcgagtgattgagtcactgagtcgacgaacgagtttgccgtggcccatactattgtggggcttttcggccttcactaccttttaaagcccaatttatataaactacattgataagggtaaatgccaacaaaagaacatgctactcacaaataggcaactcaagccaccaagttttagcatgttccatggtatgagcaagtttacaaattttgaactaaatcatttaatcaatttcaaaaaaaaaaaaa

SEQ ID NO: 113141 - DNA, 2824 bp, Cannabis sativa
acctaaataaatataaaaaatagtatttttatattatgcggtgcggtgcggtttgaactgcatattaataattcaatacgcaaatcgcaccgcaccgcgcagtttaggaaaaattcaaactgcgaccgcactgcaaagaacttcaaaaaactatattttttttacgatactacgggtagtttgagcagtttgataatcacccctacatacatgttcaccaaagtggtgatagtgagtaagtttagacattgtctaaacttgctcagcattgatacttattgaattggcccttagtgtctaagtgggaattagtcatggatctagctaaactcaagcttatggacataaaaccaaaggtagatttgttgaatattcgtaaagttccctaagcttaaactaaacataaccaaccgatttaccctaccaaataccacatcagtgaagtggaagttaaataagttgctctttttagctcctttcaattcaaatggcttataaaaaggttcctaatctaaatctctctcttcccctctctctaatcctaagttcttagagcaatcattttgctcaagaaaagattgtaaacattggtgtcaaacaccatattcaatgtaactaaaggttgtgtaatcacatttcgaagagcaataaagatctagaccattataggttgatttcctccaaggagtagactatgaacacaccttttcattgtaactcttggattagtcttttgagattctaagataagttgcactttgcttatttctattaatcttttaacatactcacgagtatgtgggtcaatgagttgcaagctcttaaagaactcgttatctaaccttttcagtgatacaatttcggtctattacacccaagatggcctctatctatatcatcttgtcgtatgttgttttatctcgctgtctcattggcaatgcataatacgagacaaatattgctcgttatttattatctctctgagacaattcatttattacacaatgagttttctataatttttcgtgtccaattatccacgtgtcatgtccatatttatggctcaaaatatggacataataaaaacattacacttagtttatattaaaatatttagaaatagtccaatgctaaggttcagtttagctccaatgcaaggttagggtttgcggctaggactgggtccagggaaggatgcggtcagtttacccccaatggcttgaaaagagggatcggggaagctttggggattggctctccagagggtaatgtcaagtatttggggctactcctgttcagatcaagacaaaaggatgttgatttcaacttcatcctagataatctcatttctaagttgcagggttggaaagcgaaaactttgtcaaaagtgggtcgtgctaccctcattaaatctttaggcttgtctttgtcaatgtatgctatgcaaactaccaagctctcaaattgtcttgttaccaaaattgatggtttggtgcgtgattttggtggagtttcgataaaagtaaccgtgggattcacctaaaagcttgggaaaaattatgccttcccaaattttttaagggtcttagattctgaaaaactagagaaattaatcaggcctttctggcaaaataggggtggaacattctaagtagatgccagtctctgtgatgccgaattctggaagctaattaccttaaagggaaggagttccttaactgtagatataaagattcagattcttagttttggaaaaatattgtaaaagccaactctatattaagaaaaggagcctataaattggtggttgatggtagggatactagtttttggagggatccctagatcccttatagcaaagatttcttcctgaaaccaaatggctcttccgctattgatctaagcaaagttttcgatcttttgttaaacagtggtggttgggatatatgtttagactcttaaaaggtggtagtttctctgaacaaggcaatgataggtgggtttagactcttgaaatcaatggtcgtttcttgtgcaaatctacctaccttagccaagctttggaaagggctcctcactgtgaggtcgctctttctctctagaataagttatggaatagtaaaatcttggagggtcataaggttctttggtggtgtattctgtccagtgctctcccagttcgatctgtgaccaaaaaaagatttcatattgaggatgtgagctgccctttgtgtgggatggtggaggaataaaggaacacttgtttctttccagcaatgtggctttttatttatggcggtcttctccttgggggtatttatcctgtttgtgatactgatattcgcatgtgggactgggtcaaattcatttgggaccttaaccacaggggaattcttgctgaggatgttttcctttatgcatcgattgttgttgacactatctggcgaatctgcaatgacatggtacacaataattgtcaagtagatgtgaagaagtgtattgactttatttgtacttcttttacatatttacatgcttctatttttccttgccctgctccgtgcttgatggaggtctggaatcctcctcctcaggattggattaagctgaaatgcgatgttaaagtgggtttaaaaggcatgtgtactgcagtagtagcaaggaaccatcttggtgaggtggtttgggttcaaacgtcttggttggattttttttttatgtgttatgtggggaagcagcagcctgttgtttggctttgacggttgctaaggaccttggttccaagtttgttattgtggagagcgactcgagagtagttatcaat

SEQ ID NO: 113142 - DNA, 3406 bp, Cannabis sativa
ttaaatggagaattaactggctcattcacaccttccagagggcttcggcaaggctgtcctttgtctccatatttgtttctcatctgctcagagggtctctcttgcttgttgcagcacgaagagtatcttacccttgtctatgttggaagaccatattcttttgtaaaattgttaccaagactattgcatgtctctgggatggtttataacatatattttttggttgtcaggttttattatgggttactttgtccacttttgtccacatataataaaatattttgtttgtttgtaccagtgaatttattaataattgctgctaattatgcgaaagttagatgtgtaaaggtaaaaaaataacagtgtggcgggaataataaatttggtttacacaattggagggtaaaatttgttttccacaagttgaattactgagtttataaagttaaatgaaaattagaaatggaattgtttagtgaaattgttaagtcttgtttggtgacagagatgtttatccaacaccgcagtattgcctaattagttggagatgcctgatataaaccacaaaggatgacaatatttatttgaatattaattattcacctttcgcggaggtctcaattggattataaaaagatttattttgttgcatcgattctttatggaaaaccaatagtgtagttgtggtgcaaggggtagatgaatcccattaaaatgacttcttggtgatataattgaagaatgtaaatggtatttaggtgattaggcttatgttacctttttttttttgttaaacaatgtgcaaatgtactggctcaaagttttggtagaggttatcgcctttatcgtcatatgattttttaattatgacacctattttataattattattaaagtaacgactttgtttcaaatgtgtattttttcacaccattcgtgaattaggtatacatgagaaacattaaaaaaaaaattaacaaattaaaaatgaatttatatgtgccatttgtacaatttgaattatcaatttgtataattattttgtcttaatcataaggtattataacagttgtttaaaaaaataatagcatttataaaaatgtctcaaaataatgtgagttaaaacactttcttataacaacaaaagtcacaatacttttaatcaatatgactaaacttttctaataaataaataaagtaatgttagtaaaaaaaatttataaaataataatattccattttaccatttaaaaaaaaataataatacaagttagacgaggtcgttccacgatttttgtctgtgaccacgtggtatctcttttgaacgacgttggagcttttttttttttattcatcggcggtacaatcccacaccaccaagagattcatcggtcccgaaaacctgtaatcccttgctctccctctccctgaagcttttctttctctctcgttataacgttctctggtcgtgacaacccatctccgacggataacttttagccattgacggcgcaggcgaaccacacatgaagctattagttaggctgtttatcttcttttctctttctgataagttagttatgtaacaggtttgacagctagttatattgttacactatttgatcttgtatatatactgagatattgctcactctgtagataatgagaatgcagatttgattcttgtcttttttttttccttcgttctcttctttccgacacaagcttccttctacttctctttgtctgtactatggctctgtctctttctatctcccgatcttctctctctcaatgggtaagtctatctctttattgttttctctgttctcactataggatatatcttatatttttaataaatgtcactaatattactaaaagtaatcggtaataactttttaaatgtcagtacaacgcaaataataataatatagagcttgaagttgtaagataggttgtgagacgaatatataaaacactaatttactaacaacttaattaaggactgccactactcttgtcatacaataatataggagattttgatgatggcttgggttacatgtcttcacaacactttaacacttataatactacataaacttgaaatgacttagacacaacacaacatataatagaagtacagaaatttaagataacatggtacttattagtcccatgacagtggattaaatagtaggaaaatatagtaaataaacagtgaagagactcccatgccactttattctttactaccttactctttccacttgtatttgtattggcgaaccatgtatttgcaagagatcaccgccatgcgcactgcgtgatgcatgtcttttaacttttcaacagacattacatgtaactcgatattttctcgtagtaccgaaaatgacctcatccatttgtcctcgtcacgaaggagactcaggtcatatgagtcacaccgtgatcggaacgtcagaattcttgaaacacccgttgtattccttaaattaggaatgtcccactcaggcgatgaactcagcactgtaacatcttcagtagggttatctgccgagatagttggtgaagatatgtgttaaaataaaatctcatattacctgtacactgtaaaaattagaatattacaaagagatttacatgctgtaaaaataaaacctaggtggcctttggcctctaaacacctaagacagatcagaaacatataagagagaaaatcaaaatagagcaacaatagaaccagatctgaatatatctctagatcaaaaccgaaacaacacaaatcagtacaaaaataaacaccagagcagattgagttcttttggaggaagcttacagtggggaagctttagaaccctacggttagggttcatatgtccaaaatctcagggagattgttaatgcaaaagagaggagaaaaagtcagtactgatttagtaataaacagagagaaagagagagttttcaaaaactataaataattatagattaccaatcgtactcgtgatttggagtaatcttttgatctttgaaaatctatagtggaaacgagcaatttgaggcgagctcgaagaagatgtacccaacaacaatttatggggaacctctataaaatcggtgcactctttcctttattttcttttctgcattttcaaataattgcttgtagtgttgtatttttctgggtatttttatgttggtgttcttcgtgtttttcagagaagaaccacgaagaagaaggttcggtttaagggggtttgttcgaactgggattgggttgttttcttgatttaatttctagtttttctgggctgatattggtgctgttgtcttcatgttcttcagagaagaacatcgaagacgaaggcaactctagggttctctgctagggttttta

SEQ ID NO: 113143 - DNA, 1518 bp, Cannabis sativa
agttgagcccgtgcgatagctgtgggagccaaaaagcaagcttaattatggggttttgtagttaactcagacaacttatacctaaaaatatattcttttaacaaatgtggtggttaccagtcaatgtgaagagaatacttgccaaaagatacaataaaaaaaactaaaaatctaattttacaagcaacaaaactcctctaattcaaacaagctctaagaaaatacccgataatacaaaattttaacctccgtagagcacatgtaatcccgctatcaaaatgatgaaatgaatttttgaatctttgtctgtgcgcgttccttctcttcaagcccatccatatcaccaatattgtcatgatactcctgtgacaaccagaagcataaatataaacttcccatcaaacaacaatgcacagagaaggaaatttagcaaggagactaggaaattataggtagtgatctctctctccaactatctacaagattccatgtatagctgttctttgcaactactattgaattgagaaagaattcaaatattgataagtttatacaaaatgggtactagaacttctttccatcccacaaactcctatatactcaatcacttgggtcagtttgaagtggtcaaaatatattaaattgtgtattgtattacgatcaaaataattgaaaagcgacacactaaaaatgtgaagtattgtccttagaatataacacaaaatgtccacagcacttatttacaagacattaaaaattgaacatattcagattacagagtacgcatacctgaagtatatccttaatatgcttcttagtaagtttttgctgtttcagtagtagttcaatccttgatctcatttgatgattcctgcattgagtgaaacacgcatacaacagaaataagctaacctgtaaacctaaataaagctccaccaaagagtctagtgtcgtgattgtgtttgcttgtctataactttgtgacaagaacttactcggagcaccaaatatgacccagaatgacagctatcaactgcatcaggaaataaagaggggtaacccaattaagccttcacaaaatcaaactgagaatgctatctttaactgaaaacttataacagataaatcagtttatcagatacctacatttaaacaaaaatacatcaaagaatgtaagtgaaatattatgtttcaaaaatgaaacaaagcaaatttggacacagggtgcataggataaacttagtctaccttcgggatgacatgaataaaggttttggcagtaatggaattgaagataaaataacagaagcaagatgaagaaagagcaggttgcttccccagcataggattttcaggtagaagatggcaatagctaaagtttataataacataagagataacaatatatgatgcgaaagaaaagatgagattgaaagaaattaacagagaagtggcattgggaggtttgaaaaaaagtgtagtggtggaagaaaaagatagagtcaagtggaaggaaaa

SEQ ID NO: 113144 - DNA, 1436 bp, Cannabis sativa
cgtgctgcgtagtatttaataattttcgcaactggcctcattaccaatcaagcatgtatcttctgcaagccaagcgccttcttagccaggtcatgggcagctgtgttttttgtcctacgaatgtggttaatcttgacacttgggcagagagagggaagtgtcctcaattgagaaataagatcttcaaaaacactataacactcatttgtattgtttaaagcattagtaattgctttacaattcatctcaataaagtggatggggaagtctttgcagtaaaaccaatgaagggtaatggtaagagctttgatttcttagatatgagctttctcgatttcgaaataagggatggcaatgacagttttggttttcccgttactgttacgaagaacctcaacaaaatttgacttgtttgattggacatcgattgctgcatctatatagagcttggcgagaccaaggggaggagaccaaaagtctgagacttttgaatgactaagagggcctaattggattgtcctattatcctcatttgcttgtttatagttgcacaccaacgatcgtgctaattctaaaatattttgttgttgaactgcagttcctttttgtgtaaccttgttcctgtcatgtcacattaaccaagacaaacaaacgaacaactccaaatttgccctaattaaaacattagtgatatgcataataactaaatcaaaagacttaatatgcttcaggtttttaagataagaataaaagggcgtacattttcagtacttcctaacactattgcaaaaaaaaataaggcatgacaaatgttttacagcttgtgcaaatgggagcagaaataattttccttttatggaggttggaaaaggtgggaagtgtatcttttgtggcacggtatgcaaaatgcttaattttagatgggaggctaagggaccaaagtgttttccaccaagtagacgattggaaagttgtagattccttgcaaaatgagtcttgggcgaagctgagatggtaacccaattagacaagtgtaaattctagaagttgtgttgctagataagagagtcttagttgggtgtagaggaagaggaatggaaagaatatcattaactatatggcttggaaaatagtgagctaggcgagaagagttccaggtcatgttattgttaataaaataagctacttgagtaggaggattccgagaagtagtcacatacctaaccttggggatccagtaattatgcacagggtgaatactttggtcattatcgatcttagcaatagttctctgatttaataactctttcccctaattaatactttgccaaaccagggaaggggcattgccaatagtactggcaagaaaagaagagtgaggatggtatcttgtaaagcccgcttagtttaatttagaaattagcagttaattaggg

SEQ ID NO: 113145 - DNA, 1903 bp, Cannabis sativa
tggaggcttgaagcggggacgttacaatttatttattaaatttttattattatttatttatttatttaattaaaacagtttttttaaaacatgtttaattaattggtaaacagaggctttctaatttttagcatcgttcccacgatctcacattctaacgttcccttcagtaacgtctttcttcccgctactaccttcaatgcattgtctatgtaatgcatcagagccaacgggagaaacacatctctctttctcactgaaaaacatatacgatatatacatacgattatattacatatatattccgagctgtaatcggttttttgggtatggtatttcgacagttctctattgtacaataaagttatgatacaatgtgtttaactgggctgttttatcctgagaacgacgagactgatagtttgcttgcacatatctgggcaatacctcgaacatcttaaaaaagacgacctaatctgcgactcaatccaaattctaattcagtaaattcgttcccttctattttatgtagcaactatttttacaacagcacatttcatttcaaactcagatcaaaatgttattttaagccatttcctttagtttaatgcagtatcaaattagtccaagaaaggggctgtttagcctgctagctagtcaaaagttgaaatagatgggtcggtggtgtttccaatttctgtataccataatctaatatccaattccaatttccaagtcaagtcatttttgtaactttgttatccccaaaatactttttaaattagacccacaaaccaacaaaacaagatcctagcaaagtatgaaatattatgaatggaatcttctccctagctattggttatacaatcataggtttttgaccccttttttaggctcatcaattttttcaaattggacaacaaagtcacgaggctcctgtctaattgtgtggaaaaccatgttaagcttgcatatatgcactataacatatatgtacggtcatgatcatgaatatctcttttaacttgtggttggagctggaacttggtgcccatttctaaaaagattttttttttcttttacatatatttataatcatgtatatataaaatacattgtgttttatttagatagtagttataaaaatttataattacaagtactctcataccacgagtaatttatttttatgtatatgtattgattcatttatataaatatgtacaattgttttatgtgttatttggttttgaaataaaataatgtgattctactatatattaattgcttcaacgaggagatgcttgacctaaatagcaataatagaccagttttaaaattaataataataaaaaagtgtaattaggtgattctactattgattgattatggtgatgtcaatgactcaatttacaggacatgaaatatcttgtagtagtggatcttaataattaattacaagagtaaatttttttttttcttttttgagaaaaaaggtctcatggaacaccaaagcaaacaactctaataatgggagagagacacaaaattgtattcattagtgttagaatttcaccaacaccacacaacacagaaaccacacaagaataacataaacatgaattttaacaaacagaaaacaaacaacacaatgcgtatagagcttcaaactttccctcaattaattgtgaagagcctatttctctttctgaacttccttggacatggttcagttcatttattactaatcttagtagtagcacaattacaatcacacttggctatgggtagaagcggattagacttgtgcttaggacccacttaattcaaagactcaaaattcttttaacccttttataaattattatttttttttcaattaaataagggttcaaaaatattt

SEQ ID NO: 113146 - DNA, 2381 bp, Cannabis sativa
aatttagagtaccaaataagtataattttaaaatacagggtaccaaataagcattattaaaaatacagggtaccaaacttgtatttagataaaacacatggtaccaaatgaatagacacccctaaatatatatagaagtaaatctaacagttggacatttttccgctatgtatttatttgattaattaaaaacaacaataaaatttttcctcaatttactagtaatttcattaaccaaacataaaatcaaggtacgtacatgtcattttatatacaataatgtcaataaatttatctctaaagcacaacatatacacaacaaattggcatcttcttgttatctacagaagtgcagccgggacatattctagctgctaattaatgatattctttatatatatatatgcaacaacaataataataataataaatttgtttaaaataataataattaattaattaatatttgttaatgaaagctttaatatgagtcatcatttcttgagttcgaatctgtgagagctgagatttgttgagaatctgaaaagcatgaccaactcctccgtacaccacataatcaaccttcatcttcttccccaaagccccacaaaattccagattcctatctttcaatatatcatcctctgaaacacacaccatcatacccaaaacctcatcatcatcattacatgctttctcaatcaccgaccctttccccaaagggttgcaccaagggtgatccctagtggccccaccaggcagagccaatctccaatacgtatccgaagccgccaagctcagagccgaccgccgccccgccgccgccgacaatttctctgactctgtcctcgactcccctccgaagaatggctggactaagacactgcctttaaagctcaaaggcttgagtctcttggcttcggcggagttaattagccgagtggttaaattgtaggctatgttggcgccggcactgtccccaacaaggaaaatttttgagaagtcacatctggctaaaacgctgtcgtttcttgctacggcttgtcgtttcagccacgagagagctttgaacccatcttcgtaagcagctggaagagggttttctggagctaaacggtagtttacggacatgattaggcagctgagttcggctgataatttggataagaaatcgtggtagcagctccaagcagccgagccgacgcaaaatccacctccgtgaaagtaaacaatcaatgggattttgtctttctgagccaaaattggaacataaaaacgagcccaaacattggtggacttgtcaatgaccacgtccgtagaaatcactgctgctgatcccagttgatcgtgatcagccaatgaagcagtgacacatggcactacctctggtctttcgacttttccgtctttgtacactctaataagccctccaatttcttccatcacatcgttgttaattaatttttgaggccctttgctgggatttatgtgtacactctggtttaacacaacggcacccattcttttctctaatggttctcagaaacaaaggaatggagtaatatataataacttgtgagttttgagttgtgaattgtgtgatatgtgggtttgtcttaatttgcttttgctttgccaaacaatttagtggggtttggtttccttatataggagaactttgtgtatcacatagcaccaataatgatacaaaattaacgacgaaaaatcaacctatcatgtagtgccaagtggacaatgtgggaaactgccagatgtctttcacgtgtgtgtgagaatcaggccatattacatagatagatagatagatctacggacgtggggttgcaattttatcaataattttatgaattcaacgttcttagtcgtctgctggctttttatttgtttatttatttttgttttgtttttgatgatacatctttagcagaccatattcctgaaaaagtaaagcatagtctagttttcatacagctttggccatgggtgggtagtgggttgttttccctactcacattatagttgaattgcgtatgtatataaataatatttgttgatagtttattaaattagtataaaaacgcaaaaaaaaacatgacttaatttagtgtgatcgatgagaaagtcgatcgcctcataatttgaccttaatcgatcatattcacgaataagctgatacaaggagcggacccatgtagaggtgaggcgggcgcccctgaaaaaaataggaaaaagaaatatatatgcattttagttacttacaatatatatttataaataaaagtggtatatatgaaagctttggtataatggtaaatgagttctaatcttaataaaagcatgttttactttagtatttacat

SEQ ID NO: 113147 - DNA, 2965 bp, Cannabis sativa
  modified_base (98)..(98): a, c, t, g, unknown or other
agagagagagagagagagttaatgagaggtagagagacatgtactgagaaaagagagagattgggtttgggttttgtatgaagaatcttctgtagatnaagaagattcttgggtaagagtgtgagagttaaaatactttgagagaaatagagaatctatctcaactgtaatgtacttgttcttgctcaatcaatagagagaattttagtggtattctagaactggggtagagccatagatgacatcgatgtatcggactttaattagtatatatcttaatgttgatttctttattctctgtatttattgttttttggtttttatctactccatttgtctttgtttttattcgattattgttcttgatatgttaatcatatcttcgctaattatttgattgtttaaagtttagttaatttgattcggtactatcagccgtaattttcccacagatgagatttttggtaacaaaataaaataaagtatttaacgataaaataacagtaacagatatttttaatgatatttgggaaaattattaacgttttagaatccacttaagcgtatataaaaatatttatgtttataaggattctcataatttaattaataattaaaccaattattttctaataaaaatagattttcttcgctttaaaattataacttctaagcattaaatgtgaaataatttaatataaatacataaaatcaaaaatattatttttaataaatgaagaatcaaacatacccttaataatttgtaactatcaataatatgtgaaattaagcgaaaactataagcatatattgtactaagaatcaaaataaaaataaatacttaactaaatacactaggtttcatcgtccaccttaataataagagaatttgaaaatccataagaaaatcagctaaaaaaagtgacaaactaacaatgagcgttttctctagatttttctgtctgaaactatattgaattctaaaaacttaagcttctctatttatagaaagataaaaggactaatgcacaattaaaacttattacaaattgcattaagtaaaaatgcaattaccctatagttaaaattggagtgccacatgtccttctcagattggatagtttgggtgaggctgtgcgacgtggcactcgtggattggctaaggaaaaaggggggcaagttgacgtgggctgaatgggcactgagggagagagcccacttgcgggcttggggcgtgaggtgcacacacagccagggtgaggctgtgcgcatcacgtgcgcgtgatggatgggaaggggacaaagcccctgtggctactacaagcatgtcggctagagagggaaaaaatgggtctgttgggtttttgtcttttgtgctttcttttggacttcaaaaatgccaaatttttttatggctttgggccatactttgtcattttttatttgttttttttttttttttacaaatactatttttctcaatcaaacacaaacaaaatatttccaacataaagtatatagcaaataacattaatttcaatgaaaaaattaatttaaaatctaattaatttgtaattattttaataaaaataatgcattttcataacttttttttattttttttttctccatttgccataaatactaattattatttataaacaaagataaaattgactctaaataaaatattttcaacataataatatattgcattaatttttttgaaaatattatttaaaatttaattaattttgtatttttttcactattaaatatgtaatattttgcgtttagaaaattatcccatataccatttttttaactttttttttcaaatttacggtttgggttgctccggtagtttctatgtgggttactttgtggattttagttgcgatttaggttgctctgttggttgctatgtgagttttagttgcgatttaggttgcttcgttggttcctatgtggatttctgtaaaaatacataaaaaaaaactattttaaagtgtaaaaatgaaaaaatccctttaacatatatgcataaagattgcacaacactttgaataagcacagtgcaatccacttgagacagaagtttggctctccatccttccaaccgactacgcactttcttcaccacaaacgttaaatctttcttacatcgatttcgaacaaataatgagttccttaaaaacctctcatctctttcaatggccccaaactcaaaaaaaatctaaaatttcatctttagtctggtatcacagttgttagagaagtagatttgtgatttaccaatgttgatcttttgacccgaccaaccacaatagtagtcaatacactcttgaatcactctcatattttccatgtacgctttagcaaagataagagtgtcatcgacatacattaggtgagtcactacaaggttattcagaaagacccagtgcaacaaaagccacttttaccgacgcttaagctcgcctacaaaagtatgtgtaactcgacagcaaatgaccttttgtcggcgacataatgacttgcgccggcaaaggtatttacaccggcgcatttgtttgccagtataacggactcgttggcaatacgtccgccggctgatatgtctctgacgatgttttgccgatgatgtaacgcaccggcaaaagttttggcggggattagggcatttggcgcccatttgtcgccttatttttgccagcgagtttagtcgccgacaaaaaattaataaaaaaaataattaaaattaaaaatttatctataccggcgacatatgccccggcaaaagtgtattaattaattttttatttaattaaataatactttttccaacgcatgttaagcgccggcaaaagtttttttaaaaaaatttatttataaattaatttttaaattaaatttaaattaaaaatcgaaataatactaaatataatatcaaatatattataaa

SEQ ID NO: 113148 - DNA, 2814 bp, Cannabis sativa
attcaaaccgcggccgcaccgcaaagaatttcaaatcgcattttttttgcggtgcgggcagtttgagcggtttaaacggtttgatgaacacccctagtttgaggaaatacgaaaattacaagagtgggtaattaattatatttttgaagctacttgatatattatttacattattcacctgttatatttttattaatatatttaaattaatttttttttatttgaataaattaaaaattatctactttacttaacacttaattaaatttaaatatttatttatagttgtgaactaaatttaaatatttatactataaattacttattttatttataacatattgtgtttgtatcagttattcaaaataagtttaaacattttatatgacacaataacaatacgaaatttatttgagttgtgtttgtgtattataatttttttgtattacgagttgtgttcgaatcaacagtttttcaataaacttaaaacctcaacatctaaacacaacacatcaacacgaattatcactcgagtaattctacaatacacctaatataaatacattttggtacaactgttttattatttaaaaaagattttaatctagttttttatttcataacatatgttttagtataaaagtctaaatagttgataatgtcgaaaatatgacttgaatattttgctagacgtgattatttttatatacacagtaaataactatttgaattgttaaaaatactgcaactattgagaattttccagcaaattatagaatattctaaataattacaaaggaaaaaaaataaaaataaaaagtataccgaaacattcattttcttgggaataatacctatttttttttcataaattggtttatccttattccttaacatataccttaacaaatataaaaataaaactaacccttgatttgtttgaatgaaaatcactaattaagataactactattttacattacaatacaaaacatccccaattatttctccaataagaaaaaaaaaagttatttatttattaaagttatggatccttttttactgtttttgttaagagttagatcaatcaatcaacggttgtttgttgtatgtagtaaataaataaaagtgtttaaagaagtgattatgttgggaggctgtccactctctttacttaacggtattttggcaccaaagtttcttctcataactcttcttctttttacttttaatttaatatagaaataaatatggagcgttgagaaaaaaaaaatatgagagggaattaattaagacattttcagtgttataaaatcatcttcttcttctttatatatataacccttataattaaataattaactaatttaattgtgaccaaatttgtggcccattaacaatgatgtattttgttaaagacagcaaggataaaggtgaagcataaataatcatcagtccacattgttatacacactaattccaattaaataaatcttactttgtattttattttttaaaataaaaatcaagggagacataaatataataattagaaagtaaggttatattctttatttaatttttgataaatgtaataagctaatcatttggtcacaatatgagcttaagactaggctatgagaagatgttcctcaaggtgagacttgagagtgtaccttttttttttcacctgtaaattctccatatctttatcaaatttaccactcaatttcaccaaccaaacttcccaaaataataattaacatataaataaataaataaaaacagtaaaaggaaagaaaatcactgtgtataacatagcatatagatgtcttttatgttatgcaagtaccacttcaaagtctctttttaaattattaatttgaatggatactcttaacaaccttaaatcgattatattgatagaaaggatgaaaaaaataaagtgtacttctttttagaattatagcataaaaaaactaaattgctatctagaccaaaataagacttttaaaaaagagtatatatatatatgaaataagagggtagtgaaatgggttttgaaagtgtgtaaatgaaaggtccaacaatatgagcagagagaatcaaaataaaggtatatagatatagagaatcaatctaatcgaagcaagacacaaagaacagagaataattataataatactaatgtagtttgcatgggaagttgcccataatgtgtttatacttacaaaaaagctggctatggccggctcttaaaactttgataaattaaactcttttcttcttttttttttcactttctttaatatttatgtgcaatagtacattcccatgcctgccatttgaaaccatatattttgtataaaatataggtaaaatgtgtatagtacccatgttaaatggataattcgataggcttcttattaatttccgtatttaagtttttaatttaattttttttataatagttatttagattattaataaattttttaaaaaattctaaatagatttatagtattgaaaataaaattcaaacaatcatttaccatgtcatataaaaaaaaaattagtcacccataaaataaaattttaattttttaatattataaactatttaagttttttaaattttataactttaaataattaaacatataattaaaaaaaattaaaaaaaatctaccgaaacattgttttaagaagcttattagtattatagacttacttatgtatactagcaaaaagctacgtgcaagcacgtatactaaattttatgctagtttttttctatgttagttgaaagttata

SEQ ID NO: 113149 - DNA, 8517 bp, Cannabis sativa
  modified_base (26)..(53): a, c, t, g, unknown or other
  modified_base (5185)..(5195): a, c, t, g, unknown or other
  modified_base (8460)..(8470): a, c, t, g, unknown or other
aagttcttatttaggatgttaataannnnnnnnnnnnnnnnnnnnnnnnnnnnggtaaaataatttccaacacgtagttcatgtggtacaacacttactggtactcggggtacaatttagccctaccaacactagtacaggacgagtacttagtgcatgtggtacaagggtcgtacttctgctaagaacgtttttgatgcatctgaagccttataaatagttatatgggcgtctagatacaagtcagttttatgttatttgttttgtgcttttcttactaagtctgtcaactcacagttattgttgcatatgtaggtaaataaaaggtgaaggctgagcactagtgagtccagagcttgaagatggttgtacatatcaagatggttagacttggagagttaggtcttgagacgagttggacctttattttgtagttgcgaagcgacatgtttataaaatgtattttggaattttgctgtaaacttttaagactggatttcaaattttatgtacgactgtatgtttataaagatttaaagtttaattaaaagttttaatttaacacattttttgagaaaacttttgattagggcgtgcacagtaattagtaaatcactgtagcgtgcctagcaaagaggtcgttacatcaatgcacttactcttttctcccaccgtaaattgaaatctgattatagaatcataataaattaatagagaaagttaacagaataaataaggaaaaattagaatcaatatttgtaatatgttatttactaaaattattttcaaattgaataacaataatttttttttactttattaaaaaaatataattaaaatacttaaattgactaattagcctgtacggttataatataaactatgataattattttataagatatattttaaaagataaaattgttattaaataggtaatgttaaaaaataaaataaaaataaataaaagttattagttttaatgacatttcttaaaaaattagttagagaattattcacttctttaattccttattcaattgagttcttcaatttcttatttgaataatttactgcataaatattccagttataaataaatatctaaatttaatttttgacggtaataatacttaagttatatttgtgaaacttttatgggtacttgactattaagtgttaattaaattgtcacgtgtcaatccatgattaatccacattattaaatttttatttttttaaaaaatattaatttaaatataccaataaaaatataacttaaatattattattgttaaaaattaaatttaagtatttattttcaactaagaattaaatttaattatttttgccataaattacttttctaattttaataaattaaagtaaataaatgttcccattatttattagaaaatgtgaaaagtagaataagattggaagaaaagcatatgccctttaaaaagcaaaaatatgagctagaatcctagaatgaatgaaacgtgagtggataaacagatggaggagagttgtgattggttgacaatactgaaattagtatagcaccaatcccattagactaaatccacacaattttatttttaaaaaaaaaaaattgaagaagaagaagaagatagagatatatatcttgaccatgggagttggcaggatataaggggcctaccaaagtaggatgtggaagtaaggcatgccacgtgggaaggaaaggtgtccacggttttccacgtggcaggctatgggaggcaaaccgagatcgcgtccaacactaacctcttatcaacaacatccaaagaaatataactctctcaatttcctatgtttttccactttctttctctttccaccggactctgtcagcttctaacgccatgaacgccatcgctacagctgcagctctctctttgccaatatccctttgtagatcatctaagcttaaatacaggaaggtatgtaaagttttcatttttctttttggttcttttgattatctgtgtcattgctatgttttgtgatatcagttgtcaaatgtagtttacactaaagaacgctcaagtctagccctttagctgggttttagtgtggttatgattgatcactgtgattatatttacatggggttacttgttgtcaatgttatggtatttcagggtgtaaaagcaaggtttagggtgtttgctgtactggaggaggaagcatgggtggagaagaagagtggttggggtcctcttttcgatgtggaggatccaagagccaagtttcctcagagcaaaggcaagttcttagatgtaaatcaggcacttgaagtggctagatttgatattcagtactgtgattggcgagctcggcaagatgttctgacaatcatgctccttcatgagaaggtttggaatgaacaaacctcattcattaatgttattcaattttgaagttgtgttttattgttattaaatgtagtttaacctgtgtaggtcgtggaagttttgaatcctttagctcgtgattacaagtctattggtaccatgaagaaggagctagctgaattgcaagatgaactatcacaagctcatacacaggtgatgctcatacacatgtaaatagtaattaagttaacttttttcactaacttggaaccatgttaaaaagtctttcatgtgaacaattaacaacaggtacatatatctgaagcaagggttgccactgcttttgataaactagcttacatggaagagttggtgaatgataagctattacaagatgggaaaacaaccactaagatacctgagccaacaacccattcaccaagttcttactcagagtcttcagttgatgtgaagagaagtcctagaaaaagcttgaatgtttcaggtcctgttcaaccttaccattctaacatgaagaacttctggtacccagttgccttttccactgaccttaaggatgacacgatggtatgctcccagaaagaacacatgtatttcatttggtagaagaatgtgaaacacaatatatggttggcttgcttcccttacaaaatcctgatttcctttctatttcagattcccattgactgttttgaagaaccatgggtagtctttcgcggagaagatggaaaactcggatgtgtccagaacacctgcgcacacagagcgtgccctcttcaccttggttctgtaaatgagggtcgtatccaatgtccataccatggtgagtaaatatttggtggtacatatagatagatggaaagtagtagtaataattcttattggattcactaacaattctagcattttcttatccaaaaaaatcaggttgggagtactcaacagatggtgagtgcaagaaaatgccatctacaagattactaaaagtgaaaatcaagtctttgccttgttttgagaaagaagggatgatctgggtttggccaggcagtgatcctccctctcccaatctcccttccttaaaacctcctccaggatttcaagtccatgcagaggtatacctcaaagacatttctgtgctttgagatgcaacaatcttctctaacatatttcttttgttgtaatgtatttccctcaaaacagatagtcatggaacttccggttgaacatgggctacttttagataaccttttggatcttgctcatgctcctttcactcacacatccacctttgcaaaaggatggactgtccccaggtttgttttatctatgcagttcatcatggtaacatgacaagttagatgaatctaaactttcttcgtttgctattgttctaaaatcctcagcttggtgaaattcttgacacctgcatctggcttgcaaggatactgggatccgtatccaatagatatggagtttagacctccttgtatggtactctcaactattggaatctctaagcctggcaagctagaaggacagaatacacaacaatgcgccacacaccttcaccaacttcatgtctgcttaccttcatcaagagagaagacaagactgctataccgaatgtcgctagattttgcaccattgcttaaacatgttccttttatcgaccgtctatggaagcatttcgctgaacaggtaaacatactcatccatcatcaatcacatcacagctgacacaacaaggcaaatgtttactttttgttgtataacttgacaggttttgaatgaggatctgaggcttgtacttggacaacaagagagaatgatcaatggagcaaatgtatggaattggccagtttcatatgacaaactaggagttagatatagggtatggagagatgcagtggaaagaggagccaagcagatacctttcagtgaatccatgtaaaaaaaaaaaaaaaaaagaaagttaaaatgaaactctcaacttacatagatcaaataacttcttatgttttctcctgatgaccattctgtgcatgaataacttttcaacgtctcttccaccagaaccttgcatacataagaagaagatcgaccgagacgatgtcatgcagtttggaactcatcgaatgaatcccacttcccagtttaactcggcggaactgtgaattaaatctgaggcacaaaatcatattgtctcaataatcaaatgtcctatgtaagcattatagaaactgtgcactaatatttgatcccgtgtacagtaccatacagtacagtgttaattccaattgttttttctccattcttctttcacgtttccatgttacaatgaagaatattttccagtttcacagacgcagattgatcacccccttcttgtaaaatggaaaagcttgatttacaacatatatgagtaaagtaatagtaaagggtgagaatgcctctcttttatgtcactctcaaaataatttgagcattgttattgggcactattggtgcccaatactttctataagtagtgttttacgatgatattctcatagaattataccgaggagggtgctaaacaacagtggtaccttttagcgtttcttaaatagtttaggctaatggattttgtgagcgaatttacacttatatatgtgtttatatattaatattaaatgttttttttatacttcaaaatagtttttttttttgcatttttatagaaatctacatagaaacccttattgtaattagcgatgcaacttaaattgtaacaaaaaatcgtnnnnnnnnnnntattgcaactagcgctgcaaccatcttaaaaattcaaaccgtaaatttggaaaaaaaaaaaaaagttaaaaagaccgtatatgggataattttcctaatattaaaaacaataaacttaaattaattttagaaatttaacataatagttttccataatatttttattttaaaaataacgtgttgatttaaatataaatgtacatttttattccttacaaaaaaaatgtatttttatttatttttaccttaataatatttatatttttgttttaatcttttctacatttatatttgttgacaacgaatttggctaaggctagcaatacgagtcaccaaatgatgacgcctcaaaaacgacacataacaaatgattttgggttgccgtgttcgtatttaaattttgaacaagtttaataatcgtgttgatacgtttaataattatgtcaatacaatataacacaaattaattgccaaaggttttgtaattctttcttctaaaaaaaaaataaaaaattcatgtttatcttgataattgtattgtcgtgctatatcgtgtgacctgctaattaaacgtgtcatgtttgtatttaaatttacgacacacattaaccatttcgtcttataaatgtctcaacataaacacgacaataagtagacgtcaataagacaataataaacaagagttgaacttaaaaatgtaaataacacgaagattaaagtggtttgaccgtattactggtaataacctactcaatttgatattttttattatctgatgacttatatctaagaacagataaatctcatgagctaattaagtttctcaaatacaaacttgagaaggagagggaatatgatagccctctatttgtacatagtaacatatataacaaaaaaaaaacatcaatcaatatataaacagtttatacacactcaagatcacagaatttaattaataaatcagataatcatgcaaagtatgtatatgcccatatacataaatatacaaatacatacacaccttagagtttctatagtatttttttataattatttgtatagtatttttttataattatttgtgaagagaagaataataaataaagaataaaagatatgcagagaaattaggatttcattcaattgtaagttaaaaaaaactgaaagaatacaactaataagaaagtcttgtatagtctactaacataaaagactaaaataaaagaaaagactaaaataaccctaaataactattcaacaccctccctcaaactcacaatgcagctgtaagaagcatcgagagtttgctaaaagaaaacgaaaacaagaaatcgtatgcgacttagtaaaaaagtcagcaaattgcagtgaagaaagaacaaaaggcaaaataatggtgcccaacttcagatggtgatgagtaaaatgacaattaatctcaatatgctcggtgcgttcatgaaaaaccgagttgtgagcaatctgaattgcactttgattgtcacaatacataggcgtaggaaaagagtgagtaacacccatatctgcaagtaaccatctcaactaaacaatctctttagtagtagatgccatgccacgatactcagcttccgtagaagattgaaaaacaacatactgcttcttgctcttccaagaaataagggaatctcccaaaaagatacagaaaccaatgatagattttcagtctgtaggatcacgaccatgatctacatcatagtaagctcgtaactccatagaggaggtggaaggcaacagtaggctctgaaagatggtaccccaaagttaccgtagcgtgatccgaatttttggcagtggacacatggaatttaagttaacatccaaggcccattagttggtcccccaaagaagataaagtgggccaagcccatttggacaagtccttccacgaacgtaccccagatccgtaaccatagagcctttaaccattgacaactcaagcctagaagcaagtccagtaccgtgaggcccgaagggtgagacagcgtgttttcagaaaactagtccagtttttctttttattcctgcacgtaataaggaaacaatagctgccagatctcgatagaggaccgcatcatgctaaatggaaaaacttaaccacatatcaagcaattaatttacagttaattgcccacaatcaaagtacacggtgttaaccaaatcaaataaaattcgatctacctagtcaacaaattctctacttcgtgggctggactttacgaagcagcccaagtgtgttattcactgtaagctccccaatagagagaaaagggaaactaaatgtaattctcaaactactataagtacccctcaaatcctatggattaagggttgaattctcttgcaaaacttgctcaggtaaacttgagaacatatactcattgtattcctaaaggtttttcaagccaaagaactactgaataacactaactcgtggactaaggctatttaacgccccaaccacgtaaaaaaactgtttgtctttttttttactttttctcttttaattatttgtttctttagttcttattatttataatcaatttccgaaaacaatggtaaatattttggtactattattgagagttgaaggaagcagtgagaccatttatagattacattcaagtaatcatggccctcacctgcacaaagtatggtcttcgttttactgcaactagcaccaaagcaggggacattaatgatccacatgaggcgactagtcgtcagaagggccacctggacgaagatcataatcgagacaatcctataatcgaagatgcgaaatctagggaaagcagttctgatgatgttgaagacaacactcaagacacacccaaggatatgcttgtagacgaccctcaggacaaagtcgctgataataatgttagaaagaagaaccaacttggcgagtcagaacctgtggtcatcatatggctaaataacttcaactggcagaaagcgggttgacccgacatgatcaattcaaggagttgctgctcacaaagattacaagaatggaggcggtaatgactgccctgaccaaaaaggctcctaacgtacaagcttctccaacaactgatgcccttaaaatagtagatccaaaagattctaaaacctcacgcatttgcaaagacaaaggcaaatggatagccgtcgaagatccaaagaagactcattccatcaagcagcataaaaagttataacctttctcaactcttaatatcannnnnnnnnnnttaaaggcatcaaaagtgtcagatttttctcttaagaaatctaccca

SEQ ID NO: 113150 - DNA, 3620 bp, Cannabis sativa
aaggagacatcttaaagcaatttacgcagcttatatggcaatgtagaatgcctcaatagttcacaatgactgatcaacgtgctatgtaatccaaatatcaactcatatgatatcaagaatctcattttttttaaccaatatataagcataaattacagaacaaatgcaggaataaattcagcaaacttatggcatacctcatgtaaaatagaaatcattgctatatttgttttaccagctccagtaggagcacaaacctgaaattaaataaaagattcgtcagactactttataaccgagcaaaaattttccagctctatttaatgtagttctaaagtagattactcaccaatatattctcattagtgtaataaactgtttgataaatacggctctgaatgcgattgagagatttgtagccacgaaaagcagcttgggcaaaatcatctaactcctttatttcaatctaaaagcagagttatggtgacaaaagcattaattaacagaagaacttatgtacaaaaactattattaaacatattacgaacaagcgacagtaataaataaactctagaggcagcagttagtgaatatgctcagaattaagttcagtatgagttatgatgtaatacgagaactcaatttggaagggtggcacctaataatataggaagaactgaggaaggcgtatgttccttgatcaccaacgttataagaaggttcagtatgagttgtggtgtaatacgagaactcaatttggaagggtggcaaataataaaataggaagaactgaggaaggcgtctgttccttgatcaccaacgttataagaaggagaaggagaaggagaaggagaaggagtaggagaagaagaattaagttcagtatgagaagaagaaggagaaggagattgcatttctgaaatcggatagttgtcataccagcttttcacctggtttcatttgtgctgctggtgtagggggaataatgacttcctcataccctttgtgatgtttcctaacagttccttgaggaagagcagtaactggtagtgattggttcccctggccagacccaatgaggtcatcaaaaggacttctcttctcacttgcttgaagcaaagaagaaaaactaacagtagacaagtcaccctcagccccatattctgctcctcgtctatgtcgtttttcttccttgcgccgaagtttatcaatttgctttccagattctgtttgaacagtaaccttaaaccaaagttcaaattagctttcttacttcacaaattttaaaaatacatacgaacaccaattattacctgagtgccataactaggcatacgtggttgagtggttgaggatgctttttcagatttcaagatgagtaaaccatgatgaatacattcaacaagctctttcctatgctgtttaacaaaattaatgaagttttaacttccaaaccggatttacataaaaatctaaagtaaattgttttatcaatcagcaatcaatcataaaagaactccattttcattatgaagaaaccatgcaatatttaagaattcaattcaatttcttacagatataaggtcttgaacgatttcaaactcactatctccaacaagatccaataaatcaccagctatcttcattaaggaatgtgaaaagaaaatggttagtttacattttatttaagaaacaaagactgatattattagttataaaaagtggttaattcagattgagttaattcactagtacatacctcctcaccaggtttatctgaataaaggacctgacaaatagctactgctaattcatctcgagaaagctgcgaaacacttttttcaattatctgatcacaagcatctcttaaccaagttaaattgaaacgtccttcttcagagactgaatattccggaataaattcaggacgaccataccatccctcatgacgtaaagaagaagatgcactgctttcttcagccaacacatcctcgaaagatttgtccaccaagaaccgggctggggcttgaaaaacaaggtcagcaccaaattcaatattgtcagaactctcattagttgacccttctaaagtgattgctttctcgtggtcaataggttgtagtgcgaaaagtttatatgctaaggatgcggacttcctcaagttactatcagaaacagcacggcctataagtttttgcaactctgccctgcattataaaatcaccaactactattaaaagatgataatttaaatttcactcttataatggagatgacattttaactataattaaaagggtgtataataatttatttaccttgacccaaacacttctcaattaatcacaaacttccatcaatgttccattaatagacaaaaagtaaagatagatggcttcgaccccactttggtatttcgataatgtatatcaaggtaagataagcatttgggaatgtatgtctacattacttacacaactagaacaatcatcaacaagtcattcaatcatcaacacagagaacgctgaacaaaagagaaaaaacaccaatttttgactttgaacaacacaaatctgttcaattacttcatcaccacggtttatattacaaactaacagctaataactaaatggttattgaataaagttaaagctaaatcgaaaaaatcaatgacattgtaaaacttcataagtgaccgtgatatccaataacatgctgacaacctaaaccaatattttttttccttataaatgaacaaccacacagatgaattcaattgggtggagatgtgaaagcttacttcttctcagcaatacttccatcaaaagtttcctcttgcgcaccaaaaagacagtaaacacttagagccacctccctgaactcctcagatggcagttctccatctatcaactctacaaccgctccaataaattgcttgtaagcttgtcgaagttccaccgaagctgctccacaaagtcccaatttttttttaatctgtttaataaggttcattttaggggaaaataaaaaatccatcaagccataccttcttcccatctataaactatcttcctcgcaagctctgactcgtcgactgagctcgcagaactgaatcacattacgatttcaaaattatttgattaacctcacaccattactcaaaaaaaatgccaaaaaaaaaaagaacaaacatttcatgaaattttaaactccacaaacagagaatccgatgaggtctaaattatcttaaccatattatacaaacagctttcattatcttggcaactttgcaatttgtcgattgatcaaactcattttccgacgtttttgaagtaaccaaacggaggaaaaaaaatagagtgaattgttgtgagaaattacttggtaggcttgtggatgtgattatggaggataagcctgcgctgcaaataggcatggtcaacatcgaagggttctcgcaaagagttggtcaaccgcggaagctgaaccagcatttttcgtcctaagttatgctgcagaagagagagtgaaatgtgaattggggagcacggaaacaagtgactgttctattttattctatataaagcttttgggtttcaaaggcttctattttttttttt

SEQ ID NO: 113151 - DNA, 2384 bp, Cannabis sativa
  modified_base (117)..(117): a, c, t, g, unknown or other
tattttacacgggtataaaataaaatagtcacgtgaatgtagttttcggcgtgttaaatttttccgaatttcttaaaattttgcaggatgtctaaaaaaaatttgactaaaaaattntttcggatactaaaacagatagaactacattaatatatctattttaaaagagtgcattgtaaaattttctaaaattaaatactttgaagaaattaataataataataataagtagttactaattaaatggagcatctcgccaagtcgccatcatgcacgaaatgcggactgtccatctgcgtacaaccacagatagcaaccgactatgaacacaaaccaccatgagtcgacagtaacatgaaacttatacaatccggaggtagcggcgatggtgggaaggcaactgaaaccgaagaagaaaaaatacaaaaataaatccagagccgtttcagatctagataaaatcatcgttttcatcgaatccaaaatctctgatactcctaaacattgggcgaaatcaatccgctccatcgcgatgtctctgaaatcatcgacgggactagctttccgagccatcttcgaatctgaaacattacattttgggaccggcaaaagagacagaagcgaagcgaaggctttcccacggaactattgatgatgatctatcttattcagaagtaaaaacatgagttggcacctcagtacactcattgtagtgtcaccacttttatttattatttccgttggcctttattttaataattcttgttattagtctatttcttaggctataatagactattcaatttttttaatgaaatttttatttaacaaaattaaaaaaaaaaaattctaaattaacgaataatttatgatccaacataagatacatttgcttttgctttccatacaactgtatgagtcaatataggtgtaaatacgtgcatgtcggaccggtccaacctacattttgaaaaacttgaaataatatgaattctgtcctgtcgacttataaaaagatatgaatcgtgtcgtattgtattaatattttaaagtctaagcctgacatggcccgtaaatctatatttttgtgctgtgctcaaactcatgctgtactttactcgagtcagcccgtattattttctaatacgagctcgaatcaggttttgcttttccattacttttttaatatataattaatgaattaatattttttttataattttttaacaatatcttaatcatacaaaaataatcattaatatttattagtaaatgtatattattattattgttgttgatgacaacaatactacttgaattacacaatttatgatacttaactttacaaactgatttttttggtggtaaaattttccaagctcacattctattgtgttttttacaattctattagttaaaagctgttaagtgttaatatggatggctaatatgtacacaaatataaatgtggtataattttagcggtccatgtcattttaactatttaaatacaataaaaattattttaaaaataaaaaaataataaaaaaaaacaaaaagaaatattaaaaaaataaaacaatttgttttttttttacatttctttttcttttacctaaaacacgatctaagagaatcagaccttagaccccttccaactcagacagacgatgtgccccaacttaaaacccaaaacccattgcttcgatccgcaccatcttcactagatcccatgccaaaagtatcgaaattcaaactctctagcccccaaaccattttgcttaaaacccaaaccagtaaatcctttgagtcccaaactattatccatcagaactcaaatctagatcaacaacaacaatttatacaaagataatccaaaccaaatccaatcagtcccataagcaaaataaatccataccaaattagttagtaattaacccaattcaaaaattcaaagtagacatgatataaatcaacaatcaaagaaaaactaacaaatatatctatatacatacatattaaatatggtttagagaaagaaaaaaataacactacaccaaaaatgacatttagtaacacttcaaaatgttacaatgacataattttagtaatctttatagcttttgtaacataaaatgtaagagattagtgtgagcaaatgtaaaatgttactaaaatgacattcttaaatgtgactaatgaataatttatgtatttagttttgggaaattctataatgtacctctttaaaaaggatacaccaatacatttatctctgttttagtatccgaaataattttttagacaaattttttctcatggtcatgtaaattctagttatttaagacatctcgcaaaactttaagaaattcagaaaaatttaa

SEQ ID NO: 113152 - DNA, 1991 bp, Cannabis sativa
aaaatagaacaaaagttatggtcaactcatcgtaagaattgcatttcatttacaaaaaagacctaaatgtctgtaataagagcctatttatatgtcataacaaggcacaatgccagcatacctggtggagcaaagcaagtgcatggaactgcaccagagctgctctagattgaactgcctcctgaacctcattactccaccttttcacaatctccgggtttgtctatcaaaaaaagcatatatcagaggaggaaatcaagtatgaaatgcaaattcactacaaggaattgagcaaagatacctgtagtaaatggatgccactaactaaagcagcacttgcaaccactggattcttatcaacaatggcctgttttaaatatcgctcaatctgtgtaagaagtgttccgtctgtaatccgacaaagcacacgaatggcatttgcccgatacatatcggttttactattcatgtccttcataagggagcttgtcacaataatcaccttcaaagtgaatgcaatatcattaaagttagtactgattttcacacattcagatttcagatttagaaatagaaaatgagagaaccatttccagagtgtgtcacctcatctgcagagggagaaagctcttttatcataagataaaccattctccttaagcctatatctcttgactggaaaagcttcgtcacagcaaagaaaacctcagtagcttcaacctattaatttaacagaaaaacttctcaagagatgacatggaatacaataacgattctgtaatttccattgttcagtaaaattccattgtctggatctggacaaaatggaattgatgaaacacaaagtacgtaagaaaccttaccttagtaaaggtttctccctggttcagtaggtacaaaagcttcgtaataacctatatcaatacaaaacaacccaaataagtcctgatcagcacaaaaggatataatcaaaatcacaaacaagtagtcacttgaggtatattaatcacctgggagcatcttctggcatcaagctgaggatcattgaaaactctagcttcctgaagaacagcacccttttcgatccccaaaaacggagagtaatccgctgtggaaacgatagacaaatacatcgtattgcatcaaaattaagctcgtcatacacatataaattacaattccagccctattatcaaatgggtcttcaaccaaatcatggaagcaacaagatctagactcctaagctttgtacattgaatccaacaccaaaccaagatatacacttaaatccaaacaaatctacattgccatttccgagtagaagtaagtttaacataactaaacaactcagatcaaccagaaactaaagcagatcaatcacagacaaaccccaattctctcaaatctaagatacgattcaaatgtaaaacacataaaccaagagatctgagaaacaactggctgattagaagctgtgacgaccagaagtaaagaaataaagcggattataataataaatcagatcgaaattggagagaatgaggagatggatatggagatggtgtagcgtaccttcgtcgtcgcgatcgtcgtccttcttcaccagaggctgagccattttcaagatctggaggggaaactgtccggactcggttgctgggttgtgataattgtctttctcgctgggtcgctcgctcaggtgtgggtcggagtagaaaagaaaagaaagtagtggagttggatgaaatttcagaatagaccaaacttattaacaaacgggggggcctaaagctcaccttggatggcatcatcctcagcgctggttaaattagtgcttccctcataccaccaatcaaatcactccacgtcagatatcaaattaaatttttcttttttaacaaactaaattattattttctatataacaaaatatatatttttttcaaaaagaaaaaattatagggaaaaaaacaaaaaaatacaaaaaagga

SEQ ID NO: 113153 - DNA, 1807 bp, Cannabis sativa
tacagtttttatattttcttatatacaactgacatttgcaaaaacacggtttttcagaagtaaaaaaaataaaaataattgtttttgtcttttttttttttttatttattttaccttcttctttattttgaaaccctaatttcactaaccatatctctccccgtttttctctctaccgcctacacaccaccaccatctttcctagtcttcctctcttcctcctatctacgaccatcgtgttctcaaagcagcaccacgatagagatccctggtaccaaaaaccccacccacccctcactctaatttctctggcctgccccattctcgaaccggtaccacaaaggaggaccaccacagagcagcgttatgagaagactcatcgggagtgattctcattttctcattctctgacattcgtttgctcaccacgatgagatccctacctcaaaaaccccacccccacattgaaataagccactatttattgggctacaagtgaataaatggtgctaattacaaaatattcaataaatgatgattattctcttcatcctttgattgtaggcaaccgtaatgacctagtcttgagggatttgagagctaattttgtggtcacggatctggagtgagtcaaacgccctagccggacaattcgaccgatacactatcctgcgaggtcgtagttatgaattccgctggtccgtgctggttggacgcgagttagttggagtattgggttagattatttgtcttccatacactctgtccaatattttgattgtcacattcggccaatccttccaatttactgccaagtgtcactttgtccaatgtcacgtcacttgggtaattttcgggataacaacttttgatgcacacctgatttagtacaacaaaattaataaatgacatcgtagctaattccatatatatgttaaatattctgtagatttccttacattatataaatgtgtgatatgtatatatggttatgattattgtgaatgtatgattaaatgatggatcgttaattttatggtgataattaggtagaggaattgttttaatttttttacagaaatctatgtaagccataatgggatatagatttttatgtaattttttaaaaattattttacataaaattgtaatgctcatgtgcatggagttaggatttgttttttgaaaccccgaccgtgctctattggactaccaatctcgtgcccattgtcgacagaagtcgagcaaccccatggaatcgacgttgtcgtccgcacagtactgggtcttggttcttggggattgtttttcgtctgttgaacgaaaccttgacaagacctttggtcctttttcgtgctatcatagatgtttgaggaccttcggtcctcttctgggcgactaagattgatcaagcacctttcggtccttcgatgatcttggtcccatagggacggtgtttttgagctagccagatacataaggatcttcgaaccttttggttcattcccatgccatcgtcatgcattcttagggaccgtttggtcctttacgttaagataaagagacccattcgggtctttgacccgtgtgaagcctcttggccactatgacctatcgtggcattagtggctcctcccggagccttcagccactgtggcagttataattttgaataattgtatattatggatttaatataacatatattcatgaaaacaaaatatgtgaacaaagagattaacaaagttaaaatgtaatttttatttttgtaaagtcttttttggcaagttagttgacaaaatatttt

SEQ ID NO: 113154 - DNA, 4312 bp, Cannabis sativa
  modified_base (37)..(57): a, c, t, g, unknown or other
ttttagaaattcatattaagatgttaatgaaacatannnnnnnnnnnnnnnnnnnnntggtaaaataattccaacactttgactattcaataatctgctaactccaaaatgaaaaaatcacccctgccaaaatataaatcagcacataataataacccacaattatcgagaaatttaaaaatcaaaataagttatattacgaaaaaactcaaattctacttttaaagaaggagaacttatctaacaaattctaagcgattcgttgataatagacttgagggtaaactatgtcaaaaagacataacaatgccaaccaaaggtaaaaaacaaacaaaattggcacatctcacaacaatacaaaaacaaccaaacagaggtgcaactcccacaaaaacttgtactaagaccttaaaattaagtaaattaaatgaagctaaacaaaatttaaaaatccaacattaaaattcaatatatatatatattaattacaaaaataaaataatattttatgacatgaaaataatataaacttaagaatataataaaataaaagcaatgttgaacctaaatataaagaaaataagatatttgaacattaaaattttgcaaaccaacaaatcactagaaataaaaccgaactaaaatattaaacttaccaaaaaaattaatttgattatccaaataaaaaaactaaaataaatacgcattgattaaaaaataataacacgtttcagttatcaattaatattaataaacagtcaataaatctaattaattacatattgaactaaatcatagtcatataaaaatttaaaacaattaatacaaaaaatatgtcaaataaaacacaaactaaaagtgaatgttattaaaatacaaaatgagcatcgtctgcccttttgttgctctgtggcagttaactgttaatgttagtttttaattccatttccttcactaaaaactgctcccgcctcccatgtttaccgttaactaatcatccaccaccctccctccccctctattttcccttctggtgactatctttttcctacatcaatctcccagtgtgcattcttcgcctgttttgcttttgttttactcatagactcattccacccagatattttcaaggccctctctgttcgagaaaaagtagttatcaacctatcctctattgttgatcctccaccacgtccaaccacctatcaaattatctgcaaaatcttctcccatggaggatataacccaaagcaattgcacaattttatcaccacaaactggaaaggaaggtttgctgtaaccatttcaaactatgaattttaattgtgtatgatcacttttggttgtgaaggagatctaaggaaccatggcatctagtagttctggtctggatggaatgtcggtgatgttctacaccaactattggcacatattgggtgatttggttactaaaactgtcctttatattcttaataatggggcggatccatctgtatttaataagactttaatcactttgatccccaaagttatgaaaccaaggagtgtctctcagttacgccccataagtctttgcaatgtgctctacaaattggtctccaaatcaatagtggttcgcttgaagccttttctctcactggttatttcggaatctcaaagtgctttcttgcaatctaggctaatcactgacaatgtcctggttacttttgaattattgcactctctcaagcatctaaaaagaggaaaagaaggttatgcagcaatgaagctagacatgagtaaagctttcgacagagtggagtggcactttctacgtagcattatgattgccttgggttttgcctccccggttgttgaggtaatccagcgatgtctcaatagtgtttctttctcttttttgataaatggctccatccaaggacttgtaacccctactcgtggcattcgccaaggtgatccactatcaccttatcttttcatcctttgtgcagaaggactttcaagactttttcaatatgaggaaaatcgtgcgaacctacaaggattaaaagtagctcgtggtgccccgtcagtctcgcaccttttctttgcagatgatagccttgttcttagcctggtaaataaaagatctatagatgctattaagcgctccttggatttctattgccgtgctttaggccaacaattaaatgcagagaaatcagtgctttccttctcaccgaacacaacttctgcaatacaactcaacattcaacaaacacttcaaatgactatcaagccttatcatgaacgttatcttggccttccttcttactctgggagagataaaaaaacctatttggggagattaaggaaaagctatggaatcatctctcgtcatggcaagaacaactaatttctattggaggtaaagaagttctacttaccgctgttgctcaatctatacccacttatgcaatgagttgttttcgcttatccaagtctctaatccaccaaattgaagtcatgatgaataaattttggtggggatccaactcttcatcatctaggattaattggaaaacttggaatgctctttgtaaagcgaaggttgaaggacgtatgggttttaagagttttgttcattataaccaagccttattagctaaacaagcttggttaatctttgccaatccttcatcactccttcacaagatcctcaaagctcgatatttcaagtacaattcctttttagaagctgaaatgggatcttatccatctctcacttggagaagtattgtttggggaaaagaacttcttaacaaaggcttgagatggaaagtgggtaatggaatcatatcttatgtgcttctgatccatcgctgcccggtattacctcttttaagcctttgatgtttaaggatccgaatatttttatgaaggtttcagatttgatctccagtaataggcaatggaatcatacttaagcaattttttctggattcggatgttgctaagattcaaagtattccacttaccctttgtgaccaacaagatcaactaatatgcgatgtattctttcaaaacaggctacacacttgttaccaggcttgaagaacaacaacctactgccagtacaaacatttcttttcaatggtggaaaaaattctagtctttgtcgctgccttctaaaattaagatttttttatggcgtgcaatgcatgactgcctcccagttgtagaaattcttcatcacagacatatcgatgattctgccacatgctccttatgtcaccgtgacaatgaatccatcattcatgctcttttttattgcaggcggccacataaaatctggcaactctcctctttctcaataaacgatttcatgttgcataacacctccctaatggatttattgcagaatatgtctccaatttggtcttttaaacaaattgaacaatttgcttgcatcctttgagcatttggaatgaaaggaacaaagaaagacatagttcaaaaacaaagcctcctgaatttgctttgttttttgctttagattatttggaggaatatcaatctactcgagacaaaccagcttctgctgtcccttttgcagctgctacttcaagcctacaacaactggaggtgccgtggatgaatcctccatcaggccagctgaagttaaacactgatgcagcatttaacataatggaaaataaatctagttttggtgcaatccttcgcaacgacacaggtgatatcatagcttccatggctatgccttttcgaggttgttttaaaccagaaatcatggaagctttggctttgatttataacttgcaatggcttaaagattctccaataccagttcattatatagagaccactactacaatgtaggcctttagcttcccttttttgaacccattttatgaaaagggaagctaaagggtgtgaaaatatctgcattgacatttaaaggcggtttttttgataaaaaccgtaggtatagaatctatatatatctatgccgccggttgggggttgggaaaaatcagggtttttttaataaccctatggcgtcggttattgtgtattaactgacgccataggtgttgcctttattcgacacgtggcacctatggtgtcggttaatacaaaataactaacgccatagggttatatatcagacccttgggcatcgtcttcctcatttcacaccttgccgaacacaaagaacagccatccacatcagccccaaacccacaaaaaaaccctcgccaaccaccactaaaacaacctcattctccctcatttcttaaccattttaccc

SEQ ID NO: 113155 - DNA, 2435 bp, Cannabis sativa
  modified_base (2309)..(2332): a, c, t, g, unknown or other
  modified_base (2385)..(2386): a, c, t, g, unknown or other
ttttagaaagttcatattttgggtgtttaaacaacatacttgtgagtagatctaagatcttggtaatataatatccaacatccacgccatcaatccccccacaaggggtaggtttttctcaagctcctagatcacaactgcctgcactccctactttgccagcgcaagatggagtagtgttactcgctgcgggacctagaatgccatatcctcctggactcgctctgcctccaatgaatggacatgtggccacaatctcaggtggaaaacctcttacaggaagcacaaaaaacttataaaagtgatactttagagaagtagaagaagctgaaatgtgtgcgttggttcagtctccaacacaacgtcccatgatgatgaatctgctcatcaccttcaccaaggattatgctagaaatatgtgtttcccccacaacaaacccttagtaatcaaagcaaagatcacaaataaacaagttttgaaaatcctagttgacaatggaagctcagtaaatatccttttcaaattcacgttctaggcaatagggctcataaaagattacttgactccttgcccaattaagttgcaaggtttcaacagagacaccttaagcctatgggcaaaatacagttgtcgatcaccctgaaaggagaaaacaatgcaagtacttttaagaactctacttttgtggtggtggattgcctaacaacatacaacgcaatgctaggtcgaccaaccctagtagattgtggggcaataacttctatcaggcatctattcatgaagttcccttgctatcttggatgtattggcaagtttaaaggtgatcaaaaaagtgcaaggaattgttacaatttctcgacacggggtgtgttcatggtctgggaagaggcagccattactctcggatggaggcttacatgaaaattgaggccattggggaggattttaaaggcgagttagatcctagggttgggatggaaagaactttagaaagaaaggaggaggtagaggaattaagcatcaatgatacatcaaagttggaagaaacctacaactgatcccaagataattcatttgcagatatgctcaccaaacatacaactgatcctgagatcattcaacatggagtagttcaaatgggtcacctagaaaagccaagctttgaggtctgggggtgaatgcaactgtcgacgattcttattcttggatggaacccatttacaactttttgagtttgggagagcttctcatagataaagctccgtccagaaatgtctagcatcaggctccccattatgtgatcatggatgggaagctttactgctggggactgtcaatggaatatttgaggtgcattgctggaactgaaatcagggtcgtaatcaatgagattcatgctggcttctgtggtgatcatacatctggacccaacttatcaatgaaattccttccccaagggtacttttggcccataattaataaggattgcatagagtatgtcttaaaatgtgaacaatgtgagaggtatgctaaggttccacgtccaccgccaactgaaatcacattcatgagtagcccatggcctttttcagtttggggtgtcgatttagtaggatcccccccatgggaaaaggcggaatcaaatatgcaatagttgcggttggttactttactatgtgggttgaggcaaagctgatgaataccatcatctcaaaaaaggccctagactttgttattaagaacatcgtgtgtcgttacgaacttccatacaacattgtctccgataacaaaaaatattttgacagcaaatacttcattgacttctgtgcccaacatggaatcgtgaaaaatatcttagctgtagcccaattgcaaaaaaattgacaagtgatagccataaacaaaattttgaaaacaacgttgaagaaatcactccaggcatacaaggctcattagccagaagttcttccgcaagttctttgggcctataagaccacagagagaactttaacgcgacacatgccatatgcaatggattatgggtgtgacgcagtaatccaaatagaggccatgattccctctcgttgacgagatacctatgacccttcccagaagcgctccctactgaaggaatcgtttgacctaatcgagcaactccgggaatagtcacaggattagcttaaaatgtaccaaggaaagatcacccaacactttaactctaaagtcaagaattatacatttgatgttagaggatggatggattgaggttccctcatacctggaatgcagtgttggaaattattttacnnnnnnnnnnnnnnnnnnnnnnnntatgttgattaacaccctaaataagaacttctaaaacgattacgaaataaacnnatataaagtattagaaaccttatattgggtgcagtggaattaaatgtct

SEQ ID NO: 113156 - DNA, 6691 bp, Cannabis sativa
atagaacctagcaagcataattatcgcaatcacttgcttgatcagcacctgtcatctagaacatttaagttattatatacctgaagtagaatcttcccaagagacatcctcatttgccatccactgctaaatgacgccaccaacctttctgaatcctctggtgaaaatccaagttccggcatcagtctgctgacttttgactcaacctcgtccaagtcaacagcctgtgcccgcctttgaagcgaatcaaactcatccaaaagctttcccatcaaatccaagtcatcaaccgtgctctccaaagccttctgcaccttctccaacttcgctgaaacctccatctcctccttaaacgcactagtgaattcttccctcaccgtcctgctcaacgaaacctcaaattcttgactcaaaaacgcaattttcatattggatttcgccttaatcacattcccagaatcaggttcctctaagccagcaataattctcatctgggttgttttcccagctccatttacaccaaccaaacccactttctcccccttcttcacctcccaattaatatccttcaaaacagtgacacccttataggtctttgtcacattttcaagcttaacaccagaagaaataccagaagccccattattcgaatgcttaccattacgtttccgatcaaactcatcaacagactcattggagaacaaggattcaatgtcctctttgctcatagtttcagaggacgattcttccacagccacagtggataaccgagctgtgatagaagaactggcctttcttggggtactaaaatttctggttttgataaaataattgttacttctagtggaatgagtagaattacgagttgagacagagcggggaagaggtggggcgacggtgtttcgggcatcgaccagggcggttccggcaaaaaagctggagcggaggtcgaggcggtgaagcttagcggctaagtccatgtttggggactaagaaagagtgggaaagttatggataaaacttcaaaataaaaacttccgtttgctttgcaggaatcaggaaatgaaacgaacaacactgtgagaggctctcctgttctgtacagagcaagggagagagatagccaatgaaaaaattcagatataatataataagattacaaatctccacctttttttaaattaaaaattaaaaacaaaaacaagcggttaagaatgtgaaaaataataagtaatgagattttatttttggctcttatttaatttggaattttcctatctttctttttcgagcgaaaatactatatagttctgttgacagtaacgccaatagttcttccaaaatttccaacactatttttttactcttacgagtttgtgacatagatttttatccaagcttttaaaaagaaataataataataattaggaatttactgaaagtgcttagacgaatgtataaaatataaatacaaagaaagtgaatggaaatactgaggttaaaaaagtaaaattgctgagacgcacaattttattttgtggctgggaaaaataaagataatgaaagttataggataacagagcccgtggcaaaaacaatttctgtggtgcttattaggtgggcggaatttcaagaattcgatacactcctgcaacttcgcgacacgtgtcattaattttgaggtaaaagaaagcccacgccatcacattcggagatattaaagaaaaatatgttcattactgccctaatggtttaagacacgtaaaaaaatgaaaaacaatgaccacaagtggaattcattagtatttgttaggacatacttgaaagtaatggatatatatccctttaactcctgacatttatgaagttcttaatgaaacttaataagtttatcaaattcttctatctacttttcaatatactattctctcaatattttatcgtgttcttttatttgcaacattattattaagagttatcagaaatgaaaagaatagtagaatatttgtttttctaaacaaaaacagttgcaattcagaaatgccaaaaatacccatgtaccaaaacctttttctctcttttttttttttaaccaagtctcaaagaaatatcttggtcgcccccttgtcaaacagctacagccattaaagataatactcaactcaccatataaactagctgttattgttattattatttatcttgagaggtgaaagaacaaatcccaaagacattgctatcctgctgttcaagagcaagacattagcttcaagttaagaagtgatatcttggccaagaagagttcagagttaaaatcatacatcacaactccaattcttctaggcaaagagattaacacttcaccaacaactttgataagttacataagaaatatatcatatctgcaatcacacaaacttcaatttaatacctattccttcaaaaaataattcactgcacctgataaatggaaccaaacctcacaagaaaaaatttaaaagtcagcataaatggaacttcagagaaacacttgtcagtgagattttactcttttagaataagaattagagatgagacccccttcttgtacacaatatatgtatacacacatggtatatatctataactcacattactttcgataattgatatgactgttagtactttcttctaggggaagaacaaagtaacacatctgttgttactgaaattaagcaaacaagccatcaaaatttaagatgtaaccaacccaagtagtttcgctaacaagcaatataacaactgtttcaccaacaaatctagcaattaaagccaactcagttggcaatattatataccttaccaaagataggtccatcctttgagcaaactgaggacaagagcaacaagtgaagatcaactcggacttattaacatattaaaacctcactgggacatttcaaacataaacaccattatggttacaaagaagtgatggttcaactctagagctgagaaaatacagttcacataaaattgttcaaagaggtagaatcaaatagaattggaacacttgcgaagttaaacaaattgcatctaacaacttaaaaaaacaagacgctgaagaaattgattaataaacttgaaacaactaaaacaaatcttatataaaacttgtttaaaacacaacattgaaattttcaaaaagcattttttgttcaagctcaataacttaaagagtacacaaattgatcattataattaagtactgaaatggttcagcttttaaacaagagaaaactacaaatatttttaaaggggggtgggagaggaaaatgcaatcatgaaaatagaattttcattttaagatttttaagattctgctctttgcaataaccatcagctccttaacttcagaagattcagcataccagtacaaaaagactgatgcacctatgtggatctgcacattgaataaaaaaccataaagaaacaatttaaaaaaaaccaaatcatttcaaaaccgtaactcttttaaaacatttcggtacatgcaagcctaaaatgcaaaaatgatgagtggcgataagtatagtttacaaagaaattaatgctaaaaatgtgaggtattatccaaacttttaaatagcgcatgtgtttgtgatttgtcatgtttcaaactttcaattgatggaaatattaatacattcaccaatcaaaagccaacaagtcacttaacacatcaggtgctaattaaaaagtgggataacaatgacatctctaaaaacaatttgagtcatattcttaaaatagtttttaaaataagatcgtgtgtttcttcataaaggagaagcccaacagttactcttgctattgtgtgtgtattttgctactggtttaagaaattggcagcaggttctcatcagatccccaagaaaaatatgttgccttctaaaatggtccatcaattttttcttgcacaaattagatacactacataacaagccaatcttgcaggtagaggtcaatatcaaatatccttgttaatattcaacaatctaaatgatcaatgaatatgtgtacgaccaaaaaataaatttggaaaacaatattctaaataaccaaaatgaacactgattatacacctaatagatcaacagaactcttcataaagcttccacgagactttataatccattgaaacgcaggtgtggatgattactaacttgatgcagccgtttattccaccaattactatcctaaagtcacaccttctgtatgcaaaatctttgagcacaaggaccctctctccttcaaatgaatatttgcgccagatacacttcaatactctcattaaatcctcccttttttcccatagggtattgagcattgaattcttctcaaaaacaagcaaaagaattgcagaattctactttacaaatagctaagtacaatgttttacagcaaatatatcacagtatgcaagtgtatttatacacatagatatattgcaaggggatataatatacttgagcatccttctagtcaaataaattaatatataaataaggggatataatatactagagcatccttctagtcaaatatattaatatataaatatatgatagattaaattatgtgaatcaaaaagaaatgctcttaactatctaacttgtggtacgttctacaacatcagtttattattagctacgatatctcaaaactttggtctcactatcacagcttcagaaagaaattaggaaggtttttaagggaacaaatatacggcaaagtttaaaagggaaatgcttacacacttccagtgaacaatatttagatttggctttcaattattcttagcatgtcaatcatataattacgtaaattgtgctttgatgattcaattcttgtttacttggtagaaaaaagtttaaattaccgatcaaaatcacctagtaaagtacatatacaatacctgtggctcacctagttccccatatatgctgaagcacccccatattgaccggcgccgtgctgtcctctcccaggtcccccctgccctatctgctggttcaggtatccacctggcactcccccttggttcccatatgctcccatcataccgggactcatattagcttgattcacataagcaccctgcattccatgacctgctcctgctattcctggggtcacagcagtaccagcccccatcgtcccaaacaagttagtcaaccccaaaccagcaccctgagttgccagcaacgcagtcagagcttgcccaagtgcagggttcaatgcctgaactgccgcagctccctggttgaatccagtcccagctccacctggtgccatcaagtgccccgtcccagctgcagtcccgccaacaaacccagcattttcatttctctggaactgagcaccatgttgctttgggttttggctatggttatggtggtggtgattgtgttgttgggacttgcccgacttaggaccatcaattgctctctggcaatgcaaaatgttgccttcaaaattcttatgtggctcttcaagagccttcttcgcactctccacagacttatacacaaacaagcaaaaccctttaggcttcccagtatgcttatccatccccaatggcccgtcctcaatttctccatacttggaaaagaatgtaagcagtttctgtggatccagctccgccccaacattgctcacgtatatctttctctgcgtgtactcagaagtcggagtctgcagctgcgctgactgggctgctgccgaagccccagcaccaggagttggagctgggccaagtgaagcgagttggcaagccgtcacccgattaccaatcttcttctgaggcacctttagtgccctacgcgccccgcccctattcttaaatacgataaagccataccctttggacttgcctgagactttatcgcagacagccttgcattcctcgatctcaccatattctatgaaggcgttcttcaacgtctctgcgttggtgtcccaaccaagaccgtggacgaagattttacggtgaaccgggtcctcatcagcaaccttccgaatccgatccgccacgtccgggtgcttatccgctgcttcgcataagagattcataagatgttctttgctgaatggttcaagaagcttctgaatctcttcctcatcatcgatgtcaccagccctacctgaggcggatgtctcaaccttccgctttacacgattggcggcggcgcttgacttaagagcaccttcctggtcgtcatcttcttcctcatcgtcttcctcctcatcttcttcctcttcttcttcatcgtcgtcgtcctcctcctcctcttcttcaacttcttcgtactcttgttcaatttcttcgtactcttcttcctcgggatacttaggatcctcaaaaacctgtagttgttggtgcttcttgggaggtttgttaggatctttggatctagactccaattttcgcttcctagccatgagttcggagccggagcggaggttcaggagtggcggatagttagggtttcttagaagagagctgacgatggctacgcccaaaacccgaccaaagtcagaatccaagcctttttttaattttttttcctgttattttattttctttataaaatttttaaattataaggtgattctacaatgcacttctttaaaatggatgtactgatgc

SEQ ID NO: 113157 - DNA, 2743 bp, Cannabis sativa
tcttcagtcacatttaatacatacataaatatatattaattaactctttctttttctttaattgggaattattcaactcataatatatatattatatatagcatattattattagcagagtcgaaatccaatctgattggagaaaatgcagaagaattattcaagaaaatacagtttgattttttttatatataataaaaattaaaaaaaaaaaataacttttgttgtaactggtttctttgtgtaaatttttttttcagtatctttttataatatttatattatattttacattatttaactaattgtggtatttgagtttctttatgtatactttttttttaaataatattttttctttatttgagtgtttaaattttgaaaaaaaaaataaaacaatcatgatttcaatgtctttcattccagtatttaaattttttaaaaaagaaacacaattttaaaatctttttatggcatttctccttatatataatgagttttcccatactttttaaaaaaaattcaaaaattaccataatttatacacttaagttttgatgccatatttatcaaccttcccaacaaaccaatgatgaaacactgcaacagctccaaccatatatattccaagttcacaacctcaattcatgatcacactaccacaacaacagcatataggcaaaaccttcttcaatcaatacaagatgaactaagagacaattattatagttttttcatgtttattttaatagacattgtaatttttttaattaagacaatgtaatgattatattcagattaaatacataaatattacaacatagaaaaatcaagcatatatgtcttatattaggagcattaattcatttaatttagctatgtgtaaagagtgattgaaattgaaatagagaatttgagcattaattctttcaaccccataaatttaaggctaagtaatgcttgaagacaatgcagcaaaaccttgtaacaatctcagtttgaaatttgaatataatgtaatcaatcaatgcataattcacaaaccagaaaaatcaaaaattatgtaatcaatgcataatctcagtttaaaatggataaagagaaagattagggacaaacaaacggaccttgtatatagagagaatataaaatatctctgttctttgttctttgttcttcttcctctctgttcagccttctccaatggtgttcaaatcaatgccctcttacttttctgctgctgcttcaaaggaacaatctttaagaagatttttaagttgggttgtaagcctaatgctgtcacctttggtactctgattaatggattgtgtaggactggaaatgcatctattgcactcgagttacatgaacaaatggcttgtgggaaagatcatggagatggttttaagtgcacaccaaatctagtttggtatggggctatcattgatgggctgtgtaaggaaggtttgatggaaaaagcacaacaattgttcttggaaatgaaagagaagggggttcttcctgatgttgttgtttatagctctttgatgcatggtttgtgctacgcagataaatgggaagaagccaaagctttgttcagtgagatgacagatcaagatgtgcagcctaatggaatagatcttcatgagcttgacgtttgttatgttccatctatagagcaagtgggctgatgttcttactaaagcgttattgcttgattgctttgtctacattaagtcgaagctcgaagtgtgttccacaccgtttcgcttgagtttttgtattgataataactgtattattgtgattgagaagtaggccttgggagttgatctctttagcttttttttataaatatcccctatgattttggctattggttatctttgttgtttcattaacgaccctagttggggtagattcaaaggtgtgtactactggattttctgttgtaacattctaatccaacaatgtgccaatactttttaaaactaaagctaagcttgcattattgtggcttgtctatatcttcatttcctttatatttactttatcttatcacattcaatctagattaatgatgttaataagagaacaattatgtagaagaatgcaagaggtttatataattttcatagaagcaagcttctcactacttttgtatcaaaattggcaagaagaggcaaccagacaaaatcttgtattgtccctcgtatcctataaaattcaacaacctctttatctcaaatttcttaggcttaaacattgtatattcaatgataatcattattaaatataacaatcagaagaatacaactcaaccaatttgatctaaagtcctttaacttaaattctaaattttgatttttttaattgaccaaaaaaccatgggatagaaaattgaagattaacaaactaaactatagtaatacaagatgaaatacattgattgatcagtttccaactctgtaaatccgaatcggagtatttcaatttcaactcataacccataaaatcaatgtacaacaactcttgattctaatcagaacatttccaaaagcttcattcacattgaaaacccacaatacaataattataatcctaataacacattaaccctagaaagattgcagagactacggactcatcaacctccgaatccgtatagagtacggccttgtctcttcaaagcatagacgacgtccatggcggtgacggtcttccggcgagcgtgctcggtgta

SEQ ID NO: 113158 - DNA, 6712 bp, Cannabis sativa
tttatatacaaagctaggagactaggaaataggaaactaccaacaaaataggaaactactaaatacaagttaccctaattcttttacacctaatatacagctaattctctaacactatcatatccctctcctcctcaaataccatttgttgtcattctttcttaaatttgcttatttccgtttgtgaattctagttgcccctttcctccattctatccaacaaagacaattttctatttaaagttttcttttaacatttgtttactcccaaactcctgttgactccacactagtcccattttcatctccacatagcattagttaagcataggtgagaaaattcatatcaacggtatctttgttcatgttgatgagtccaccacatatggaaccaatctttccaagcactttcatgctccgcaagttcaagagaatacattcctctcctatccactcacactggccctccaagcactcattcaccattcaattttcaatagtccatggagccaatctcaccatggttactggcatccattttaacgttccaatctcctctccccctcgttattgctctccgtaaaaaaactctataatcaaataaaggaatggtctcatagttcttttcactttcccttttatccaatattgtatgacttgccatgggatgtggatatccaatctaaacattagcgcgacttagctccaatgttattgttgcttgcttcaagataagcttttattcctaaattgtgaaattttctattgatcttgaggggtccaaagttgaaatgctcccactctccattgttgtgcctgatggccctaatgccttcaccacgcttccccaggtctgtaagctaatggccctcctctcacccggttgagcagcctctgccttgtcgccagattaatcaaccactgctttgcttttctttcttcccatgaggccacttaggcactcaatcattcctttccacggcgcagcttgccctttctctggtataatcatattctttgtaaagttattctcaatacaaatagtttcagaaaaattcctctggtgagttgtttttgaagaaacactcaaatattttgtctttattgctcctcagtttgttgcaactcctccatggaatctaagagccacgacagtaatttctccatggagcatcgattgagcctgacagcgtggtctctcacaaatcctaattgagcctacatcttttgttagagtcaaggattatataaaatggcatccaagccattttgctgttatctctaaacatgtacattgtttagcttgtaagtattcatggaattttggttgctgcattctcttattcagatagatctccttaggcctaaagctagagttaaccttcgataaaaattcccaacatcccagtctacttgagttcttattttgacaactcgcaagaggatttcgtttcattgtattacttctagcgtgacctagggcattggttcttccattttgttgttctgcatttggtctcgtcatttgtttcatcacattcacccatgatctggaattatcacccccgtaacctcctccactcgctccttctacttgtcataagacaaccctaaattcctcctaactatactagaaagacatcgtactagttccttccaacccctcgcctgcctttttcttcggaataatcaccatatatatcctattgttttttagaagaaacagctaggtaaacaatccctcttgttttttaaactctctaaaaaacaattgatcgaactattaagaaacgatctcttgaaaattgctctcattacagcctcctttttctacatttcttccataactttgataaacaccttatgtgatgttcgaaaactccaatatatatggttatcctaatcagattgcgtaccaggcgattttttcaaaccaaaactagtgggataacagccagttttcttcccaaaaccagtggggttttgttgaattccacgaccagaagggtcgtggaaccccctaacgtgcatgggaacttctcagaaagaagagagagaagagtattatgatgtacttgaaaggtgcacgtggacatcgtactatatatgtgaatcatggatactattacattgagtttttttcatatgcagattggcaggttctaaaatagatagatgattcacttaaggttattatgtatttgttggagagaattcggtctcatggaaaagtgagaagtaaaatgttgtgagacaatgtaatgcaaagttagaatataaggcaatggcacagtttgtgtgagataataaggatatatcaactcttgattgaattgggacttataacaaaactagaaaaattgtggtgtgagtgtgaaaacgaggttgttcttcatattgcatctaatcctatttttcatgagcaaacgaagaacattgaaagtgaattgttcaagttgatttctataggatatgtgaaggctagaaaataactaggggacatcttcaagaaagtttaaatgtggttcgagtttattatctttgtaataagttgtgcatgattaatattaatgctccaaccaaagagcattagctataaagtaaatatttttttttaaaactaggatctctgcctaatcctacaatatttggggacctgaaaaccttagcaattgctatataggtgcttaagagggacttgaacctcaaaacttgtgggagcaaaccaaatgcctgaccatttgagctaaccctcttgggtgttgtaagttatatataatcaattagttttattctagtttcccaattatgtataaatcctaagataggtacttagttttgcatataaatataccactctttccaataaaactaatgggaaagaattatttttccacctcagttaacaagatcattgtctaatgatttctacttttatgttttgttagtttacttgattcctattggtgagctagttagttggggttgttagtcctagcctatacataataagtcttggcattaggagaagactattataattgttgggcttctctgtagagtttccaagcattcacaaaaaacttgggttgtaaggggcatttggttggggtaatagaatggaaatgaatggaataaaaactatttttattttatttctttgtttggttgctttataaaacattggaatgacattctaatggaatgattatgttatcattttgatggaatggcaattctatccaaaagtcattccaatgcacaaataaaaacaatttaataatttctcgattaatttttttactcattaaatttaattccactccattctattttttttttttattctcatttctctttaccagtttttgttaatcctaaacaaacgcaccttaacttttgttctgagtttctattgtcaataaagtttttcattctccttacctctacaaatataccatttacaaaataaataaaaatacatatatataaatatagtctgaataaaagacaggactagaaaaggatcaataccatgaatgtacccaaaatgcatatagaaatgaaaacagaaagaagaaacgtccaaaaaaaagaaaaaaaatccacaattgaagagccatcccattcctcaaaaccatacgatggtaagatagaataatcacctttcccatacaagtaataaattcacaatcatcaaccagatgcttcctcagtcccaatggtatttgaatttttgcacacatttccattgttatgttaatgttttcctacaattaatatacggcttaatacaatcaccattgcataaagtcaagaacagaactagaaaatcagaggtagttatgctcataatcaaagtataaatagtttatacatagtaccaaataccaatagatggcataccatgaagcgacggtcatcactttttcttttcttgccactagcaagcactgcaaaatttcatgaaatagtttatagaaattaagaaaaccaaaatgctgcttagaactctaatacccaatatcagctaaaagcaagagtatatgaagcaacatgagattttgtactgtttgtattgaaataaataagttagcatcagatagtgacgatgactaagagatttacatactgaaattaactttatgttaatccaactcaatctaaaccaatgaataatcaactattgacacttaacaccataatatgtcaggcactaagctactggggattttggcttggaccagctaaaaacatcttaaacatgttatcaaatataagcaaatgaaaagatcatatccggttcaaggggaaaaaaattagaacaagcaacaattatttccccagttatgcacctatgtagaaactgataaaaatcaacaacattaaaaagtattcatgaatgaagaaacccaaccattggtacttttttccttaaaatttgatgagcgtgctaactctgtactcttgtgtattccttgtttcttatttatggcaaggtgcttctgcacattctcctcagtgtatgtcatcaaacgatctgtagttacccactcatcccatctgtccaaaattccatattggatagaaaaattaaaaacatcaagaatatataactaaaagaattaacaatgaaaagtcaaaagaagctgaagatatttcatcatatcaaatgagcatcttcaccatgccaaaattaattaactactaatgacacttagattatttgatacatttaaaatgttcaaacatagtaaatatgttacaaaccagatcacaaatgaaaatatgtccaacttaatatctgaaatgcaaactcatgacactgcaagagtcgttacttcaggtagggatatatacaaataaataacctcttacatattttgtgaagaatcatgttaggtgcctaaatatttcttacagtaacaatcaggaaaacccagttacccaagaaagaaacacagctttagcaataatcaggggatagaaattagtttagggattactttcaaggagcatcaccgcacgtaaactctgatggtattggagaaaccacctactctccacacactgaaatcacaattagaaaattcctcacacccacacacacaaaacactacttactaatataatattataataaccttcagcccattccctgttccacaggttacatactagtagtataataaatataataataataaaaaaaaaaaactctttttcctattctgtagctccataacagtataacatcctttttcatattctatacccgcctgaaaataggtcacttatgagtgttacgtctcacatgtgtgttgaggatagggggcctaacaaatcattagctgataataaatttttgttgctacccatacagaaaatttgaatgaacactttgcatcaacaataatcaaggccctgttagttgtttgcaagttcaagaccatcaaaaatccaacaacatgatcttcgtatcagagttgaaaaagctttcagcaaaataaagcaggtaccttaagaggaagattttgtacttactttttgctccaaccctgaaaagcacaagattatgcaattaagatagcataacggtacacgatttatcatactaatattattactttccctagaagcatatcaaaagagaaattaataaataacacaaaaaaatatggcatatgtgttggttagtataattactacttacatggtaatgaacataaaagtcccaattgttgaggtaacccacaatttttaagaccttagacaaaagcataagtgagtgaaatagaagtattaggacactgttagagtaagtaagattaagaagcaaaattataagagacgaaacaaaaatggaccttggctgcgtaatagtagtgaccacaagagacgaggaccatttcccctacagaatagggggatgaatcggcgtcttcctgtttcagcttttgggtatcggaagaatcagtaagcccagtgttgttggagcttcccattgataacccaaaacacaaccgagtatactagatttgatgaataatgagttgaaagcggaaacaaaactagctggggtttctgtaaccagaaccagaagaatttcccttccttaatagaaccacaccaagaagatgatttcttccctcaattctaataaaattagaggtattcgcggtgtaggtggtgtttgttgtaattttttttttcaaatcaaattgtatatgtagttttataatttctcaaactagaactgcagtgtaaaattttaaaactacaaaataagcgatttttactatcatcattattacattataataaaaatttaaaattaaataacaaaattttaataatacaaataaaaaaaaattattaaaattttaatatcataacatatattaattattaattttttttttttgaaacatcaatacattatattgaattatatatatattatatatatttattcttatatgaaaaaaataataaaaattagtaactttgtaatgttggaaattgttgtgctctaatagaaatatcaaatcaacaatattacaactcaataacaaataatacaaaagacaaaatcacgtattaaataatgttacaccactaaaaaaatctatctatatataatataaaggaaagcacaaaataaatttaggtggcatcttagattttttttattctatttttaaaattttgt

SEQ ID NO: 113159 - DNA, 2606 bp, Cannabis sativa
cattgttctctgtgtgtgttgtttagtcgagttggaaagaggaggtttatatggttgagacagttggacaagtcaccaaccgtatgctgagttgtcaaaaataatagttaattctgttactgcttttcaaagtggttaaaacactaacaacatatatatatttttttaaaacaaaagcctatttctaaaatttgcctcttccataaaagcttgagatggctctcacacagacaaacaactctctattttactttattataaggctatgatatgaagtctacactaagacataattctgttaatttattttacaacataataatattaaatataaataatgactcctactcttcttcctcttcttcttcttgatcagttatctcacccttctccctttgatcatcattaatcatttgagctttattcttaaagaactttttcacaattgacacaccaattgctttgatagaatcatgttcgccatcagtcgtcgtttgataaacagcctcaactagggctttgaatgagtttccttgcatgctcttacgagagctagttgtacaatagaatacaaaagattcgcaattgttctcgatcgggtgataatctccaaaccctaattttcctgttctctcaaacatttccgtcgcgcgttggatcaccttttcgggggtaaagggagagcttgtgctacatgaacccgactttttaactagacaacatgccatggagacattgtatttgaagcgaaagagcctatgtttcttgagaaaacaattaagacaagtcttcactactcctttgtcagtacttaggttgtaattacactcttcacatggttttcttggataaattcttcgaatgatacttaattttttgcttgtttcaatctttgttcttgtgaaatgaataactctattttcgccaacataaattcctgtagttttactcatcataaaaaagatatatggaaaattgttagcactgatcatgttgtatatgtatttgagatctaatatctaattaattatacactacaaaacactacctttaggattaatcttttggtcacaacataaatgttttgtaattaaatgtgacttttagtcataataaaaaattacttgtgaataaaacagatttagttttaatcacaacaagtattgtgactaaaaatatatttagtcataaaaaattgtaatttttgtgactaatatatctagccacgaaccttttagtcacaacataagaatgatgatttataattagttgtaatttttctcttttagtcacaaattttattgtgaccaaaagtaagattttttgtagtgataagaaggattaataccattttagacaatatgttttgcaaacattaccaattgtatctctgttttattaaattacaaaatggattatgtatattctaaaatagtacaaataagaccctgaactcaatttttttaatataaccaacttaaagataatttctagcacgaatggacgcaaaaaataacataattaattttgtcataatacttttagatgagattattattaagttttattttgacaaaaaaatcagtttggtgtgctatttagtactagctatatattttggaaaataggaggggtttaatttatcatttaataaaatagagggtgtaatcagaaatttttaaactaccccgagtccaaaataatattaacccttataaaaatatataaatagaagttttcttcctcaacttcttttcgttgtaatttttttttgttctgatctatagaaattattacaaatattctcttttaattaattatattttattcattttttaaaacaatttttttatgtgaccataaattacatatataattgtagtacgagaattatttaacaacttaatttcacccatcgatctgaaatccaatttatattgataataaacatataaatattagttctaaaattagatttacgtattctcataatttattatcagactttagttacatatttgtttttatttttgtgtagactattgaattatactagatcaataacttgtttaagaaaataagcaaaatataactggaagagttatttgcaataatttttatagtttaaagaaaaaatattcagtatagaaaaatttatggagcaaaactttacaaggatcataactctggtgagaaaattattgtttaaataaaattataaattgaagactatttttaaatttttaaatggtatattgaagactattaatttaactagtatatatagtttaattaccatggtgggagtatgtgtgtgctcttctgtaggaataaatgtgatcccctggcttgagctggcttgctttgatgttgtttgaaattaatcccatctttaattctatatattgatttatatctttgatggaaagttgggctaggcataatgagtatatatctatatatctatttatagtggtggtgagcataaattagtagatttatatactgagtcaaagtagtccaagtcaagttaattatatatttgtcaatttatctatgaaatataataatgtctgttacaccaataataataataatagtaataa

SEQ ID NO: 113160 - DNA, 4132 bp, Cannabis sativa
tgcgtatacttgcgtagtgtttataattttcgtaacacacttcagaacagttttctggtaatgtcctttaaacctaaatatagttgcactaattgtggaatgacagggcatacaattgatagatgctttagaatcattggctttcctcctgcacacaaacttcatggaaggtttactaatagaaatgtcaaaggtcctccattaaaaggtgcttctgctgatttggctgctggagaagaagaagaaaaattcgagtataatgctcctgaaaaggacctggtgtctagtttgtctagctctcaatgccaaaggctaatgactttacttgctcaaaaggtagaagacagtttaatctcaaattctggtgataaccaatccattatctcccatttttctggtaaggattttcttgtccattcctccatttggactatagacacaggagccacacatcatgtatgtcctaatcttaatttgtttaaaaacacttacaatgatccaacttttaatctgttattctacctattagtttacaagctaaaattaattgtggtggatcaattgttgtgagtcctgatttgattcttgaaaatgtgctacatgtgccttcaattaagtgcaatttactttctgttaattctttgacagcaagaactaattgcacattcatgtttactaatgacaaatgtgtcattcaagacaatatgaagagcaagatgattgcgatgggtagaaaagttggccatctatactatctaaacaatgatcaaaccaagagcaatcatgtttcttctgttttttcctcaatttcagattctaaaatcactagtgaaactatttggcactataggcttggccatccttcttgtgtaaaaactcatcctctaaataaagctttgaaatttcattcaaattcaaattctttgtttcattgctccatttgtcattatgccaaacaaaaaaaagttaccattcatttctaatcataacattgctaagaaatgttttgatctcattcatgttgacatttatggacctcttaatactttaaccgcagagggatataagtattttcttactatagttgatgattgctctagatatacttggattcacctcattaaacaaaaatctgatgctcaaattgttatcccacagttcataaaattgattaaaaaccagtttaatattattgttaaggctcttaggtcaaataatgccaaagagctacagtttaatgaatttcttaatgaactagggatcatacactaccactcttgtgtccaaagaccacaacagaattctgttgtggaaagaaaacaccagcacttactcaatgttgctagagccctcttatttcaatcttacatacctttggtttattggggagagtgtgttgctactgcaacatacttgattaatagagcacaaacacctaatctaaagaacaaaataccttttgatattcttcacaataaaccactaacatatgagcatctaaaggcattcggctgtctagcatatgcatctacattgagtcaaaatatcaaagttctctcctaggtcagcaccatgcatttttttgggatatcctacagggatgaaagcttataaactccttgacttgaacactaataaagtgtttcattctaaggatgtttacttttatgaacatattttccttatgcgagtgttggcagtgttcctcatggttatgagaattttttctctgccactcctattgacagatctgagtctactcctaattcttcatccatgcttttaaatcccactcatcaaagtcttgaacttgttccctctattccacataccagaacagggagacaaatcaccaagccatcatatctgaatgattatcattgttttttggctactcatccttctgttttctcttcacaagattctatgcttacttctcaccctttatctaaggtttttggttatcacaggttgtctcctaatttcaaagcaattgttcttactatttctagcctttttgagcctgaatttttcagccaagctcatggcatagctgagtgggacaatgctatggacaatgaaattgatggtcttgaaaagaatcatacctcgattgttgtttctttatctgaagatcaacatgccatttggtgcaaatgggtgtataagatcaaactcaatgctcatggaagtgttgaaaggtttaaagcaaggcttgttgcaaaaggctacaatcagtaagagggtgtggattatactaacacttttgcactagttaccaaattggttactgtcaagttagttttggctttggctgccatgaaaggatggcatttacattaacttgatgtaaataatgccttcctatatggtgacctacatgaagaagtgtatatgtctctacctcaagggtatagacctaagggggagttgccaccaaattcagtttgcaagttgcaaaagtcactatatggacttaagcaagtctcaagacaatgctttgctaagttctctagtgttcttattgatgaaggattccatcactctgctacagatcactccctattcattaagcaatttgatggaggtttcatcttcctcttagtatatgttgatgatgtcattctagctagcaatgatctgcaacaacttgaggcattgaaaatcagattgaatgacagattcaagctaaaggacttggggaaactcaagttttttttttttgtaaagaccgcttacctttaatttggaaattagtaaataattagcgtttaattatgaaaattgtttattcatcttgaattattaatgtacgataatttatttgaattcagaatgcactttatatgtcatatatagaattttataattttgcatattttgtgcccgacgacattagaacgcggtgtttgactattagaatcacatctcagtatttttagtataacggggcagtatagttagatattgggaatgtcaggaatggtcgagattttagagttgacaaaaataccactgagtgatcttttatgacttatagtgtgggaagcgcaaaatggtcattttgcctattggaaatttgtctttttgtgggtttatgttatgtttagaaaatctgattttaataatgttttgagctgataattatttaataaaataaacattttattcattttttaaaattagaaaaaaaaaatatgaaaaagactctctctttcaattccctctttctctctctcaaaatccctacaaccaactagggtttggtgttattttttgcatttcaagcaagtttcagcaaggattaagtggtctcaagctctaggtaagctcttagtaacatcctctttagtttcttgaattgcaagaaaatggattatgcatgtttttgtggtttttggttgtctgaagttaaattatgtttagatatgttgatttgagcttgttttgataggtagtttgttgattgagcaatctttgagttttagaactcaagcttggttcgttaatggtgatttcaattctgagcttgggtagttgttctattgcttggagaatatttattggggtataatatgcaggtctggaaagtttggtaaggtttggaatcgatttggttagcctttgaatttttttgggttttttcggaaaaattcaagatgtcgattcatgctagttttaggtttttggttggttaattccctgctagtttagggtattgccatttttagttgcagtagacagggtttcggtttaaaacctaattcccggatgtgatttagcgtgtcacttatccatgttgttatcgatgtgatttaggagcctataattcaccgagcagttgttccacttaggttgaccggcactctagaatttggaattgaggtaagattagtataatgtcatgcatatgtgattacatgtttagtgtacatgttgtttatgcttgttagattacattgatagcagtaatattatacttagagttgtactgattactgataaatgtatgtgggctaaaatacttatagatgctgtcacatcaatatggctagagtatgactagcatattgagtataggctgacattatgatcgatagtattgtcgtaacgttctagactcagtaccgtg

SEQ ID NO: 113161 - DNA, 1745 bp, Cannabis sativa
ttttatgctggtggtagcatttctaattttcctatttcctctgaacttcagaaccttatgtattcagaatgctaattcatttcaatgaagttgatatttcattccaaaaaaaaaaaaaaatcgttaatttgtaattattgtattaaacaatgtgggcggtgcctttacctctacttggaatgggcttttgacttggacacatgcctttagtgggtctttgaattgggttggtttggtaggtttccaacccatttcaaaccatggtctcaatcaattgagagaattgtgtaagaaagtaaaaatatcataagtccatcgtatatgaattcataaatattgagaatggtattttgaagatataatgttattcaatcttaattgttacaaaagtatttcaagtatcacttttttttttttttaatatctagtggatattattatattattttcatatatgagaacacaatcggacttcaatacaagttgacaaacaaattggcttgactaataaccttagcccctacacaggaatgatatcataaaaataagtttgtatgtatattcttttcaaagtatctgattctctctctttcaagttcaaaaataaattatttgtatataaagaataccagtactccaaaataggccatcaatcaataatcaataaaagaaagccaagtatgtcatgctataaacagtaaaataaatttaaattgatcaatgcagcctctaattaaatataaatattaatataaatgagctcatattattaaacaaataacaaaagttgtctcttaaatgtagtttgcttatttttaaggtgactgtatatatgacaatatatatacttttcttatagataaaatgacaatgtatatacttgaacacgttactacaaatatatattcagataataataataataatgccgacaaaaaaaccaattatagtaataataatattagggagttcccttctgaatatattaatttatttttgaacaccatgcatgctaatatataaaagtgataaataatatatatatcgtacttgaattcttaaatgaagaaactaataaagccagctagctagcaacaaataagaggtttcgaaggtcaaatctcagttgcaccaaaaagagagtaataattttcagattgggacccttaacttgggtcaattcaaagaggggagtactcggttttatatgtttcaatatggactttttctatatatcttatcatataatacatgaatgaatttaaatatatttggagagcaagtttacctaaacataaagttttattaaaacctatagttatttcaaactgcacggtggcggaaattgactaccttaccaacaaattgccacttttgattttccgggtttgtttgagaaaggaaggaaataaaaagcctaattactttatatgaaaaaataaaaaattaattatgagttttgctatttagagtttaacatgtaccaaattatattttttgaattttttatgccgttaaaaattctctcccaactattgagatgattggattcaataattttttgtttaatttatctaatggaagtgtggcatagacgaaagctcaaggagcgcgatttggtatatgtcaaagttcagggccgactctgaaatgtagtgggccataggaaaaaaaatatttttgagccctcattcagaaaaaaatgtgatatttttcaaaattgataaaaaaatgtgtaattttaa

SEQ ID NO: 113162 - DNA, 1391 bp, Cannabis sativa
tcatcaatgtgccaacaaaaaagggtcaatcattacattctttaactacagtttttatgacattataaaattttgtgcatttattataagatttgacatacatcatattcatagcaaattgatcatgttggtagagtttaattttgagcatagtatacagatttgagtcttatcaataaaggagggaaaaaaaataagatctgatgagatttgtgtataaattaataactacacaacagaccaagaatgcaaaaaactcttccaatgaaatttgagaagaaaacattattgagaatcattgacaactcttgttacagttttcagtagacaaaatattcttcaatgctttcacagcaaaaaaagcacagaaagtgcaaattagttttgcctcaaaaagaattatatatatatatgatgaaataaaattataataaaggaaccagaattatcacactgattatttatatgctgctttcactgctttttcagcagcatcgtccaaatcctctgctgtgattaatgccataccactttcctgcaaaaccgatttatcaaagtaaaataataagcactcattacgtataaatttcgaccgtataattgtaagtttctgactttactaccttcagaattctctttccttgatcgacattagtgccttcgagacgaacaactactggtactttcaaagaaacctggtgagcaaggcgccacccccagaggaaggggaaaaaacgatatcagttaagaaaactaaagaaagagttgaaatttacagtgaggtaagaacagaaatagttatgtaagtctcacgtgtttagcagcgttgacaataccactggctattacatcacacttcataattcctccaaatatgttaaccaaaatcgctttcaccttatcatctgatgtcaagatcttaaatgcctcaaccacctgaaagaagagtctcaacatcaattcagaatttaatgcaaacagctaataatgcaagaagcagttttcataagtgaccatttcctttttgtttttggattgaattgctacatttaagggtcgcctttttcaaatgagaggggttcaaccgttcaaaggtggccacggatgtcacaaaagcattaagagccaaaaaaaacaaaaacaaaaaatctagtatcattaatttacctggccttcagaagcattcccaccaacatctaggaagttagcaggagttcccccatgcagtttaattatatccattgtagccattgctagaccagccccattcaccatgcagccaatctccccatccagtccaatataattcaaatctgcttcggcagcaacaacctgtcaaatggtatcaacatcaagaatttagttcgatatcccattctttttccttacct

SEQ ID NO: 113163 - DNA, 3942 bp, Cannabis sativa
  modified_base (3791)..(3800): a, c, t, g, unknown or other
atttggtagatatcaaagtccggggagcatggtttagtatataaacaatcactgaaacagtaatattgaatgaaattagataaaagttctataatctaacaatctcaatagtttagagggaatttttaactactaaaaaagttcaggggcatgatttggtacatatcaaagttcgggaaaaaaaaaacttaattagccttaaaaaaaaaaaataaaaaatacacacaaacgatcagtttaatagtaacctaacttggctgaacattcctttttcaagttgtgtttacataatataaaaaattgcttacaaaagtttcttataatacgtgcagaaactactaatatatataacatatgataataataatcctgatcgtgataatgcctctactaaaataacattgtgacacgtaaatgatatgatgatagtgtgagaacaacatcaaaagtcaattatagtgattttgtggcttttgatattaatactattgtttttgtacaaagtccatatcactttattgagtggtttcattatcatgagaagaggaatattttcccttacccaacaaataataacgatatatatattatataatttgataatgaaaaataattcccctaactttatttagttataaatttaggtatgttttgattatgaaaatcaagagatcataaaacacaagttgatccaccccctcaccaaaagtttagagaaaagggcctgaaacgttaggtaagattgaaattttgagattcttattagttgtgccggcaaccatctttagagcaataatttatgcaagattatttgaactttattataatttaaatattttatattaaatattgtccattttttttgtgtattttgtatcatttggtttgttcaaaagcacagtcatcttttcacggtagtagatcaatttgattcacagaagaaggtgaataattaaaaataaaacaacgttatagtatgtatgactgcaaacaaaccttaatctatacatatatcattcaaaatcatatattttatttagagcaataaatctacaacatacctcccatagctactctatccatttgagccattccaaaaagtgtgtgtgaagtttaaacactatccaagatcttgacggttatgttattagttaggaaattaggttagttataactttctgttatgacagttaggttctttatcctttatttgtactgctctatttataaagaccattagtgattctatagagtaaagttgatgactaaaaagaatttagatgaaattctagagagaaagagaagtgtaaaaggtttgagtttttctgatctcagttccctcaagtgagcctattgcaggagaaagactccatgtatgatgaacatccaaatctccctcctttataataatctgagcaccattgatcaataaaggcaaagcctcaagacagttccacccaaggagtagatccaagcatcttgcttgtgttcgaaccttgtaatccttgtgttaagttgctcaatttttgtcatccatttattaattgagtttactttgtttttcttgcttttgattctttaatctctaagtttgattttttcttgaagtgggattgattcacaacaaaaagcatcagagcacaagttcgtattatgaaatcaagaaccaaggtgatgagagttaaagaacacaatggaaactactagattcgaagtggattaatatacaggggttaatgactttggtccatggagaatcaagacgaaggcattgcttatgcatcagggtgctgtaagtgccataataggaactgtcgccaaggaaggagaggaagcaaagaaagtttctcaagaaaccgatatgaaagcatagtgtcattttgttgagctcaagagatgaggtactttgagaagtcgcagatgaagaaactgcagtaggattttggaacaaacttgatgaagaaactgcactaggattgtggaacaaacttggatcaatatacatgaagaaatatctggcaaacaatttttatttgaagaagaagttgtacaccatgaagatggatgaaaccaaagaactcatgaagcatctcgatgacttcaacaagctgatcttggacttgaataacattggggttcaaattgaggaagaagatcaagctattttgctattaagttctccgcctaaagcctatgaacactttgtggacacaatcctatgtgacaaatatactttaaccatgtttgaagtaaaggctgcaactaattcaaaagaaattcagaagaaggttgatgacagatcaaaaattagtggtgagggattgttgtttgcttgaggaagaactgaaaggagagattttgagaaatccaataatggacacaaatcgaattgtaaaaacataattgcaatagggaaggagtgctactactgtaagaaagatgtgcactttagagatgagtgttacttgttaaagaacaagctaaagagagacaagagtaaagaaagaggtgaagcagatgttgcatctagtggttatgattcagtagatgttgcatatatgactccaaacaagaatttatttagcagttatgaagaaaattcagttggcacaactctcctaggtagcaacaaggcatgcaagattcttggaattggttcaattgaaatgaagatgcatgatggcataactaaaagtataaaatgtgtggtatgtgcctgaactcaaaagaaacttactgtcaattggatgattgataatcgtggataccttgtgaaaattgatagtggtacccttaatgtctcaaaaggatctctagtggttgttagaagtaaacttataaatgccctttattacatgatagggattgctataacaggaacaacatcaccagttgttggcagtgtcaaaagtgacagtataagtctatggcatttgatgcttggtcatgttattgagagaggcctcactgaacttgacaaacagggactatttcgaggttgattaattgtcaaacttagtttctatgaagagtgtttttattagaaaagttgcaaggttaaattctccactggacaacataaaactaaagaaaaatttccctatatacactctgacctctgggctccttccagaattaaaactctagggggtgttagctattttattagcattatagatgatttttcaagaaaagtgtgggtgttccttttgaaaagtaaggataaagctttcaatacatttgtttcctagataaagttaattgaatatcaaaccaagtgcagaattagaaagctaagaactaataatggttggaaatatttctcaaagaaatttaataaattttgtaaggaacatgggatagctaggcacttaacagttagtgatacaccacaataaaatggtctttttgaaaggatgaatataactctcattgaaagggtaaggtgtatgctaaaaggtgatggtttgtaaaggcctttttgggatgaggttatcaagaaaacttgctacaaagtcaatagatgtccatcagtccctttgaagtttaagacaccacaagaagtttggacatgttaagtacctaagttagatcacctaagggtgtttacatgcacaatttatgctcatcataggcaagacaaacttcaagctagagctctaaaatgcatgttcctaggctatccagatggtgtgaaggattacaagttgtggtgcttggaaccaggtcataagaaatggattattagtaggtattgttcagttttctgccctaaataaaactcatttcannnnnnnnnnatttactaattaataaaagataagaaatttcttttctgttgcatggtccacatgatttatttcatgattatgtttgatgtataaattctattaagtccaaaacatatatatttattcttgatcatagtgtcgtcagcacaat

SEQ ID NO: 113164 - DNA, 1120 bp, Cannabis sativa
tttttttttttttttctttgagtgattattgactcaaaatttttaattttttaaagcccttttctttaggctttatctaaatagttccattaaaataaatttaataacagtattatatactcacggcgcgcaatgaggctttttcttttttatttgcagaagaaagtttttgcaaccagtagggtgtgttgacgtggcataggccaacgaacttgatcgctctccttttagcacgtggacgaatgagaagagttgaaagatttatgtgtgaatagaagagaagaggttggcaattggcatgagcgttcccgatgtaattaatgtaatatataaaaacaaagtgtggattgtctcttaactctttcgatcaaggggacctaccttcttgttgtgtttgcttcctcctatccattatttatgcaagtttttcttctttgttttgtccccaataatattcataattattaacaaaattactatgttaaaatcttctaggaaattttttagaaaaataggtgtattggtaccatttttaactcattcgcatttaggaagatttattaatttaatttttttatgattatgtgtaagttataattatttaagatattaggtaaaatattgcaaaatttaaaataatttataattactacaatatacataaatctaaaaaaaataaactaaagaattcttttaaatacccaaaaatattatatatatatatatttatataaagaatacataaaaatgggtaggccgaattttttaagagaatatagaaaaagagagtatgtagtattgcaatgtatacatttctatggtagcttatttatgatgtacaaatgtacatgtatttatatttggaattataatttatatcccagttgttaaacttttaaatttaattattgattttttttttatataaattaattattgagtttttcaaaaggagttattgattatcatggtaggtcttatttcccttaaattaattttgtatttgttccccgatttaattggattggacccctttaagcaaaacaaaataataataagggttatttgcggcataacctcctaaagtggtcaggtatttgcaactaacccccaattctaa

SEQ ID NO: 113165 - DNA, 6830 bp, Cannabis sativa
  modified_base (28)..(69): a, c, t, g, unknown or other
  modified_base (295)..(299): a, c, t, g, unknown or other
  modified_base (6002)..(6009): a, c, t, g, unknown or other
  modified_base (6482)..(6488): a, c, t, g, unknown or other
  modified_base (6597)..(6601): a, c, t, g, unknown or other
  modified_base (6667)..(6694): a, c, t, g, unknown or other
ctccctctcaattgtactaccatgttcnnnnnnnnnnnnnnnnnnnnnnnnnnnnnnnnnnnnnnnnnnaacaaatcaaagaacataaatagcgctcttgagatcgaacctaaatccagtgaactaaaaaaaccagggaattaaacttttgaacatataaccatgattatattccactgtcctgacagcactataatcatgaacaagtacatatgttctagacttaatagaatttatacatgaaataaatcatgtgaaccatgcaacatgaaatgcgatttctgatctttattannnnntaaatctgattattttgaaatgggtttatttagggcacaaaacccaacaaggtccatatccagaaagctacaatatcaggctcattgatatttgatgatgggcgatgtcctttatcaaagggggttcaacatgccatatttaaggtgtgtatcggaccctgaagctagacggatcatgcaagaggtccatgaggggttctgtggagaccacaccggaggcctaagtctctcaaagaaaatactaagacaagggtatttttggcatacaatgaagaaggattgtatagactacgtccttaagtgtgatccatgccaaagactcacaaacataccaagagccccacccaatgaaattactttgatgactagcgcctggctctttgcggtttggggaatagatcccattggctccctacctacgagaaagggtggggtaaagtatgccatagtggcggtgaattattacacaaagtggacagaggcagagcccatgaagaccataactgccaagaaagccttggactttgtagtaaaaatcattgtgtatcgatatgggcttccccacaagatagtctcagacaatggaaagcagtttgactgcgatgaattcataagtcatcaaaagtttctatgcagttgcaaggccacaaacaaatggacacgcagaattcgtcaataaaatattaaaggtcaccctaaagaaaaaactgctggcctgcaagaacaactggcctaaagaactgccacaagtattatgggcctaccggaccaccataagaaccacaaccggacactccccattctcaatggtgtacggatgcgaagccgtggtaccagtagaaaccctgatcccatcccacagaagggccacgtatgatccagcaacgaaccaagccttgctggaagaggcactggatcaaataaataagctccggaaggaatctcaaatatggatggcagcttaccaaagaaaggtggccaaatacttcaactcaaaagttaaagataggaaattctccattgggaacctagtcctacgaagggtcttcccagccacccaagagccaggagtggaggtacttgggccaaattgggaaggcccatatgaaatagaagatgaaataggcttcgggaactataagttaaaaaggatggatagatccatagtaccttgggcctagaatgctgatcacctttgcaagtaccatcaatagttatgagaatgttagttggtattctgtaagataacctgtgttggacaaatatatgagatatcccatgcaactttaagctaagtgacccaaaaatttgtttttatgtcacttaagggggtactaaggcataacatgcgtgcaaaaataggccaaatataaagaaaacaaaacaaacaaacttatataggttgtctaaaatataaagaacaaaaggcttggggccgggccataaaaagtctccccttacttaaaacatagaaaacataaaaatagaattgtcttaaaagtggggtgaagagtgaaacaaaagaacaagaagacaaacgaaaaggacttaatcaatcaactcaaggaggaagacggggacccctgcgctcagctaggacaacatccaacttcttgtttttctcccaaaactgagctagaacaaccttgggattgggataaaaaggaagacggggttcgaaattattagccttccaacacatgaacaccccgtcatcaaagtgcttttcgtaatgctgacaagtaattggagccagcaaagcatccctcgcagccttggcagtctccttacgagtctgatcccgaaactggtgaagctctttaagttcaacagtcaaattggttgttgcctccaaattggtctggtgtagctcatctagagacttgagcttcgcaataagttcctagttctcctctttggagtctcaaaggtccatcctggtcgaagcagcgatcttgtccctggcctccagcacagcctgatggttctgctccatgagggcctccttttcttgggcttcattatggatcgccaacttctattcctctgactcccggagcttcttcatcacctcgtccatgccaccaaattccaacatagtaaacctgtggtcaatcaaagtcttggaaagatgaccagcctcaacaacaatctagcagccaacagaaaagagttagaatttcgaaagtaaaaacgtaaaagaaacttagaagattgttacttactgcagtaagggtaacactcatgtcttgaatctggtacacgtggttagaagaagcgcatgccgcatacctcttggtggggagttgggttagatcagcagcgaagtggctcaacatttctgaggcaaaaggagccaagttggaccccatgaagcgtttaaaccagtccgtcaagggatccaaattcaaatcccagacgtccccagcatattcgcctcgaaagggcccatcttgagcctccctaagccatttctttaaagcttctgcctctgggtctcccctagacagttcccccacagcgtaattatgctttgtgatgttggagctgaaccctttcttcatcagggtgagtaggagtcaagatgatgcccggaggttcaggatactcatcgacctcagaaggaatccccaagtcaacacttgtactgggggtgtcaaccctcttcgatttttaggctttggctcgaccataatacctttgcgcttccggtcaaggggagggataacttcttcttcttcttcctcctcatcgatcaagaccaactcttggttcccagaagcttcaacgaccggtccccctggagtcacactcactctacactgctcgggcaggttggactcaagactgtaagtttgagtgagggcatccaaaaagtcctccatgggtttcgttgtttaaaataagtaaaaatttataatgatatcaaaaaaaccatgtatgcaagtatagcacattggagttattcctaccctgatgatctaattctcccctaggaaattcacaaattaaaaggctggtgtcgtcatccccttgaaagctatctgagggaaggaaccagcttgaagtcatataggaggagtgatcgaaaggaattggtacgggaggacctgagcccatccaggaccgacccaaaaagtgacttaagttcaaaaaataaaagtttttggcgttatcaccccaccgggaatggggcatccaaaaactatacaatctgtaatcaaattccactagccttaagtcagcatagtcttggacaggatgaacgaagtgaatgttgaaaggagacttacaagctttggaggtgctagcaccaggggccctagagttgggaaccgaaaatggaaacttgggccagattgggattctctctttccttgcctcctactggaagattcttccaaaagcggcctgtgcccgggcaaatgctagctcctgctccctcttgaatctatacttattgtatttgtcctccgtggacgagataatatcctcccggagtgtcttcacactcccaggattccgtacgttcgagcagataaccttagacaatttgaagtcttccacagactggctctccaagatcaacttagctctcctgtagttggccgtcatgaccaggtcccccacgttcaattcttccttcttgtaaccagcaaacacttgtgcgtggtttagaaagagttgagtgggagcagtgcggtgcatggggggaaccctgacccaatctgtcagcaggtttgggtgctcaaaggctttaaactgatggcggtactcctttacgttcttttgaaagttgaagggtactggaatttcattggccgagtgggtctggagattatataaaccgtctttaaacttgtccccctttttggggaccgacagaagttcataaaaatacagaattttagccagacggggcggagcccagttcctggcaacataaaaaatatacaagcctgataacaggcggtaagcttgtggaataagttggtagggtgaaaggccgacgaagacaaaaaaatcaataaagtaatcctgaagaggaagcatggccccagacatcaaatgggtctggctccacgcctcaaagccattgtaattatgattaggagtctcttcatccctagggagacgatgatagacccccgagctagagggtttgatcctagagacagtaatgatcttttccaactggtgggcgtaagttaatgtcgaatggagttcatcggcttcctagccattggagcgacaggcaaactttttgtagactaccgggccttacatgacctcatccaaggtggccaacttctttagccccttcttcgaggatttcactacggcagtcgcagggcttgacatggaatggacttggtggaggtcgatgatttcttggtcaaacccaaagagactgtgtgtgtgaaggtcacgaaggacttcactcatctgaaacagaaaatccagcagtaagcccccataccaaaccctaaaataaaaaaggggaatgggggtcccctaaccgttgggaagaggccccctccggatgtctgtcgaaagtgggaatccaatgattctctaaggaaaacatcaggtgcaaaacatcctaccaaagaagaagaaaaaaagaagaagagaggaggtgcgaaagtcgcttcgaacacccaaaaacaagcacacaagaaatcaccatgttcaactttcttagaaaaggaaaaacgacagtgcatatacaacaaaattagtaaatagcatataatgacgaaaaaacaaagagcataagtcatcggacaccccattttgggggcaccaccttaacatcagccataaccgccgtttcaaagaaaccaagcacatcagatgaaaatacaatcattcatacttgccctaacaagtgagaaaactatctgaacaggaacttacacaaaggtagcgaggaagaggccgatgatgcttggtgataatatttcatttgacagtggcggaggaaaagcataaggaaatctgaggtgtctggaattttgtcaagtgggttggatagactagaaatcgcaaggtggtgaaaatgacccagtagggaaaagtgtttgcttttataggcaattggggatgcgagacaacaatgatcaggcatcatcatacggtgaatattcacaacgattcgaattctgtgatccaacggatgggatgaacgggtgtgaagaggagaaagggcagttgaaatgtttgagtacctctctgacaccagcattaatggaatagtttgtcaatggacgggaaacgaatcgttgtctgcaaaagaaacaaaaatcaatgatgacaatcataaatactgcccacgtgcctgggacacgtgccatttcatttattaacaccggagatggctcacaagtctcatttacctacgactaaataagacttggggggtaaatgttgtctcagtttattcccaatatacatggttgctgctatgtatgacatgtggacaaagaagacacctcacccgaagataagttaaaagtcgtatggaagaggcaagaagtatggttcgtggcgttagctcccgaacaagtgcaaaaggcacgccttctcctctgagagttaagatataggaaggtacctccaggacgagaaggatctacttgaacagtcaccttgcatttaatgcaacatggggaaaacgtctgggaacgcccataagaggannnnnnnnacatcgtaagcctgatttagggcgattatacgataatcaaatgagctggtgatgactccattatgaagaatcacatcaatcaaggaaggatgaaggctaatctcacctaacctctacgatgcctactatgtgggtaatgcatgctctattttgtatcttttgggaacttgtgcttatccataattggctctcaaagacaagttacctcttttcgactattcccaccaatctctataaatacctctgagaaaatgaggaaggggatcgaaaaaagagagagaaaaaacacacaaagaacattctctgtaaggaaatactctcattaataatagagactcgtggactacgactcattaatgcccgaaccacgtaaaaatcatctacattaattatcccaaagctctcattattatctcatttaattggttgccgaaaacctcagtcaacactaataattaatgatcctctatagnnnnnnnacactaaatagggacaaatttaccattacacccttcaatgtattttatccttaaaacaatcaactacctataaataatatttcagcaaactaatataatcactgaaatnnnnnctcaaccatttatctctattaagccaagctcgaaagaaattatcgtttcacttctatgtctagatnnnnnnnnnnnnnnnnnnnnnnnnnnnnagcgctcccactcagttgaactaccctgtccttaatctatatgtcacgtgaagatccattggtcaactttaacgaacagattgaagaacataaataatgcaactgaactagaacataaccatctcaggattgagat

SEQ ID NO: 113166 - DNA, 1108 bp, Cannabis sativa
aaacgacaatattcgcttctgaaaaacttttacatgtctctccagaatacaaacacttggccaaactcacccttaaaactatcacacctcttatcttaacacgcttacacctcatgataatccagaactttcaaactcatttcgccatctccttcaatactaagaaaaggaataacatttatatatattcagagaaaataaagtccactaatctttgcatattatcaaatttattagatctctattatacctagctgctaagctaatatatcatcatgtcttctgagttgagtctagtaaaatatgatcacaaaacaaggtcgtcgtcgtcgtcgtttctcaactcaatgtttatgtcgacggtgaattcggcggccaagactcttgtgtcggtgacaaaaggcggtattcataaccaggttgggaagtggaagcctcgagatcacttccggttcatgatgatgctgatgacatggctaaccttgtgggttcttagggttttgatggataacataccttcttgttctctctcattaatgggatattcttcttattcatctatgcctttcaatcttcttcaagctttttcacctttcggattaatcgatttcccgcgatcagctggatcgtcaccgacatcatcttcctcggcttctttgtccgtttcttctttgcagatgattctgaacgagggtgttgaggctgtgcctgttcaagctcttggaagagccctatctcaggtaataataggataaaaaagtgtatatacttttgtaaaatgagggggccattcaattttattatttaaatgaatttcataagtggaaatgatgcatgataataatattaagatctcacgtgtttaatgggttttgctccttttatgtcacttgtgttttagcaaaggatattagaatttggaggggagagaaattagctaatgaaagtttaattattacagagaatgttgtacaaattatattaattgatatttcatatagttataaatttatattcatgtatccaaaagaaatattatacttatactaaaaaaatatgtagtctaattttttaataaagattattttttttagaaaaagagtattta

SEQ ID NO: 113167 - DNA, 4323 bp, Cannabis sativa
tggaggcttgaagcggggacgttacagataataccacaaatgaacataatcaaatatatttatcatcatttatagtgatagtgtggtggcaaatacataaaatattgctaaaaatacaatatttctttttccaaaaataaaatatatatttaaaatatttgacgaggagcttatgtagccaaattatctttgttatttatattaataaaagtgatgcaaaatgttatttttcttagtttgtagttacattgaatgaactctgtgtcctatatagggatgcacacagagcgagaaattagtgagcgctccccccatccccctctccatcgggaacgaagtagggaatccactaatataaaaataaagtttatattaaaaatttaaatgtatacaaaaatattacaacacaaaattaaaatattgtaaattatttattatttaatatgttagttattatttaaaatacaacttaaatatttttagaaatgatattatatacaattaaactcttttttaattaatggtcatttggcctaatattttttttctcaaattaattgtaatataattaagaatatttactcatttcgcacctatttttatcaaaatatattagtatcttgtattttaaaaaatatcatctggtactttatttatttattttttattttttttatttttttaagaatgatactttatattttaaaactgtacatatttagtactttaaatttaaattaattaattgaaccaaactattttttgttatatataactaaataattaaatttaaattcaaattcatataatttaaaatagtttgatcatagtgtagatgacatcgttattattagaaataaactggaggcatctcatcctttaagtctttcattcatactcagttccgcacgaatgatttaggggtgctcaggtttatcttgggagttgaagttactcagagtaaataatgtttttttctatctcaaaaaaagtatgtacttgatttgttaactagcacaggaaaattgggagcaaaatcttatagtactccaatgaatccagttgtgcatcttacgcgtgatggagaaccatttgaagatcctaaaaaatatcgcaaattagttagaaagttgaattatctaactatgactcgtccagatattgcattctcagttagtgttgttagtcggattatgttttcttcaacaattcatcattgggtaatattagcaaatttttaattacttgaaattggaatagcaagatgagatattgtttacaaggatcatggacacacccaactttaccgtttctttgatgcagattgggcagactccaaggtagatagacgatccactcctggttattgtgtatttgttgggggcaatctaatctcttgaaagagtaaaaaacaaatgttgtgtctagattcagtgtagaatcagaatataaagttaaggcacggtctgtgtgcgagatagtatgactgaattcaaatttaaaacgtcaattctagcaaaattatggtgtgggataatcaagtttttcttcatattgcctcaaatcctatgttccacaagcaaactaaggatattgagattgatagttattttgttcgtgaaaaaactcaacacaacctgatctccccgagatatgttaagactagagaacaattaggatatatttttacaaaggcgttgaatggggtgcgggttgattatctatgtaacaagctgagcatgattaatatttatgttccaatttaaggggggggggtgttagaatatattagttatattgattttatttaattagtttcctgttaactctaattacttagtttcatatttactctccctaattttgtatataaatacatacttttctattgaatataatacataattcattgaccaaatcttacaatcaagaaaatttggatttcgttggccccgaggttagtgattttattctatccttttaaattcagggaaatttcttaaaaagatcaatgccacttctatcactctcaatcccaagactacatgttcagataatgtgagtcactttcgacatatctcttgttgcattgtgatttataaagttgatgcgaagatgatatgttcaaggcttcgagaagttctactatatttaaaagcaaaaaaaggggcgatttgttcaaggacgatacatagctcataagatcattatatgtgaggacatggttagacattatggaagaagaattgtaagcttagttgtatgatcaaacttgatctgaggaaagtgtacgacacgattgagtgagactttatagaagagatgcttgttgcatataagtctcctcataacttcatcgaactcataatggtttgtgttagaactctaaaattctccttgttgatcaatgtggaaatacacggtttctttgcttctaagtgggaattgagataagaagacccaatgtctcctcttttatttgttctaggcatgcaatacatgtctaaaatagtgatcaaaatgggttcttggccagggtataaatatttcgacaagtgctctcatatgaaattaaatcattcgtgctttggagatgacttcttacttttccatcatggtgattatatatccatattattgatcatggccggccctgagggtaagcgagctaggcgtgcgcctcgggcctccgaacgctcagggccccaaaattgtgaaaaaaaaaattattaatatgtagataaaatattaaataaaaagaaaatataacaaaaattgtttggtctagtggtaatggatcttattgtaaactaagagatcaagggatcaattcacaagccctacttttctattttttttaaaaaaaatatttaatgaatgtatagttatgaaagattgaactttggatctcttaagagtttttaaaatctttaccaatacactaaatcattagaattatcattttgataatagttaaactatatataggggtcccaaaatttgacttcaccttaggccccatataccttaggaccggccttattgttgatgctcagaggtctcaagttattttcattttcctctggtctcctaccgaatgatactaaatatgtagtttactacagtggtacgattgatgctgatatgaacagggtgttggaggtctccgaattcacaagaagtcagttacctttcaggtatcttggcatccaaatatgctcaaagaaaaaatatccaatgcaaactctagtagtattctagagaaaatgttacaaaggatccgagtttagagttcaaggaacttatccaatatgagaatagttaccttaattaatgtagtcttgatttcgatacactcctacgtactcgacttagagaatgatattgcctaagaagatttagtgaaatgttgaagccatttgtagagctttttttggaagggaatgtcttatagctcaggtccaagactagttacttggaataatatgtgtcttccaaagaaagtgagagattttgggattcaagaaagtaatatattggaacattactgccctgagaagatatgtttgggtgattgccgctaagaaagataacttgcttgtgagatggattcacaatgtgtatttaaatgaccttaattagaagagattggcagctgtcaaggatgctttcaaaaccaagattgatttgaatgtttttactgcaaaggtctataccataaaagtagggcaccttttgcttttgacacatgcaaataaagtccattagagtactattgtttgggaacgattaagtattcctaaatatcgctttattctttggcttgtaatgttgcagaggctccacaccagagaccagataagaaagtttgatcccatatagatctaacctgcttattgtgtggagaggctaatcttttttttaatgtcattatagcagagcttgcttgaggagaatcaaagattggttagagtggagagcacaaacagagaaactagaaagatttctcctctcaattactcgagaaaaagaattgagcaaaagctaggaagagtatgctatatgcagcagtctcaattttagtttaacacctatggcgagtttgtaatgatgtttttaggtctcaaaaactatgacatattaactatactgtacaaacaattaaagagattttatattaatcatattgccactataaaaaaaaaaaattacttttagtgacaacattatagtcacaagataaattttttgtgactaaatgcgacttttagtcacaaccaaaagttacttgtaactaaaatatattatttagatacaaattgt

SEQ ID NO: 113168 - DNA, 806 bp, Cannabis sativa
  modified_base (746)..(763): a, c, t, g, unknown or other
ctagatgacactgaagttgcacatttggagtcgaaaaagagtggtgagacaatgtgtacaggaaaattttaactctccccttgagaaaacagcctttgtgacattgtccttgacaaaacattaagtactggaatgaaattccaagaaaacattattgtcatttgtaagttgaaggacactaacaagattcaacaatgttaggaacttttatgatagtatttaaatttaaaaagaatttagaggagggtaaagaggccttaccaacatgggtgatgtggagtctcttaccatttccaatagttaaagcttctaaaccagagtagggtatcttagagtcaaatttctccattccttgagcaacatggtttgtcgcgtctgtgttagcataccaatcataatcatcaacaattcaagaacagagctggaggaataggcctgtggtgcttcttgatcatcaagttcagtaagaaaggcctttgattctccaactttgggggtaacaaaagccttattaaatctgtaatgatacacaacgacaatgtgtctaggcttatggcaaactagtagccgagggattgagggattgccaagaccatataatctttcagatggttgattgttataaccattggaacctcaaacttgatatctataggagggagtgggagcaccaggaccgtttcttaaagagtggatactgagatttgcagacatcttggaggcaagatgtaacaccctaactagcnnnnnnnnnnnnnnnnnnttttaaacatactgtgcagcttgttgctaatcaacgaggttta

SEQ ID NO: 113169 - DNA, 5085 bp, Cannabis sativa
  modified_base (4372)..(4372): a, c, t, g, unknown or other
tgcattgatccatggatggagaagcaattgggccgcagttggtcgcttctgaggaacaaaatcaaggatgggaaccaggaattctgtcatgtcatttgcatcttgctcactgaactcgtatttctctgttagaaccttgttcaggggccaaaagcgcaagcgacgaatatgccgcaaatcaccatatctgttaaagtaatcacgagagtaacgacctcctaaagcaatctgagaaaatttgccagcattttcaagttagaagaggttccatgaagaatttattagtgggagtgataataatctcaccttccggggcatcattccaagaagctccatcatcagtgctaagtggtcctgaaacagcaacatattacatatttttaaatcagctacagaaatactaaaacactagaaatctttgtgattcatgaaatacatatcaaccatcttgcttgaaataaggaatgaaaatcacgaaagttagcaacatactggtcatgtaactacgaataacagtttgaaatcagtgcaaaataacatagtttgctgtttcaagcaaaatcaaatctaatgcacaaattcagggatttgtttatctgtttctttagaaaatccagaatgattattcttcatggaagccccaagttggagctttcagcatgtttgttcctgagattacatgatttggcaatttggtccctgagacctttcttggcaattaagcagacgagttataaacatcatagcaatcaactcaaatcccatagctatcaaatgctgacaatttcatctttaatgtcacttaaacttgcaaagtatgtattaaaaaattcttaattaatctaaaataaaaacacataaaatggttgtctcgtgatagcatgatccttaatccatgccaagggttgcttgagccttaatgcatgtgagtttaaatgattttcttttaatttaattaatttaagtgaaattatacgtaaattatctattttctagtcagttaagttaaaaagtatttaccaaaattcctaatttaaccttcaaaaaaacattagcatctgacctacacatggtcatttccatcaagcatttgatagagtagatttgatttccactatttttgaaccttagggacttgattgtcaaaaacaattcctaagagtgaggaacaaattgtctgtccacaaaaaactcaagcaaacatgctaagaacctttagaattcataccctgtgagttgagatggtgtttgaaaaatatagcataattaaacacaaagaagaaaaaaaacacaattaccaggtgttagactccaggattagtagaagagggtatatgagtcattgtatcgactattgaggggtagggacctcctaggaagtcctcgtgttgcacccctaaaacttttaaatgctatgtgtgattgaaatctatcagaaaacactattgaggggtagatttgagcgggattatacactatatataaaagaattagggaactgtaggttatgcatgattcaagtatttactctgcatcacagggtctgaaaggacctatagtttgtctacttttggctttgattcaataatataacgtcatttctggttccattctctattcctttactgctctattgctggtgtggattaagcttgtgctcaggtgaccagagcaaagcacgagaaaattaaactttaataaactacttgacggaaacctgatttgataatcattcctaattactttggttcctatctatgagaacatatttaagaagagtttaaaaagaaagaccattataaatatatatgtatatatatatatataaatgtataaatgtatgtatatttaaatattcagaaggaatcttttttctgggttgaatgaaagggattgaatatacatcaaacaaataatcacaacagcagccaaattggtaagatttactctgttttagtcaatgaattattcaattcaaagcaatatgaacttatcaatgctcagtgaaatcatgagtaaattcaaaatgacaaagcagagtagaaacaaaagcattacgtaatcataaatgataagtattggagttcatccatacatacctcatctctatcaaagttatcgccactgtgaggatcaaagagcacatcaccagttgcaagttcaaaacaaatgcatgcaaaagaccaaagatccgctgaagtagaatatttagatcctaagatcacctccgggcacctatactgtcttgtttgaatatcattcgtgaactgtttataagtccaacaagcattcccaaagtcaaccaatttgcactttaggtcagctgaagccaaaagcttttttcttgttgagcgacttcctctccgattgccctgattttcagaacctgagcctgagccctttgtcccatcagcatctgatgatctattattcacgttaacagaattagtaggatggtcttccactgaatccgcattcaactttgcattggtagatggctctcctgcatcagatgttaccgggtcactatcagcttcccctaatacttctttgtctgcacaaccctgagctgcttgcttagcttttcttctaatattattcttgtgattcctagtcaaatccccatttgatatctttgaatcttttccaaccccagaatccattgcaatcatactatctatactattcagaagaataggaagattacctgattttctaggatccttagacgggtctatagttgacaccaacagtatattttctggtttcaaatcggtgtgtataatagaaagctgtctgtgcaagtaatccaatcccaccagaatatgataacatatctccttaaccatatgtaaaggcaaacctccgtaatcagagtacttaataagtgtcaacaagttatcacccaagtactcgaaaaccatacaaacatgctgtccgtttggacctgaatgcttaaaatggtccaaaagcttcaccacacatttttggtcttctgggtctccttctgcaatttgtttcaagatacttatctcatccatcgcagcctcggtgtaatgagcagcactcttttgcactttcaaagctacatatctctagtgttcatgcaatatgaaacaaaagatagaagaacccatttcactaatccttcgtttagttttaaaaaacaaaagagtacagttaaaaaagacaacattcttatcatattgattctattcccttggattccaaaggaatatagcatccatccactggtttcattctactatacatttacacattccttaagcagcaaatagtataattttatccattttttttcataggcaaccaattataacactaattaactccatagtatataacaccactagtcaagcatattaactccatagtatatagcaattttttttttttcctttttcttctttttcccggaaacgagaagaaaaaaaaaatcaaatcaatgaaagagacagaagaataaagaaaggaatgagaagtacagattgctgagtatcccaggcgagccaaacagtagagaaatgtccccaaccaagcttactctgaacgacatatcgaccactcttaaaggcgtcgccgactcgaacggcgtggtagccaccgcggcggtagtcctcggttccttcgtcatccgatgtgtaatcgctactctccgttcgatcaacatcatcacgcttcccctccatcttcccccaaattctagggttttggagctttgattttgtggttatggaaaaagagattaagagataaataatttttgaataaataaataaataaaaagggtggaatgtgaggaaagatgagtaaagaaagaagtttcttttcttcttcttaaatttcgcagcttttttgtcttagcaaagtggggagttattaggtacaactggactagcgagagactgctttggaatggattggatcaaatcaaatcacatggtccagtgaagtgtccttctcatcttcacatatcaatttctattctttcttttttttttttaattttttgggcttaactaattttgtgtttatttatttgagaaagtagactttatttattttggtattaatttaatttttttttatgattattgtgttgttgactggtgtattaaaattcctaataatttataactaataatttataatgtataatttataatgtaaaatatatttatctttatatatttatctttatatattaaaagtgtctatttaacggtattttttggtttaacagaatatatgaatattctattaaatttaacgattagtttgatctcccgttaacaaataaatctaataattaaactcaaaaaattaaataatcttttaaatattaataatntctttttaaattaaaaaaatcatcttaaccacttatctctctaacaaatctattttgggagaatatacttaattttttttatttattttttaaaaaagaaaaatctttattctttgtttaacgattattgttttaacagtgaaacaaaaatacatctaatttaactatttttcaatgcccacgttaacgtctgttaagtttttctaattgaataaaaaaaaattaaaagcaatggtttgttccgtgtaaatcgaaactgaagcccaaaaaaaaaaacgatttgttagatagaatcgaaaagaaaagatgttttgtcctctgcatatcgaaatcatcgaaacccaaattcaagtcgtcgttggatctcccttcgatttcctccatctgtctatcttagaggaacaagagaaactataatcttcatcatctgttgaggccatattttcaattttttgggtgagcgtatcgattaaggtatcaatttagtaagatgattcagaataagtatgttaaaacttatattactctttctgtatactttacttcttttatttttgtatattctgagtgagtactaagtttattttaaaaaaggtgtgttcctttctaagcacaatgcctaaacttatatactcatgatgagtttttttttttttattcaagcgtttatatattacacaatacataacctgggactcgaacccaggacctcc

SEQ ID NO: 113170 - DNA, 2317 bp, Cannabis sativa
atccctttatatagatgtagtttagggttgatcaaggtctgagagttagttacaatttcggttgtaactaactaccagatcttgatccactagaggcgaagccatataggatctggtttggttttatttgtatttttcttctcttcttgtaaactgtattaataagtgtgacagggggatctaaattaacaagtgtcatggatgtaaatttccaagaaaaaaaaaacaaattatgttatacttaatagcccattgagcaaaagagaccataatttataagaagtgtcatgatggcaaatcttctccgtttttgtgcaaggtaccaccttgaatttatagctctcttcttagtcactcgtacacagttgcagtagagaccatatttttctaacttaagaggttgtcctttttataaatggtataattaagtttaagtcccatttcttcatcattccaaatattggctccgaataaaaactctaacatatataagttgcttttattgatcatgacttaccacgaaccatgtgaagaagggtttaaaatttcaaacttacactctcttgcattaattaatatatgctctaaatcaagatacatgaaagtggtccaatccgaaatgggatttggatgtttgtccaaatgaacaacaaaccccacgagttatattgttcttaacgcccccaaaagaaaagatccatctcttttctcacaaaatgaatcttttcttttcttcttttttcatttcacacaagtcagcgtttgcattggaaacccaatttttgtacaaactttgagccagatttcacataaaagaaacaacttacccctcttcgtcttgttatccatcatgggcctaaacttttgccgaattgtactaactaacaatatttactagcaaagctgaaaagggccccatgaaaatggcctctcgtgggctgccaatgaatgccatatgataccactcttgggttctgatgcctaactgttttggtattccggctaaaaccctttttgctattcatgctgagtgatgagtctgtctgattctctgagtgagtgtcatgtgttttttttatttttgagctaaattttgagtttggtgcattttgtccatgttttggatgtggaggtttcattattgcctttttcactaaacaacttaagagaaaacaaaatagtatttgtatatgggaatcagaatccttttgccttcgactatattatatcatatattcatattcatatctatggtccttctcaccttttcacctgtcttttgtcttgaactttgaaccaaacattctcttttttaacacatttacagattaagacatataaagagaagaagatcccattcaagagtttcactttttattgttatttatttctagtatggtctcccacgtgaatattgggtccagtttcctccttaatgtgtcctggctttggatgatgataattgatatgtaataaaataatcacatgagatcaaaagattttcagcttgttttttataactgagcgcataaaaagttcaactctggaaaattgacatagcaataatcacacaataaaattattttggccttaacatggaggagcaaacaacaaatgaaccagcacaaaagaaagatatttgattacatatatggagaaaatctatgtctatgaatattctcactctctaactcactcaaaactttcatacattttcccaaaagtcccttaagactccctctagagcttcctattctaattcttcactagtagtgctcagtgacccggcttcagtaacatggtgcaacaccaaatcagaaaatattgaattcgttctaattgaagattttttttgttaatttatgacaagtgtattgtggttacatgttaagtatttgactaatttttgtataatttataatgctaaatatttactataattataataagagacaaaaattaaacgattttacaaatgaaaatgtcaatttcatagataataaattattcttaaatttagatcaagttataaattttatgagtttttatattattaaagcaaaaatataatattttttcaaaaaaatatcatggaaaaaatttaagaaaaaattaaaaaatataagaaaattaggtaagggtaaccaatacttttgggtaactagttactataaggaggtaatcagttactataatgagtaatcagttactaggggtgttcatccaattcaatccgcactattttgctcatagtacatccgatccgcactaagtgtggatttcattttttggatccaatccaatccgcacaatagtt

SEQ ID NO: 113171 - DNA, 1289 bp, Cannabis sativa
ctttcttaatttttatttagccaagtataagtaaaagtttaattttaacgtacttaactacactccttgtgggatcgacctcactcctggtgagtttactacttgaaacgatacgtacacttgcgtgaaatatcgcaacacttttctgacttcggtgctctacgagccatcattgattgatccagaatcggttgggatctacattgatcaaatcaagctgaaacatcgagagtgatgagaggcatctttgatggaacagagagcttctcctccagctctggcgaactgtgattctctcatggtggtgcttcactgccatctctgtgagagtcatattaacgttgatgtgccaaacgtcctcaggaacatccactgggtttgtgattctcactggtttagtagagtcgtcgacctctagaacaatagttggggcctaagatgtcgaaatcgaaggtgtctctgttgatggacagttgcgttcaaacatagcgtgtatttgcttcctctaagaattaaaatactggtcaatatgcaactccatagatctacgaattgatgaagctcttcgtcactcatatttcggagctcacaatgaaatctctcgctgagattctctcaatgaaagcaccaatattaaataatgagtcatattcaatttcgtattccttatttgcatcatggaaacaagagacaaagcctactcatatattccctactttgggtatccagaaattattgtgttccaggatacaattgttctgttgggcattccatcaaacacattccaagaagcatcatgtaatatttgattgcaaaaggaccattgtagtgtcattttataatggcacaatataaattttgatcattcagtgcaaccaaacatagcaataattgtttggtttgtgtggactgtagaatatacaatagcacacaaacaaaatctaaaagtaaagacagaataaacttaaaatgtcaatttagaattccaagatagatactggtcactgtccctattgtgtttcgactttagaggatcccatctcaaatggaggttaaaagggagagagttcaattcggtttttataccaagcttaaatttggaattaaaatgtgattaagatatacagattacatctcaaatccaactgacagtaaaaggtgtagtccatttatctcatatatatattattttattttcacacattaaccacgtgagataaactctaatatgctctcacaacaaaaagataattttttttgtaaagtctttttttggcaagttagttgac

SEQ ID NO: 113172 - DNA, 2494 bp, Cannabis sativa
ggacgaactgtagctgcagcagcaacattagctgcaagaggaaatgggtctttcttagctgctgcaaaatttggaagagctggttctgaaaatgcatacgcaagatggatttctggagctcttgccatccatgctgctggtatataatatactttgtatatacgaaattatcttgaatatattaattatttctttattttccgatcgcttaagaatatagtcttttaaacaacctgtcctgtgttagttagaagaaataaaaatacaaaaataaaaatagaaataaaattaaattaaatttaatatgtatttacaaaaaaagaaaaattattaattttttttcatcttcttgcattagaatattcttttttccacccatttccaatactaatgaatgaaatttgattattttctattccattctattatttccaaccaaatgcgcccatagttttgaagtttcatacaatatattttagattgtaaaaaacataaacatatctataaccaagtgcaatactttatgaaaattgagacaataaaggtgaggttgattgttctctggttttgactctatatagaatcttcttttctttatttctttagtaccctgctttcaaaattgagtctttccctgtttacatatgttaatattagttaaaatgaaaagggctataatgtctcctgcttaagtttgtgattttcacaagggtcaagtataattgcttgattttgatgcttggggaactgtgtcatactttataatggtttttctcaacaatttgctgagatcatcaaaattcagtactactaaggaaaaagtgctgatctttcaaaatgtcatattttctactatcttagtacacaaaaatccaagttgggatcacagtagatgatgaaatatgataggccttaggatactaaacaagaggagtatatgagtaatgaggggatggtgagagaagagaattgtatggttaagtgagcataacactgttatcttcatcatctatatcaatataccattcactattttcctataattgctacttttcatactaaattgactcaatgaaatgaatatactctaaaatgaattatgaatggaatagtgaagggaagagagtactctctactaaaatgaccaattgactcaatgggctagcaatgatctattttagcatgcatttttttaacaccttcaaactctttgcctaatacttattattctatcaattttctttttccttcttttgtagcctacatggtactagaccaggaggttcatgctgcagaggtattctgttctgagtttctcaaaactattttctaatgatgttttttcttgcttgctttattctgaatctgaatcttttgcttctctatccagttcgaacgcacttttatcgctatcaagcctgatggagtgcaaagaggactggtaagctaacaactatacaaatcttaaaaatgtgtttatgttaatcaaattgtcatggggagatctcacttaagaccatcttccataatctttgattcatatcattaaatgttgctagatttctattagagtttgaatcaaaaatcccatcttttttcacaattttcttctgttattcatgccaacaagagggatttagaacaattgtttgcattacatggttcttatgctaagccaatacctgtatgtgttttttttccttcttattcagatttcggaaatcgtagccaggttcgagcgaaaagggtttaaactggttgccataaaagttgtggttccttcaaaggaatttgctcagaagcattaccatgatctgagtgaaagacccttcttcaatggcctctgtgacttccttagctctggtcctgtcattgctatggttagttagttagttagtttcaacacttaactattcttttctcagttttttcactaaagttaaaagcttttctgttttttgtgttaactgttttcaggtttgggaaggagaaggtgtgatcaagtatggtagaaaactcattggagccacagatcctcaaaaatcagagcctggaaccatcagaggtgatctagctgtggttgttggaaggtactacttatgttacttgatacaaatcttcatcttctaatattctctaatagaaataaacaaaagtacccaagcgaaccgttacctcaaatggtcaagcatgtgattttatgttatgaaactcaagtcaagtccctcttaagtacctacatagcaattaactcaaatcttcaaatatttataaaaacattacccgagcgagcaatagctcaaatggtcaaacatgtggttttatgttatgaaactcgagtcgagtccctcttaagtacctacatagcaattaactcaagccttcaaatattataaaaacagtattcgagtgaacggtaactcaaatggtcaagcatgtggctttgtgttataaaattcgagtcgagtccctcttaagtacctacatagtaact

SEQ ID NO: 113173 - DNA, 1350 bp, Cannabis sativa
ctaattgcctttactaattcataaactagagcggtcattacagtaatgtaagcatagaaattcaaatttccctaatttaatagtattagcgtaccagtaccattaccagaatatcttcaataatttttagtcctctatttttaataagaaagtatatatctttctcttttgaatctctctctctaaataattataatggaagggatttcggtggctcagatcgataggaaatcatccatagaaagagagccaagggctcctagaatggatcaatttcattttacaagggtataaaagtttatcctttaaataaatggtttcttgtttacaaccttgtatatatataattaattgatcatgttggtcgggtttgcaggaagaagctttatatgttctgaaaactaggtctgtggaagaagccatgaatatcttcactgaggtattattatataaccatattgtatattgtttgtttttttacctttctttctaatctttcttattttctattttgtttaatatatcaaattctaattactgtcattttatgaaactattccacttaataaaagggcttaaagccaatgggcagtgcggtggcgttgaaaacaggaacactagagatggttctaagtgatgaaatcgaatttggattcatggaggataacttagaactgtcatgcgatatagccacaacacctttctagcttcaccctactttttttttttttttctattttgctttttagagttatgtgctagttgtaattatacgcatattccgttcttaggtagtacaaaaaatattgatgcaaatcatcaattgtttctgttgcgatttattatgatacatattattagtttcttgactagtgaaaaaaaatggccccacaaaggaagaaaataaaaaaagaagacgtgttgtaaatcagcttagtttaatcataaaaaagaaaaagaaagaaaatgattaagatatggtatatatgttatgtataatgatctcagattattaataatttgcaaaatgatttattacaatctctaaaatgcagtgtttagattggattattttttttttgaaatggtccaagctaagtgccaagttttttatttaccgtatacaatcttttgaagtgaaagtcactagaatgtattgtacacaaattattgccaaagaaacatgacaatatgaattatgaagcatatagaattttttttttgaaagaaatgcaaaatttgttaataaaaatttaatgttacagaagaatttaaaaattgaggacaagcatctgtccaaacacattttcctaaactagtaacagaggttgtgtgacagtcagtagtccc

SEQ ID NO: 113174 - DNA, 2173 bp, Cannabis sativa
ttttttttttttttttgttttgtaaggatgggcttgagtgtatgcattcttcaaaacctttatcccatttgaatgcttgtggtgtccacccaaaatttcagtattgtagtgttagatgttgattgattgaaaagcattgctaacatgttctttggttaggagcaaattataattttccatggttttctgcatagtgatagtccaatctaaagctaggaaaagtcacatatttggcaactgaaaatataaatatttttgggttctgatcaagaaccacatatttgggattcttcaatgttaaatggaatacagaataatgtgaaatgacatttgttcatttttccattattgtccaagtatgcatctttgtaacatgtatataaatcattttgaaattttttgtaaatgatgccttgtggggcactactgtttgaatgtgaatatgggtaatgtaatttgggttttacaagagcatttttttttttttaaaaaatacttgctcagatggataattcaattggtaaaatatgtgggtgctatatactatttgagagaattgattgaatgtcattttaaaaatttgaattgatctcatacaaatggcaataatgttatcttcttcttttttttttaataaaaaattaaaataaataaaattatataatttataattaaaacaaataatatatttataatattatttttaaagggtgttatattattagaatatttatagaagtaaaagtatgaaaaataatgtgaaagagaaataaagaatgttattattgaagatgcttataattgtcaaaatacacacatcaccttaaaatatattttgtttattattttctctctcattaacatttgatacattttcttacaaaaattactctaatagtgagcaactccaaaaggtacccaatatagtctcacctactacttttaaattttatattatatataggagttttacttcaaaatagttttttttttgtatttttacgaaattccacatagaaatctctattgcaacaagcgctgcaacttacattgtaacaaaaagtcgtatagaaaccctattgcaactagcgctgtaactactttagaaacccaaatcgtaaatttgaaaaaaagaaaattaaaaaaatagtatatgaagtaattctcataggggttcattcaaaagattaattggggataaagtaacttttttttcaaatttaaaaagaattaaataatattacttattttggacaataatattcataaaattaatcaaaataaatgtgtcaaaaacaattttatgatcaaccccgttgaagatgctctaagatgtatacttctcagtggaaagggagggtagtcaaggaaagggagggtagtcaattagagtctttaggagttgaaagttttcacagctatatacgattataaagtaagaaatattctttgtttcaatcatcaatttgagtaccctttttgtttttttggattatacataatgattgttgaagataataataatgaaggagttaatttcatcaatattttcaatcattctttcccaacttaaagtatttggaaattggatcatttgatagaattgtactctacacaaacgtttgaaacactttatttttattattggtgaggaaatttaaactgacttgttggaagttggcatttaaatagaagccttactcattagtttcttcacgggtgagaactcaaataaattaacccatgtctattttgctattttgatgatgaaacattctaattatttgtccttgtgttaatgaaaaaaaaaaaaaaaactcaaatgaagaatgtttttatgctaaattatagacaaaatcacttacaattttatgctaaattacattttttttttttgtgaaactgagaataattttattatgaaaaagataaaattttaagtgtccaaaagtcaacaacatacattcactattctcaacattacataactgcaatatggacccaaaggataaagcaatttgtttaggttgaatccaaatatgttaaattacatttgaacaattataagtgattttatctagggcattttacaattttgtatatattattttaattaattacaaaatattgcaaaaaaacttattatcattttttcatacacttttatatataa

SEQ ID NO: 113175 - DNA, 1619 bp, Cannabis sativa
  modified_base (26)..(34): a, c, t, g, unknown or other
gtatttttgtaattttttttcctttnnnnnnnnnttctgtttttttccctaattttaatgctaaaaattaaatttagtgttaaatcaatactaaaagaatataattttagactagtaccaatatttttttctattcccatcacaatattaaaatttacactaaaaaatattctttattattatattatttattaaactatctcacattaatatatataaagataaaaatttattcatacgtattatattaatataaaaaaaaaagtgtagtttataatattctactatttttaatgggacaccatcaactctaacatagaataacattttgagtgttatattgaagcaatttggtgtctaaacttcactataatttgtgttcgttttttcaatattgacggtgaattttacttgtgatcaatcggggttatcccaaaatttataattaactcaaacaactatttcatcaaatgattaagagaacttacaaatatattagaatttaggtaaatatttataattttactgtcacactgtaaaatttacttgttgtcttttttcttttcttttatactgtagacaccaaatatcaagaacattatctccatctttcacacccatgcatagaaccaccacaataacacaaaaacacttggaaaataataattaattctggcgagattaagcaaaaatagtgaaatcgatgtcaaataaataaacttagcaaaatacctgaaaaacaacactaaaacaaatcaaacaaaacaaaataaaaaatgattaaaaaaactaaccatcttttgtacatcttcaacatcagatctaatagtggctatatttgcaagcccagtcctaaaaaataagaataaataaaaactactaaaataaaattaacacaacacaaaaataaatgtaaaataatgaagcatatataaccacttagaaaaagataaaataaccacacacctcaaaattcttttgctagtgagcttgtcaaatgtatttatacccgaatttgaattaaaaaccacaaaaacaaccatatatagaaggaagaataaatgtacttataacctccatctttcacacccacaaatagaactaccatagaagtacgagacatctagaaaataacaattaattctggcgaaatggaacaagaacaatgaaatcaatatcaaataaataagatgaaaatacaatgaatagtgtaagagaaggtttctcaacttttaatcatgaactttaattaaaaaaataactgttacaaaagtgatatgatcaatcacattaaaacttttacaaagttcaaaaataataacagaaggatataataaaccttggctgacacatattaattaaatggaataaaatttattttttataacaaacttagtggataatatatattaagacagtaaaaaagtaataattaccgcatagcagtaaaaatataataaaaataaaatatatagtgcctagtgtaaatttttcaatattaaataccaatgcatacatatttattgatactaggtgaatgtacgtgccgagccacgtattgctagattcatttaagattttggtctttttaagattttgaatgtattttatttttaaag

SEQ ID NO: 113176 - DNA, 2648 bp, Cannabis sativa
  modified_base (2363)..(2363): a, c, t, g, unknown or other
  modified_base (2461)..(2464): a, c, t, g, unknown or other
  modified_base (2584)..(2592): a, c, t, g, unknown or other
aaacaactatattttgatcaaatatacagtacttttgggtttctccattgctcgtaatcttcctgtttaagcagttagtaatctaccaaactttgcctcgcaattgcagttataatctgccttaagcaaacttgaatatactttaaggattttatcacattgtatattttaaatttactcgtatgaatagttaattatattatctatctattttctaggtttaagtacttttatcaaggcatcgtgatgcctcattttgtactttcctagctcacgagaaccgttagtattcagttttatacacaaccaccaccctgtacccagcccagctcacaactcaaaccacagactcaaacacctaaaaccaaaccacaataacaaccacaggttaaaccaaccatatcgaacaccagaaagacatactgagaactcgcagtcctctaaatctgagaaaaatcccgctcaccacttacacaaaccaatcacacctctgttcgcacagcctgtcgaatggagctctggccaaccgcaacccctcacaaaatagagcaagctttgaggtttgccgtcgatacgttggcactgtcgtcaaactcgagccaccgccctacaatctccaagaaatatcgtcttcaactgcaccgcgtgaaagactacaccctttcaaaagagggactagacctaagcgtttacagggcagcttttttaaaaaagtgcatcaatacattcctatttgttttgatatttagagagttttttagtctattttttttcataatcatatacgttatatttatttaagatatccttcaaaattttgagaaattcagaataatttatactataaaaaataatattcaaacaaattattttgtacacgtataaaataaaagtcacgcgtgcaacatactgtttgaactacatttttggcgtgttaaatttttcaaaatttctcaaaattttgcaaggtgtcttaaaaactacaacgtacacgaccatggaaaaaattgaactaaaaaattctttcaaaagacaaaatagatagcaatatatagatatacctcttttaggggtgcattgtaaaattttccaataatattctatatatatttgaataaataatattatatatatgtgtatatatatttattgtaaattctacaatacaatccctaatagaggtgtatcgatgtacctctatctatttcagcatttaggagaaatttttaacgactttttttatggtcatatatgttgtagttatttaaaatatcttgtaaaattttaaaaaatttaaaaaaattactatgccaaaaataaggttcaaacagtttattacacatataaattttttatacgcatgtgatatagactgtttgagtactattttaatttatgttactacaagcaatataatattttaataatttacaagtcatgtaattaataattagtaattttatttaaattatcaattaaatataataattgtgataattttaataaattaaaataatagtaaaaactattattattttattaaaattataatataataataaatattgtttttagtgttatagttaaaacgaaataaatttttgatactaaatttaatgttagtgtgaaactaaatttagtatctaaaaatgctccaaccctaaatatatcatttgctttataaaaaaaaaaaaagcctaaatatatcagataaaaaaaattgttttcttatgctttaaaggcaaccaaataacaaagaaaaaaaaaatccaagttaataacattattacaatatcatgctatttgttttaccttgtttctaaaaataccctaggcattaagccactaaggctagcttagtggtgagagagagatggatgggaaaagggaaaggtcatgagttcgaacccaagacctttaagctataaattattagttgattgtaaaaatatcattacgctacactcaaaaaataccccaagcattttaacatgatcttcttctctatttctctgtctattgttctttctctcactttcttgcacgcaccaaactcagaaacactcagcttcgccccctcttgtcctctatgtcactctcgctctctttttgcctccatccgcctaacgatcgatcggaaacccattgagaattttccatatgcaaagctatttaatttgtttgattaactttttgatttaaatcgattattgattattgttctagattgcactacaaaaaatcttacttttagtcacaacaaaacttgtaactaaaagtgaaaaaattgtgactaattataaatcatgatttctatgttgtgagtaaaaagtccatggttaaaagtattagtcacaaaaatnacaatttgttgtgactaaaactaaattagtgacagcttataagtaaatactatgttttagtcacaactaatagtttattgtgactaaaagtcacattnnnncacaaaaaaattatgctgtgactataaatttgtcactaaaagtaacagttttttgtaatgttgtttgattgctgttcttggatcaaatttgagtagagtttgttaattccatttttggcnnnnnnnnntgacaaaaatattttattatttaatgtatatttcggctggcatatattgatatggt

SEQ ID NO: 113177 - DNA, 3195 bp, Cannabis sativa
ctaactgattacacactttaacatggttgattatcgaagtgttgctggccccatcatcatgaactcttctctcgtgattattcctagtgggatgttaacatgtacccattctatgtaacatgtaatgaattaaaagaagaagaaaaaaaagtgccaagtgatatctcaacttggtgttatgaaccaagattaattgcttttgctaaatccaaatttcaatttagcgtacacaagttgagttaaggtcatcttcaattttggtcaaatgaaaaggatgcctaagctaatttatattcctgtggaggacgcgaacttgaagacctccatcaatatgaagagtgatcattgtcctgtaatgggcaattctcttctcgtcacttaatttgaattcaaagtagtttaacagaacggttgcaaaaatcttcaattgcctataagcaaactcctttcccagacaaatgcgcggtcctgcctgtggatgaaatagattctttcactttttatgtcactaaagtaaagttacaatctcaactctcaagtttctgacttgaaaaagttcctaagagaaacataatgcaaaacctgaaaagctgtgaacttgaaagggctttgtggttgaaaaactccattctcatccagccatctctctggtctgaactgatctgcatcatcaccccacaaacacttcatccttcccattgcataaggttggtacacaaccaaatctcctttcctcactgagtagccgtctggcaaagtatcatcagatgagcaaatttttccatcctgttgaatatatagttgagatttggtatgaaataaatataagatatagagagtttctatggttcacccacaaaactatgaatatttcattatttttgcataagattctaaataagtattatgctaaaaatatgttcaatgctgttgaatactatttaaagcataaattatttgaaattttaaaaatttgaggaatgctcaaaaacaagaatggtgcgcctatgcagtgtctccacaatttctctaacatttattatttgattatagtaatatttgtttatttttttgcactttaccactggaactgcagggtagattctaagagtttcagtgattgccgcatggagatattgcattctttccactacttcttcactcaaagtctcagcaaaatcagcaaagtttgcgatctttttagcatttgccagttccctcagttcattcacaaccttatcctgaacagaaggatgtttgcaaagcaagtatatgaaccaagaaaatgtggttgctgttgtgtctttcccagctatgataacgctaagaattacatccctcaagtaaataggatcattctcagttcctttaagaaaccttgatagaatatcttctctcttcatctgtgtgccagtaaacaatgtcactaattatgatttcaagacatggttaaaagacttgaaaaaagaaactcattagtttgttccacttacaagagacttgtccttggagctctccattagctcgatttttgtgtggattatcttgaacacaaaatcattaatgattttggtttttttcttcatggaagcttctgatccaatgtttaagaacttcttgatcttccacaagatgtcaacatagcgaaagagggtcatcgcacttgcatcatcgaaagctatgctgaatttcttgccttcttcacttgatccacacatgctatccaattcaactccgaatgcaacttggaacattgaatcaagggttgctttcatagacagatcctgtgttacttctttgccttcatcaatcatcggcaattttttgaaattgaaattaatctgatttaaaaatagacttatgcaaaccaagttaacttacctgaatatcaattgtctggttagttgctgcagcatcagacaaaatcttggcaagttttgctgcattttttccgaagatacgaatgctgaaatccctcaaaattttagttgagaattcatagcttgaaatttttctctgctggcgccacttttcgccatctacagtgaaaattccatcaccaagaagatccttaagaatgttgtagttgtacgaaccctgcaaaaattttgaaagctcaattccatttcatgaccaaaatgtatgcttctgttaatattttacctaaatttgaatgccatgttcttgattgtgacaactctgttttaagtacaattaccttctttaacaccacatgtcctgtacgctaagatttataagattctaactcaaaattagttgacaatgactaattaatgtagccttaaagtgcactaatattgctcgtatctattattaacatggacactcttatactattaacatatcagtagatttaaatttcttatacagttctgtaattatcttttcatggatgaatgaaagggtgtagaaattgatgaaaattttccttctaagaagagcaaaccagataagttctgaatttcagctcattttcattgctatttttggtgttacacaatcaatcagtctttgatgtcctaatgtccaaaaaagtattcattttttttttctttagggtattgaaagtgaagaaaaataagtcaaacacaagttataacaggggagctactcgtacctttccataattctcaaagttggttttgagaatatattctacattgacaggatccgaagtgtaaatctcattcctaaaggggctgagaagcctgtatgttgtgtgcttagctgcaagttcagtcatataatgatgcaatcttttgaagttgagcaactgattaaatatagttcctgcaactggtgcgtacttcttctttgccttgttcttccatagaaattgtactgtgaggagagtgaaaaccaaagccaaagctgagaacagaactgagtttgagagaatatccatggatgaattgaagaagataggagacccagttccaagtttggatttacttaagagatattttcagtgggacattctgaaaatgcagaaatttatcgttaccttttacaatctttaggataaaactaactttttcaatttccacgtggtgtcttgttactggctcttaaaagttacaacaaaactaaaagtgcgtttgctaatacttttttaatcagttttttgtttttaaaagtagaaaagtgaaaatattttttaaaatcatgttctat

SEQ ID NO: 113178 - DNA, 1645 bp, Cannabis sativa
agagagagagagagagaacactttctaggatttggattgctgaaacttgtgctgtgtttagactttccatagctaaaatgcttcaatgcccaattgggatcaatatagctaactcaccaaactcataagatctctttagaaaatgagttaccttttgtaaatttttgcttaaaaaacttgtagagcatcaccaccaccattacatctttgtaattacttgccatggtaccaacttatcttccaagttcatgataacagattttgataatggtttcatgatgttttattgtgtatcttatcttccaagttcaatggcaaatatatttctactgtagtctttatggccttagctgtattaaacaaaaacaaaaaaatcaaaattcaatatattattctcaaaagtcaaaacaggaccagacaaaactaaccaaccgaactcgtaattaactaaattaaaggagaaattccaatgccttggctgacttataattcaatataatcagtagtctcaataatatattaggttataacatgagaattggtttgagttttggtctctgaaatgctctacacttcttagctgtataaaataagattctatggacccgtttggtaggctatataataatcgtattgtattaaataataaataatactatgtttagataaataatgtattgtattataacacaatcagcatgtattgcatgatttgcatgattgtgtttaggtgttacttttaaattttatgtttaagtgttacttttaaattttatgattgttatcttgatcattttgtctttatttatgttttaaaatttttacgtgtttcaataaagttttttttttcaatatttaataggtgtgagtcgataatacatcgaaaaattatcgtgatatagtcagaatacaattttctgactattatcgacaaaaatatcaacaaacaatcgtgaagctgagcaatggaatttttgacaaaattattgacattccatcgacattatatcgatattccatccacaaataatgtaaaaaatctaattctagcaaattatcgataaactatctagaagttattgatatactatcaataatggtcttccttgaccttggcttgcttatcatcaataatatatagatatattattgacaaaccattagccgtgaaaaaaccatatctcgaccttttagacaaaaaactacataacatcagtgcaaacaaataccacacacatataacacaaacaaactacatattattctcaatgtttaagaaattgttagaaaactacttacccattattggggtgaaatgattcttgattcttgaatggtccggttgtctaccactgagagagatcgagagatggggagctgagagattgtgagagagtgagctgagagagatgtgtgaaatagagagggatgtcgggagagggagagtgtggagaaagattgtcgaatgagagagagagagagagagatttcaaatttttgggattttctttattaaacaagggtaaaatggtaaacaaaagaatcaatttgtataatgagtaatttgcggcataaatacttaaatttaagggtaatttttagtaatatacctaaaatgtaacaaaattagcaatataaccttcgg

SEQ ID NO: 113179 - DNA, 3096 bp, Cannabis sativa
atctataatttttttttgcacattttttgtaattattttatttttgttgtacatttatgaaaaaagccctattataaacatcaagagaagatgatatacaacaattaatgacaacaattaggatttcccactttaccttaattgagagcgaagagaaatgtcccaaattagcaaacattgcctccacacctgagataggatttgagacaaaactagttttcagtagttctgtttaggagtaagtaaattactactaactgcatcagaagttaagaggagatacctgtcattgaaagagctactccgcctaaggacacccatccttccacgcctgtggttctaaggaacttcaacatgtaaagtggagagagtgctcgaaagatatgtggattccagtgtactatgttgtatattcctatgccactaatgcacaaaagccatgctgtgacaattggagcaaatatgaaagcaactctgtgtgttccatggtgctgaagggagaaaagcgccaccaaaattacacatgaaatcatgacaacataatctgaaagaaattaagagctggtaaataacatttcaaaaccagttaattgatatacaacaaagaagaggattgctcactgtcatgaagccctgtcaacttgagtttgatgcctgagacagctgaaagaactgaaaaattatataaatgtcaatatccaattagaaatttataactcaactgagtaaccagatgaaatgaagcagaacaaaaaacagatgaagtaagctactatacagttcttaagaagagctttaatcctcagatttttagtttccattattcatattgatagcttataagaataatttccatgcacactttggacatgtgtgattttcatacatgcccttatttgagtttgtttagagtgtaataaatggggtaggaatttgaaaatttaagtaacaaaatttgcaggtttaatgaattgaatattagtatagaggctcaaagagaacaatagagtctagaaacctgatattgctggagttagtactccatcaccaattgccatagaggtccctagcagaacaaagatcaagagggcctcacaaaatcttggatgcttctcaaagatttgtttcaaagcagaactttgccacgtgtcagtggatcctactgttgcgtatgcagacaatttctcatctatggcttcatgattgggtagaacacccaatctattgggtagaacacccaatcttgcatgacggcatagaagtgagtataaagcaaaggtaccacctgcacaaaatgaaataattaatcagctaaagcctaaagatttctctgctaaatgtcatcataataagaattgaaacaactaattggcacaatgatacaacatgtaatactaaaactaagaaccccatacgattaaatctattagtatattaagtcattacaaaaagaagacaaatacaaaagatacctctaatcatgtccccccccacttttctcaaaaccccccatttggttttttttggcaaagtgatgagaaccaaccatgccatgattggaaatcaggagtgagtcacagaaaagttgatgtgaccataacactcagttctctcccagaaaattgcatagtgatatgtctactctctggagtcacactcatagctcaatcatgaaataaaaaaacaacttgtaaagtactcggatgagataaattaaaggcttaccttcaccattgtcatcagctgacattacaataaaaacatatttgaagagagcaatgagagtaaaagtccagaagataaatgaaagaaccccaaaaatttcttcatcatcttcatgaaggctcaattttccagagaaggtggtcttgtaaacatagagaggggaggtactgaggtcaccataaaccactccaagactctgataggctaatgtcagcacagttgtacatgatactctcttcaagttctgatacagaatgaagatttgttgataagcagcttattaggttaattaaaagaaagaatgtaatccctattcccaatcacttctaataatctctcatgccaaacaacagcattttatttttctctgcaaacaaaagaaaccaataatgctatttactccatcccttccaaacaccccatatgtaccaacatgttgttatttgtacaattatatatgtgttaatataaatatatataataaataaaataaagatgggcacagagaggagaacccatcactaaacatgacttgctcatttcaaacataacatgaagtttcccaaaaccacatcaaatttgaaaagagcttctagcccataaggccatagcccttttcttccaagaatgcaagcttcgggtaatgtcttaaagactgacattcacaaacccattaagcaaaatgttaaaagaaagcaagaagcctattaagaaaaaagaaaaaaaaaaggaggaaattgaaatggagtaaagagttagaaacagagtgcaagaaaaggaggaagaaagaatacctgttgagatatcccctgttccacagattcttgagaagggttcatggtgtatagaaatatagatagagatgggaaagacacagagttagagaagctatatctgaaggggaaagaagagaatataaagagagaagagagtgaggcagtttctgcttgagaatgcaagtgaaagagttgcagtagcagtagtaatagtaatagtaatagtaaagtggcaagttgttatatgtgtagctttgcattgttattgttattattggggagtctttggtacctcatgttttctttagcataattatagttataattcaatttattatttatctattttattaaacacgtcgtcaattgttttttttttctttgataatttatagtatcagaatcacaaaattttatctgtttttcttctatgcccatattataaagggtaaatgttattttggacactgtattttgtaaaaattattaattggaccatctattttgtcaattaataaaatggaccctgtattttttaaaatggtacaaataggactctaaattgattttttgtcaaaataaaattaattataat

SEQ ID NO: 113180 - DNA, 2993 bp, Cannabis sativa
ataatattctacacaaattactgaacatgagcataagagtaacaaaaactaaacagaaaatcacctcatcaatcaaaggttcactctctagaatggcatgcacatttgctgcttccaaagcatgaagctctctcttcaacctttctgagaatgcctctgcttcaccaatacccataacgtaactgcataatgtgccgtgataatatatggatgatcatgatattttgaacaatttaaaaaaaaaaaatcgattattgcttcttcttattatctaacataactagatattcaaatggctatgagacagaaaatgatacatacgtgcccaaaagagcttccatgtcctcttcttcaacttgggaaacaagctctttctcaactgtcactttcaaatcgctttcagttactgttgctggaactggaccatcttgtacagacctttgatttgtgacagttggcttattttcctggtcagatttcaagtcaaatagtttaatcatgtaccaaatcttttagtgaggatgaatataagcttcaagatacatattaccttaaacacagaataatagaaaaaaataataatattaataaagtgatgaaataatggcaaaatttatatatatgtatgtatgtatagatcagtaaccttagcccaaagagccatctctacaacatctataccaacaactttgggaagacgacctagcacatctttgcatatgtttagaatgcacaaaagaaggcgattcctacaatgaagaacttcgtcaaatattttataatcagttactgaatggaaatatgtattgaatatatttatatatattaagaaagagggaaattctataatagaaagtatgatattcccactaatatcacctgtcatcgatgttgcgcatggtccactgaggtggagcaacactctggcttctgaggttgtcaaatccctacgaaatattcattgataagccaagatagtttgccaccaggcagtggttcaaccatcaaaaaacaaattgaatttatagaatttggttgatagagcattaccagtgtaaaagtacaccctgtgggatcatttgttataacctccacctttgaaagatgttttagtttgtacaactttgcaggctgtgagtgacagtaatttcaacaacttaaaagagacataggtaataattggtgcaaccttaaggaaaaaatttaacttaaaaacaaatagtctatataggagttcttatacaagaggaactattcattgtctgcaagcagattccttctatttgctgtatgtgttttatgtttgtggcgatggaattaaaaaaatttgcatatgtcaataaaattctccccttaaaaaaaatgcatgaattgttaaacacatttggtagtctgtactaaccctgaccgacacaattgtaaatttatttcttcacaacatttccacatccagacctcctcgctaatatctcatttgtgtgcaaaaatagagatattcattttgaaattttagagtaataaaattagggaacaaactaacaaagctggaaaattgtttaaaattaaaagagcgtaagtgtaatacttttatcatttattaattcaaaatatgaaaaagaaaaaattacctcaagtactccccctgtagaatattttagaactcgaagaaaagctttggtctgttgaccttttgattttgctgcacaaatcacacaactaattatgcagataaacctaaaagggaactgttttaatttcccaccctacaaaattgccgtgctagccgtcaagagagcagaaatgaacaaacccattggaacatttcacactaaaaaacaagtaacagagtttaaaaggttataccatatcgaaaacagagcacacttcaaggcattggaagtgaattttcaacaaaatgattatcaaaatattgctcgaaaattttaggtgcttagtgtgaggtagatgataaatcttgcatctctaaacaaaacttattcagtcaagaaaagaccctctctttcatcaaatacaacctcctaacaactatatttagaactggcaacaaatatctgtactaatatatcagctacattctacattgtatcaaataatttggcaaacccttacaaaaacacgaagaaattaaaagtaagtgtcgaatagaaatgggcagtaaacgcatcttagaagctccatatcgtgaattacaaacacttacactgacagaaattaaacatgacattataatgaactgtaaggaaaaatgaaaagagtagaaaacagtgatagaattacgtactggaaagcgcgagaaccctaggtttggccatgtgacggccaagctttccggatttaccccagacccctcgacccttgacaacacggatcgacatgacgagactttgtttggtgtcctcaattgcggcctcacaagctcgcctgagctcatcgtcatctgcgctcgatttcgccattgttgtcggtggtccccgcagttagatctggaattggattggatggagtcccttgtgaagatgaataagaacaaggaggattgtgggagaccacagcagaggatcaaaatgattatgagatgagaacaaagagaaacgactgataagaacaaaacagataacggcttcagttcatatattttttgttgagtaacttctttcatgatcctacttactgtattattatttactatggtgatttggtttgtaaatgcagtgtggttaatttgactatctaataattacctcaaagaggttgcttatgagttttcaagttggagcactagtttttttttgtgggattaagatttaagagttgattacttgagtgtgaatttgtaagatctttaattttcagataatttataagttatccataaaatttttaggaaaattctacaatgcaccccttaaaatagatatattgatgcacccctatctattttagcatccaaaataattttttaatcaattttt

SEQ ID NO: 113181 - DNA, 3711 bp, Cannabis sativa
aaattgaaaaaaaaaattattaattcttttatgtggaaaaagacaatataaataataaataatttaataaaagggacattttgctacaagttttgaaatgagtatgtttactaacatagtcctatgatttgaggctatttactatgattttcctaaaaaaattattttgaatgattaaaaaaattaaaaaggaaactaaaattttaaaactaattaaggaatttaaaatattatttattttttaattaaaaaatctattttgatataaaaaaaaaatatattaaaattaaatttttatataaattttacgggaacaaatttgaatctatcttttttttctaaaaaactagattttttttaagtattgggattcctggcataaggtaagcttacaactctttcaaaagttaatgttgtcaatgtttagttttatgtaagcagcaacaattttctcaattcgagtatggagactagagaaataaatcgattctatgattttaaaggtggtgaagcaaaaaacggatgctgctgatgaaaagaaccttctgaagatgatactcgagggggcgaaagcttttggcggtgtagatagcccatctcttggccttactcaggacaaattcattgtagataactgcaagagtatatattttgctgaccatgagagcactggtactacaacatcttgggccttgttgcttggcaaactcgagttcgtgaagaagtgaaagaagtttgcaagaatggcagtcctgatgccaatatgctccgaagcatgaaagttgtaagttcacacaatgttcagtcagtcatttctatgttactaaaaatatctgctttaatcattctcagatattaaaccattgcatcttcagttcaatgaatcctgttttttatttcttcagctcactatggtgattcaagagactttgcgcctttacccgtctatagtttatgtcctaaggaacgccttgcaggatgttcaatataaagacattctagttccaaaggagtaaatattcagatcccaatctctataatgcaacaagacactaatctgtggggtcctgatgcccaccaattcaatacaggaagatttgaacatggagttcttggagcttccaagtttcctcagtcttacatgccctttggtgtagggactagaatttgtattggccagcacctggccatgacagagctgaaagtggtagtcgcgcttctcttgtccaagttttgcttctcagtctcaccggcctaccgctatgctgcagctttcaggttggtcattgaatcagaacatggggttaatgtttaagtaaggagaatttgacttgtgtaaatctacaatttattaagataaaataaaaaaagctgtcatatctgatgaataatgttatggattgttcttatgatgagttgtggaattgtgaacaatagtattatttacatccggatttgatttatcttcttctgtcccaaattgacaaagatcattttctaatatagcaagcctccataaaaatggatcttaaggaatatatgtttgtaaacaaactttttatattcttaaacgtcaaaatagtattctttttattccatttaattgtttagttgtatattattttagtagaataattttcactttaaaatggaaagaaaaaactattctaatacataataaaaaaaaaataataaattctttatcaattttttcatttcctcctaaccaaatactacctaaattcttttacttcccaaatgtattgtgtcaattagtatagattttatattctattactttcaaaaggaattgtgtcaattagttatgttacactaaaccatcaagatcagaattttcaaaatgacaatgttagcgcaatccgttattcatggattttgataatcattcatgtatagtatacctacactatcaaataatgaaataatagcataataaaatatcccagcaaaaacatgtcaaatttgaaaccttttattttttatttattggtactagtagtgaacggatttacattcccttgaatttagtataatttgattggcatgggtagtatttaaatgaagctggtatgtttaacagggcatgacaaatgacaatattaatagatagaaaaagaggacaaaaaaattcaaaggaaggctcttcccatgtgttctactcttcaaggtgttttgttatttatttattttttggtataatttaactccataaatggtgatttcatctccagtccgaactaatggaatgtgagtagcaaaagaaagttcatgagaacaaagaccgagtcttgttccgttcaagtcgagcttccctctgtcaaaattcggaaacatacatcgttacccagtttggaacacctgaaacaattcgagaacagcactaccaaagtgaaaaactacaatggcttaaagaaccaacctcctttttcttgcactccttgtaaacatcaaaatgttcttggcatttgcttttgtcagtgctaaattcctcaagacctgcaaatattgcaccaatcgagttactatcattacaattaaggagcaatgtaagtggttttgtatgatctttccttagtatccaagatcaaagaaagattaaacaattcttccaatctaattcaaacaatgcttaagatcaacatggttcaacattccatcacataaatgttaagccctaactaagagtaccattatcagcactaaagtagcttagataggatctttaatcttttcctaaagcttatacctcagtaattgggttcttcttacagaaccctacaattttcaagaagctacaaaatcaagcatactgacaaatttagtcctataaaagttctacctttggaatttgtatacgtcccaaaaacattttgtattagccgaaattctttgttccacgttaagaattatatttcataaagtttagaaaattaattttcttattaaaatcactgaaaaatataagataatgatcataaaagtaattaattagagaagttcattaataacacatatcaataagcatatgaaacacaaacctctcaaacactcgatttagcacaaaattagggttctcaatccttagttaagaaaacacacgaaattcaatagaatgtccacaaactaataataagcgaaaaattacattaagaaaaaggaatcaaaaggagaagtattggtgtgagtgtttcgaataggaattgaactctggattaagggctacgaaacgataaaaattacaagacagaaaacaaatcataaaggaaaagtgacttacatttaagagaagcagtatattgaggaaagcaaggagagtcggagattctcgcagcactaggatatgacggtggtggcgacgccatggctgatacctcggattagctttcgaattctcttgattttgttcctgatttcgccagctttgggtttgtgccttcttaaacttagtaacaaggcaaacgtgtctaacggtgttgaaatattattggagaattttcaaaaataccccaaatttgaagaaaaagttacaaaacacataaataaataaataaatagttatatttcattaggaaatattgttttcatgtttattagtatatcatgaaggaaagaaaaagaaaaaaaacatgtggaatattaaattaagtttttagtatatatattccactatattggtggtatattaatttt

SEQ ID NO: 113182 - DNA, 2309 bp, Cannabis sativa
  modified_base (45)..(51): a, c, t, g, unknown or other
gaaagagcattccattagagtgatattccaatactttaaaatgcnnnnnnncaaaggaatggaatgaaatttgtttcctttccattccatttcatttcattacctccaaccaaacgccaccttaggtttaagtgcttaaatttgatgatgctgcacgtgtaatagtcagaggtataccttgaagtataataatcatcgatcttgcaccttacctagggaggacaatggtcataaatgtggaatacaaccaacttgatcctctacttagagctactggacatcctgatggagatgtgaactgcgagactggctattctccttacccgggaaatataaaccaagtaatgttcttaccaatagattctttaagaaatcactagattattaatatgacacataaaatgtctcattataacaggtatattttgctttctacaattcactcttgtcgagcttttggtcatttattatcttgtgaagcataatctttgctgggaagttgaaattgatttataaccttttatttctgcagttgattttggaacttggtccttatattgaggagctcacaaaaaccaaaggtggaataaaggagttcgtgaacccaaagtaagccctatatatcatgtgtttttttttgaaagcatgtgtttgttttagttgtagatgttcttgcaaaaccaaatttttgattttatcacttgcttgcaagaatgacacccatctcttcatttattatgtttttattatgtttttattatgtttttatatcatgtgtttttttttgaaagcatgtgtttgttttagttgtagatgttcttgcaaaaccaaatttttgtttttattacttgcttgcaagaatgacacccatctcttcatttattatgtttttatatcatgtctcacccattcatcctgcaggtataaagatgccagcaaaacttcatttaaatcttcaacgcgactggagtgcatgatgcaggattatccaaaaaccctgcctccaacagctagggttggatttacggtaatttttttataaacaaagtttcaactggctaaagttgttcttctgttattgaattttcaatgtttataggtttctagttttctgaatatttaatcagcatagttttttttttataatgttgttttagttagtacttattttatgtatgttgtcttgccatttgattgcttaggtaatggatgcatggtttgcatatgcacccgtgaagaacaaccccgaggatgctgctaaggtaagataccacaatcacctcaaagttacttctagttgttcatgttgtcctgtttgataaataagctttgcccaatatcttaaaattttcccatgcttgatgggcttcatttcggaagtgtggtcgtatttctaattgtttgtttgaatgaataggtaccaaagggaaatccatatcatagtgccacttctggagaaatggccgtctatcgtgcaaacagcctcatccttagaaaggtgcatttttgtatgttgtaattttgttaaattcattttacaggttcttttgtcaaaaagtttcactcatcaaaccttcaactataaagtcttccgaatctgttcttctaaacttgaacataatctattaatcttttgatgttgaaaacgacagttacaaagcttttgtgggaatgatcaattatgaccttgcatcactctttttggtgttgatttctgcactttccagtaataatttgatttcatcaatccaatttctagacaaagaagtactagttctataagtttttgatgtcgaaaacagactgtatgaattgtttgtgtttgcattattatatcaacaagaattctactaaactacagagtacaatctactgaattataattgatttacttcgcttgctgttttgtacttaaggttgctaattttatgtttcccaggctggagtccaaatagctgatccggtaccagaggtctttaatggacaggaagttgaagtgtggtcacgtatcacatggaagcctcaatggggtctcacgttttctgatataaaaaagaaagttggtggtagttgttcaatttctcaaaggtctactatgattattaagggctgcaacgtaattgtggaagatctatccttggatggtgctcttgtcattgatgccgccaaaaattcagaggtatggctagataacttaaaagatcaccaaattacacaagcacacatattcagttaatgatgcagtatttctctttccttgtttcttttctttttgcgtctttttttttttttttttgaggatgcttttc

SEQ ID NO: 113183 - DNA, 1170 bp, Cannabis sativa
aattggtaacttttgcaaaacaaatggtccaaaattgtatttacccattttaaaatatatatattttttttgtttttaaaatatatatttttaattttgttataaattaataaaataattgggggcatgaataattttgctagactttgaccacacattgaagaacgttttcatgccatgcaagttataaccacttggatgacctaatttaataaacacaaaatttgagtattatataattcaatttttttttaggtgtgagacataaacttaatgtttcttaaaaaaaagaatatttaaaagttaattgatattatatttatgtatagatttaatttatttaaaatttaagttttatatgtattttatttaaggtagtagaatttatattgatgaaattagaaaaaaaaaatacaattttataaatattaaatattatgttgttaaaaataagtattgagtttataatattaacaaatttaaatatttataccgctatttactcttaagtttataatatataatgttttaactttcaatttacctaccaataaaaaaataaccttctatgtataagaaaataatttaaaaaaaaaaaagcaattgaataagtttgaattaaaagtttcatactctatactaataatacagttgcacttctttaatttataattattaaataaatttagggtatcaattggatacttatagttttttttagttttcagttttattatagtttttatagttttattcaaatacttatagtttttatatatattgactgagatggagaaagattcgaacttaagatttcatctttaaattatatttatgaccactagatacttattatttctaatcaatacctatatagacatttttagtattttcggtatacaaataagttacaatttcattatttaatgtagttataggtatctctcataattttttaagaatgttgcttgtgtataaaaatatcaaaacaataaaaatttatagaaggcccctataacctacaaaattataactcaaaaaatactaaaaatatatatagatattaagaaataattttttttttttctaatttaatatatgaatagtattattgttgttgtaacgccccagtattttgccttattttacaaaaatactattttcatgcat

SEQ ID NO: 113184 - DNA, 3325 bp, Cannabis sativa
  modified_base (27)..(38): a, c, t, g, unknown or other
taggatgttaatcaaacatacttggtnnnnnnnnnnnntcctggtaaaatatttctaacatcacttatgtccgttctttgtgcaagtaatcttggttcgaattacgaatgtagtgagacatctaagtaaaggcattgtatataatagagattatatatgacaaagaccgatatgaataaagttgtttttattaacatgttgtttatcataatttcctaattcatatcataacgatgatcaatagtagatcagcctaaagcttgagttatcatgaactcttgttcatgttattagtttctttgatttattcgttaaagtttctcagagaagatgaatcttataccttctattttgggaatctaatattatggatggctaggaacatgatgtaaaattatagaaacttgactttcctaatgaattgaatgttggttctctttatgtgttaattctagaactggaatgttcacggaaatttgggataatgggttcgaattctgatcatttatctcagacagggggttgttcacggacacatgatcgttcccgacagtaaaacactgtaaattctctacaggggatagggcattctcaagctcttagaacatcatcacctacagtcccttctccaccagtacaagctggggtagcattacttgcgccgggaatcggaaccccataccctcctgaactcgccccacctccagtggacggggacgtggccatagtctcaggtggaccccatctcactggtagcactcgaaactcacaaaaaaggtacttgagagaggtagaatatggggaagtgtgcgagctggtgcaatctcccgcacaatgcactaggatgatgaattttcccatcacctttaccgacgatgatgccaaaaaaatgcgcttctcccatattgatcctttagtgattaatgcgcagatcgccaacaagcgagtttctagggtccttgtggacaatggaagctcagttaacatcctgtttaagtttgcatttcaagtgatagggcttacagaagcagatctaactccttgtcccattcaattgcaaggcttcaatggagatgccctcatgctaatagggaaaatttggttacctattgttatccgcattttcgtaagcacgacacatggatattaatcaaagaaggccaaagagtcgttaagcaacccaaatgagttttcttagcactccaggaggacgaaggcattgacctcgcaggaaaggtctccgtgaaagaagtcttcccgattcattggccatacgaagggtatccctgagatagagccttattccattctagaagccaggactgtttgctaccgcgaggaatatggatcttctcaaaccttgcacatgcacttcaaggatgcaccagctagggtacgcctttgactctcagaggttcagcccactcgtgtcaggctacggacccagtgactaggctttttcatgtatgatatcaaaggttgtcacccattatgcgctatcgtgtagagaatgtgtgtccatgtgtactgggctaaatgatccaacatttaagagcaaggggaattcaactccttacgtgtatccgattgctgatagttgcaactccttacgtccaaagttgactagcctcagtgcgcgcatgcaaccaaaaataggaaacattttcaactaagtctccctgagagaagtgcgcttgaattcttccttcaaaggctaaacccaagcacgaatccagagataagatgcgtattcgaccaaaattcttgaaaaaagaaaaaatacgcccgaattcctcctacacatctccgtagacttcacaaaattttagcccatcaggttgcatgattggctaaaacattaggccagtgacgactaaagagagaaaaatgcttaagtctaaggtagtcatagacatcacttctggaacttgaccttgtgaaagaaccaaaccctgaagaggatgtgtgaaattgtgaaagatctatttttgcgaaaagaagccatctctgggtaactctaaacgagtaactttttgagtggtgggccgaaaagcatcacgacccaaggaaataaagggtcaagttaaaaagcagttcctgattcaatcaagagataattaagactaatgggaaaaggttgaaacactagccgttggaaccaggtgcttcaataacataacccgtccctaaaagtctaccacaccaaatctccaagtaaagaacgacgaaaaaggaccctattcactattacagccccccgcagccagggaaaattttaattatcttcacagttaaaaaagtatggttaaaggggggatatacaaaaaaaaggggagaacaacaaaaaattcaaggaggcatgccagaggttcaaggttggacgctacctggctgggaggaagagcccgcatcgaacatccgccccatggtctctgtgtaaagatcgtgaacaaccttcatgctctgtattaagtgggtctggtgggcattgtcctcctccagtttccagttcgcctgctgtagacccccaatctagaacttggcgtcaataagcacgacttggagggtctcattggtggcatgcgggtcgcggttggccgttttggctttctttaactccgtcaccagcacgccagccactgcagcaaccctctctgttagtagggctgcctatcagaacaagccaagctaaaaaaaggttaaagtatcagaatagggggcaaagtaaacaaaccaaaacaaagagaaaagttgaggcaatgtctccaggccttaccccaactacttgtcgcttggcagaataggctagcgggaaaacatccgcggtactacaggatgcccaagtctctatacgcagttcagaggcactcccagctacctggtctaggagtttggtggcaaaaggtgcagcctctttacccaccttgtatgctagcctcttctccaagcccccaacctccacgatcggccccgtagggggtggagtatgtacgtcctctaagatttcagccttacaaaccattgacaccaggactgccctcttgtggacttgcagcctttcagcctccaagtgctcctttagggcccgattcgcctttctgtccttctgcaaattgagagggtcgaaaggaatcaccttcatggggaaagtgaaccccaccaaaagtacccttgacaacgccaaggggtaagaagaccttggctagcccagcctcaactgaggattgcgacactgggggaagacctatttggattttatgccctaaataaaatccatttcaatgtaatctgatttgttataaatagaagattagaagtcatttat

SEQ ID NO: 113185 - DNA, 620 bp, Cannabis sativa
tgcaaaacttaactgtgaaactttgtaatccattgccgtgtttagaagggacataaagaaagggagaagccatgaggatacacgcgaagtttaatacaagtaataattagagaaagagagagagaaggtatacatatatacatatgatggggtttctatttatacataatatatacatgtgaaaagggtccaaaggtaattataaatttaaacaaggggcgggcatcattggcccatttcttgcacgatgcgcggcctaaattagtacattatattcttcagcaaaaaaaaattagtacattatattacaattacatatgctaatcgttttccttaatttttgtatgaagtgcaaatatattgaaaaatcgctcaaaacagagcagctaaacaagtctagttgattacaagaggggctaagcaatctcttccatttgaaaaataattaataaaaaaagtgtgtgttaatataggtggtaatatctaattcaatcaaattgaactgaatttatctaatccagtggcggacccagaatttaaagtgagggggcgtaaataaatttaaaaagaaaatataaagtgtagttagtggggtttgaacctttaccctctaacctatt

SEQ ID NO: 113186 - DNA, 4873 bp, Cannabis sativa
  modified_base (439)..(441): a, c, t, g, unknown or other
  modified_base (1324)..(1324): a, c, t, g, unknown or other
  modified_base (3223)..(3230): a, c, t, g, unknown or other
aaattagaaatttaaatattatttattttaaatattttttgtaatatataataaataattaaataattttttagtaagaaataatttattatagagtcttgtaatcaattttttttttctgaaagctggtaactaccagctttagcttttagttgtagttttttcataaattctttaataaactattttttaactgcttaccaaacacttttttgtcatagtttttttaaaaagtaacttttaactttttcaaaattgtaccaaacgggcccttagtaacataattggtggattccaatagcaattttccacacccaagacctgaaaaccaactcgacaaacctgtaccatgcataccatccccaatgttcaaccctacccatcagaaataaaaaaattaataatacctggatttgatttttcatatatatatatatannnatatatatattattattattattagacaaataggttgctttaacatttatttaaatattttttttcttattaaattagaaaagtaaaaggtttttttttttaaataataattaaaagaaaaataatttgaaaataaaatgagttatttttaaaatttatttaaatattttttttatttatttttatttgtacctcttttatcaatatttacaacatttcattttacttactttcttgtcattcaaataaatactaaaataaatataatcataaataaaaaaagttaaagtaaaaatttattttaatttctaagtttgaaaacttaaaaacaaaattttagagaacaaaactgtaattttttcccttaaactaacagcgcttgcaacatgtgagaatgaatagtgcattctctagacttattttaataatatataaataatattttatttatgtatattatatatatgttcaaaaattattattttagtagtctaaaaaataaaagtaatattaatataatgatgtagagaaaaatgtaaaaaaactgatatatggtataatgtaaaaatgtgtgtactgagctttcgttaaacttatttttatgaagaaaatatttgtaaacatgatatgttatatttccttcattgttttttaatatttactattgtcaccacaaaccacatgcataattgcagtacaaaatttatttatatcataatttcaatataaaaatttatttaaagggagttttatttacacccacataaaatgataagtacactttagtatttaaaaaagttaagtttaaaataattttaaatatatattttttttaaagtttgtttatcacattatgttgtgtaaatttcaatacttattttanttttattttcataattttttttcatcatgtatattttttttccaataaaattttacataattttttttttaatttttttatattatctaaaatataatttatttttgtttgataggtatatttttaaagaatatgaattggaaaaaaaattaaaaaataatataattaaaaatttatattttatataaaaaaattattaaaataaggtgtatttataatctttttgggtgcaaataattaaaactcccctttatttaattcataattgcagtacaaaaaaatcacaatgatacttactagggatgcattctgtaatactttttaattaattttttaaattaaaaaagtaaaattattttcaaaaaacatgttttataaaattattttcactttttaaattttaaaggaaaataaaaactttgaaagaaaacaattagtttcaaaatttatttaaacaattttttttcttaattataatctatttatatattctttcattaatattttagactcttacctcgaacgtcggctcctgccctcgacccgaaacccggccttatgtgtaggacccgaactccgaactatgacccacactcaaaccctagccttgacctaaatccagatccagactcagacctgaagtcaaatcctagacctcgatccactttctctcaccttagtttctcattcttcacttaaataataataataataaaattactaaacacatttttcttttctgtttttattaaaattaaaaatagttatgagataaatttttgcttctaaaaacaagaattaaaaataaaaaattgtacttcaatttttgaaatttaaaaaattaaaaaagaaaattattaacaaataccctaatcacttctagtcgaatatcataatgcataagataataaggctggttaagagagagtcaacaacgcgtagataaaataaattaaggggccggtacgattagatgcttgtccacattccacactagatattgctttagtaattttctgcatgaatatgaatgtcttgttgtacttctttatttaataatcaatatcacattctcccattttatttaacaacaatttaactaattatataattcatgaccaaaactagaggtgcatttagttgacaaaatcaacaaagcaccggcaggacagcagtcacttaatgaacctcaaataaagttaattggttatttgagtggagagaatgggaagaagtatagtaggaatcaaataatgtgtacaaaaaaaaaaattatttattttatcaaaaaaatgtctataaaacgagttaagcaagggcagccagtgtacatagtttgaccactctactctctaccccatctaacacaaaataaatactcatataacctttgattaattacaaaaaaaaaaatactgttataatgaaaaattaacttttatgttttttaagtttaaaaaattacaaaatattgtgagttatattcccatttatttcactatcttttctcacttagagcaagtgaaaggaagctgcatgctgtttattgtagtcacgacacattttatatatatatatatatttaatttaattaatatttatataattaagaatttatttttaagaaattttacaatatatatttttaaaagtgatgtacgaatatactcttatttatttcggcacccgacatatttttttagtctatttttttatatagtcgtgtatattatagtaatttaaaacatgctgcaaaattttgagaaattcagaaaaatttaacacacgcgaaaacaatgcacttctttaaaagtggcacactaatatactcctaccaatttcggcattcgagagacttgcttagtctttttatttcatggtcgtgtacattatagttannnnnnnnatcctgcaaaattttaaaaaattaaaaaaaaaaattaacacaccgaaataaaattcaaactttctgtcgcgtgactattttattagaggggtgcattgtaaaagcaacttataatattttttttgtgtaaatttaaatatgaataccataaattattttttattttcaatcatgatttaagtaaaaatttattgtatatttttatttttttaaaagattacacaataaaaatattacaaatttaaacacattaaaattaaaattagacacactagacatcatattcttattaattaagagtacacatactttatattacacaacaaaatattaaaaaattaaagtacagttaatagtacataataaaagtatcacaaacttaaacatacatttaaatttaacacaccaaacacattaaatggaaaagtaataacatatatatgaactttcactgataaaatgtgatacaacaattcaataatgcagaagactatttcttgatccgccgagatagtcataatatggactataaacttgtgagtcatttttagctctttcgccttgatcttgagattgttggccttcatctacaacgccatgtcccaaatattgagatgatcgatactgtgatccctcatattgtgatccttgatattgagatccctcatattgagattcttttcattgttctccaactttggatgtttgtgctctttcattgtaaatttgtctttttttgctttaaatgtactgacgaaactctggatcggatatagaattcaaattcgtgaataatttttttttgtcaacctttcttctatgacgttcatttctatcattgttactctttttaataactttttcttttagatattagcaatgtattacttcaaaaaccatcaatgtataaaataacagtacctaaaaaaggcttgaatatttgctatacaagcattcttctaatcttacaaatcatcaaaccaatctctatcctctaatttcattttcttaggtagtatagctgaatcctatactttacctcctgtttaattttataaacaaggtactttagagtaggaagtctttggtgccaatacatctcatttctactcctccaagtttgatacaccattgatgccatagcaggaacgaaaacctgtttctaaaagttagattttcttcttcgaataactcttaacaatggtagtagacttgttccaatcatattccaattgagccatctagtcacttcttccaagcatctcttgctgtaagtgcaatcaaagtagagatgcctaatattttcatctctccgataacatattaagcatttagcatctagactcaccttaaattgacaaagcctttctttggtttgtagcatattgttcactgccaaccacatataaaaccaatgctttgaaatgaggaagcgtccccatacctctccataccaggccatagtgttttgattaggtacaagtaagctacaccccatccgaatggtatatgccttctggatcaactattgtacattgcctatctctttaaaattttctttgaccctcactatttggcgccaataccaactactttgagtagtagccttattgtaatgccctaatgctaaggcacgctacagt

SEQ ID NO: 113187 - DNA, 2323 bp, Cannabis sativa
tttaaaaaacagtttttaaaaatttttgaaaacagtttttaaactgtaaagccaaacaaccggtttaatttaaaactttaactctccaataaagtaacaatcactcaaaattggtacagactattaagcttttgtctactgaaagtttaacttatgattaacttttgttaagatttgggttcacctatttatatattgataaagctgactattacaattacaatgtatttcacctttaaagtggttgttacaagatttaataagccaataaatgaacacttggaacattaatgataacactcaaattaaatccaagagtatctttagaatatataaggaaaaatgacattacactcttagaatatgttctgttatgataaaggcaccaactaacacattacaaactatgcaaaataccagaaccatggcacatttagatcaagataaaatagtataaaccaaaagcaagcaattctaatggagaacaaagaatcataagcactgaaaaggccatgcatttcttctagtagtagctttaaaaaagacatctgacataataactcactttgttcttatataaaaaatgtacaaagcaggcatgaaaggtatttcaattcttcacattaactcactttgttcttatacaattctctcttaaaaagatgtatctcccaatattccaataacatggtacacagaatcagaaattattccacataaatttggtacataacaagtgttcaaataacttagtaaagacacattcaataacaatgatttagaataacttaattctgaaagaacaaaatgggaaaaagcatatacgattttgagttgaaatcacctgaaaatcattgcttgacatgttccaaataccaattataggtatcaacaagtccatccttgagagaaatatttgggttccaaccaagtcccagaagcttggaactgtccatgagcttcctgggagtcccatcaggcttggaactatcccaaacaaggtcaccttcaaaacccacaacctccttaacaagctcagctagctccttaatggtgacctccttaccactcccaacattcacatgctccaatccactgtaattctccatcataaaaacgacaccgtctgccaagtcgtctacgtgcaaaaactcccttaaagggctaccagttccccaaacgacaacttccttagagctcttcaccttggcctcgtgaaacctcctcatcaatgccggtaatacgtgagaattctccgggtggaagttgtcgtttgggccgtataggtttgtgggcatccctgaaattgcgtcccaaccgtattggatccggtaagcctgacacatcttgattccggcgatcttggccactgcgtaccactcgttggttggctctaatggaccggtgagaagagcttgttcgggaattggttggggtgcgaatttggggtaaatgcatgaggaacccaagaagagaagcttctggactccatggcggtaagcggagtcgatgacgttggtttgaatctgaagattgacggcgatgaaatcagcagggtaggtgttgttggcatggattccaccgactttggccgccgcgaggatgacgaatcgaggcttctcggaatcgaagaacgaatcgacgtcgttttggcgtgtgagatcgagctcggcgtgggttcggaggactagattggtgaatcccagagcttgaagcttcctaacaatggcggacccgaccaatcccctgtgtcccgccacgaagaccttggctgatttgtctgagaggaatgagttcggtgacgccgtatctgtttcagcaaagaaaatggggtttcgaaattagggtttttgagatctagaagtatagaagaatcacatgaatctagttagagattgaggtacttagtagttaagttagaatgaaaatgtgggcaaaaacaaagaactggaaagtttagtacattcaattatgcaaaattttcaagttgaagtaattttctcaggaaacaaacagagaaatagaaaagagaagaaatataccgttgccgaccgacgcctcccatttttttttttttttttttgaagtgaagaagctctttccctctgtaattgccgatactggaaaagggaactgtttttaagtttcttctcactcatatttcttcattttaaccaaaaaaaaagaaaaaaaaagttcgttgggccagatcatattattgggccataatgatgtgaagttttaaaccccaattaatagtggtgccataacagggcttgaaataggggtaagttgaaaaatgcctcttttattaatcaattaa

SEQ ID NO: 113188 - DNA, 1523 bp, Cannabis sativa
ggaaaggtcgaaattgaccttatacttgattggttttgtttgttggtgtagggggcaagatagtaaaatcctatcttaaaattcctacatatcttgtgtcgccattgtcatcataacaatcatcattactagaggcagctagatcatcaactttgatatatttcattatatattttggtagggacatcatttttgctccaaatatagaggcgtttttttgggtacctgaagaaataaaatttaaaattaataatcaactatacacgcaacgaaataaaacaggcataagtgcagttgactatttgaatttgtgatgtttaattctcacaatagtaacctaattgatataactaactttggtatagttgggtcttggttagtcagaatttgttacaagattcaaaaatgggcttcaaaaacatatggtttcctaaatttgttgatatatatgagatttatgtgtaacaaattcattgttgatattggaattagtataatttggttgggtttcattcatttctttttgatttgttttctgcattactttctttattgttttctgtgatggaatctaccaaacgtctttgaaaatcttactttcaacatcataaattattctattttttttttgtaattaaattataattttccatatattgaaaacaaaaatatactcatgtttactcaaattttgacaagagtgatgtggcaagtatggtgacatatatgacacgagattacaagagatggaaactatgaggaacgcataaggtcacccaatacaatagtacaaccacgatcgaaaaaggacgaaccgttaccatgagaagcctttggatatggacgagaccacatgcaccctatagagggtctgctgagaccgagggtcctcttgcgttggccaggccgaaggttccctttagggtggcctaaactagcttttccctcaacgatggggtgttgagcttcctatccacgtacaaccgcagtactaccacccaagatcccgaggtttgtcctgtgtactcaacacttgtccgtggtcgtgattcaatgtctatacaactacaagtatgaagacaagacaagaccaagattgatgtacaatcatgattgaggatgttcctagcttgggatcaatatagaacgcaaatgggttcgtcccgagaatatgacaccaaaacaagtgcccttaggggttggcctaggccgagtattgctaaagtcagccaagttgagtgtaccgtaaaggtcagccaagccgagtatagccctagagtcatcccaggtcgagggtcaccctatggacactcacccaagaaccccgtaatacataataagcatcaaccaatctcgctcaaagctcaaaggtagttataaacccaccaaaaaagtgagatatctacacaaaactcggttcttaaccaatatcccaaaaattaagtctgacagccagtagtcccgtgatccgtaagcggaaataccgggcaagctgtgcaatcccacatcgcctggggaaggtc

SEQ ID NO: 113189 - DNA, 916 bp, Cannabis sativa
ttgagtaagtttgtaattttaattttgttggtgtttgttactattaggattgtattttgagggttgatttatattagtttgagttggttttgaactacttggttgtagttgttaaggtttgagctaggtttgacgttttaagcttaaacttagctcaacaatagtacatttatttttagaggtttgatgttgtaatttttcgatgaattatgtttattgtggggtaattagatgttttagaaggtttcattgaatttaggataaaattgaaataaaaaagttgaggttttggttttaaaggaaacagttaaccgtttggtcaggtaggaccccacaaaccggtggactgtttggggatccggtccaccaattggggtgattttgaagggcctcaatttttgtgtttcctcaatatataggatattaccaagttatttatcaatagagaaattttaaattttgagtttaagtcaacgagagtaatttagcaagtcgcttatcaattttacgttattttgacttagggccattaattttcaagcaacaatttccactcaaattgccaacacacttgattttagaattgaggtatgattagtgtaatagatggatatatatatgtatacatatttggtacgcatgttttagtttctatcataataacatatcaggatattggtgaggtgtatatagagctaaactaaggtattgacaaatttatgttcagaaaaatataacccatcagattagcaatgcagagtattagtgatgtgtaaatagagttatactgacatactgaaaaatatttgttcaaaaaaatataaagccatcagattagcattgttgcctcagattttttccaaaatacgtggcagcggctgcgtgtggcacgtgaatttcaaggacacctcaccca

SEQ ID NO: 113190 - DNA, 4718 bp, Cannabis sativa
gcttgaagcgaggacgttacaggatccaatgattttgccacctctagatcgttcagctagtgtggttctgcaattgactcatggtccttctgcgtcaatggaagcagctcggagaacaataatgccggagaagatgaccttagctccaatgatcgatgttagctccaaaattgtctttctcattcgtgattcgaaccagatctgacactaattcagtcgacttcttcgtctgaaatttttgaacaaaaatggcaaccacaatgagagattgtcgaaattggacttcgccgaagaaacagagagtgtcgacgatggatggaggggaatggtgatcatctgtgggcgaagggatgcgtgggtacgccggatcacaaaaaaaacgttagagaagagtcaacgatgtctctatgttgactagtttgctaaaatatatatatacatatagatttctacttaattactgctaggaggaatatatagttatatcgtggtcaaatattgaggactatagaagaagagatgtcaccgaggaagatctcatccgttgttcatggctttataaaaatagtggctgcaaggttgaatacaacacaccgggtaccttaggcttactattaatttgggcctagcacataaatagtttgagataagttgaaaaatacttatttttttatttattaatcaaaaatactctcatatttaaaatgtaacaacttttgtggtgggttgcctaatatactctcactctctacttaaatctagcacataatttatattaacttaaggagtataaagagaacatcatctataaattaaagtggatatattttaaaaaaatataaaaatataggtaaaaattaaaacctacaaagtaaactggatatacaatgtaatttcctcgataaattttagagagttataaaatcatagtgggttgaaattagttttttttatctcttatgtttgtgtttattttttgttctattttttagttttttttagttttactatctcgaggacaagataattttaaaaagtgagaaaatgttaaactatgaaatagtgcataaacttattaataatttgtaaagagtgaaagactacaaatatgtaattgtatagctattgttagatatgaattaagaaaataaaattttgatttaattagactttagcactgaatagaagtgtgcatattttagaagatttgtccaatcttgaaaaagactattatctatcaacataatatacaagtctttgattcattaaaaaaaaaaaaagccttgcttaacttaaatagaaaataagtaattaatttaatatttttcaaatataaatatattagtatgaatatttttacaatattaaaaattgacacataatacctatatatctaaaagtataatttagatctttttttttaaaaaaaaaaaagaaaaacttttttttattatacataatcaacatatcaaaggattatatttatatatggattaatatttgcatgtgcttttataatgttcttacttattacatgctgtatcgtattgtatatgatacgtatactatttcatgtatagataaatagtacagaaaaatctgcccatctaaagaaagaaaaactgttgaagcctaacttggttattataaattatctggaatttctaaaaagaaaaaaataggaagaacttctatgactacaaatgaacaaatcgagtcatcaagaaatggttggttttaattcgatcttccactcaagcatgggacacattagaacaacattaatttcactgttcaactcaaattcgtgcaaaagtttcacaactcaaatcatttcttcaataaaaatatgattctttattaatctctccaatatatcacatgggagccatttttgatggccttccaagcttctggacactacgtacgtacccgaattgggccttagcttggatagtttttataactttgacaatattcagatccgtatggaaactttttatatatatataaatatctgattattttgtttagttaattagtatatatatacatctatatcaaatagtaactaaaaaagttgcttgcatgttctttattctcaggtcctttgaaggcaacaattttgtgggtgggaatatacattgggaaaattttaacttcacaatacttcgctctctgtgagacactatactccatatatgtattaattaattaataatgattattattggtactctgtgagacactatacgatctgttcccataataaaaataatgattattaattattaattgacgttttatgtatatatatatgcaggattataagtgatttagccatttccggatccgtattaccacaaaatatagaatccaactccatacaatatctgtgagcaatgcactagctaccataatcttattttgtcttaattaaaaataaaaaaaaaaaggttgtctagatagcagcaaattacgcatatatgcatgcaatattacgtatattaaacacaacagttaacaatttttaattttaagttacacacacacactatatatatatatttatatatatatatatatatatgatacacttatttttggatcacattattagaactctcacttaggacttgcttccttgagaatctctatatatatagttttcatatagtataagtaattgactttaattgtccttaaaaattctagaaagaaccttattcaactctgacatgattattttacatattttttcttttaaaaaaaaaaaaaggataaatctaaaaataaagtcggttatatatatatatatatatatgtgagtttcatagagagagagtagagttgtacataaataaataaatatatttatgtttgtttactttttatacaggatattgaggaattgttctatttggggcagtattcctacatatatcgggaatctatcatctctggtatacctgtaagtagttattttctttgtacatgtgctcacaaaattattataaaaccaaattaataataactttcttcctataataaatacagttagttaaatttgctaaatcagttagttactctaactgtttcctaaccgatctcttttactatattgtaacagtcttgattagatatgttcagtatagctgaattcatcaatgaaatagtcgagctttgtttttcactaaaattcaaatctacactatctgattaataaaataaggtatataaaggtgtacattacaactatatccctttctcattttttttttttttttttgaaatataattaattttgcctaaaataaaaattaaattcaaacaatcagcatatctattttagcacttatagaaattattactcaaatttccttatatgaatgtgctataacagacattctacttcgctttgaaaaaattagaatagtttaaattttaaagtatcgaaaattaatattattccaacattcatatacacatctttgtgtgttagttatatgcatgcaattaattattacattattgaactttattttaggtatcatatatatacaaaaaatattcatagaccgatggagtaccttctatataacttatatattatatctagattgtactttataaaaaaaaaatagttataatttttccttatgctaaatatatctctgccgatataaggataaaaatataagagcaagtatattatgggtgtaacttttgctattacattattgtgactaacaattttaaagacaattttatagtgataatatatttatataataataatttgcaattatgactattttcttttttgaaaataatttagttactaaatatgttggggttaaaaataagatttttgtaatgatatatatcatgactctacaaccacaatatatatatatataatacctttgtaaaaatttagtgcacactttaattaattagtattgctgattatattattaaagagtaagaaaatcgatataattagcaatattaaatgttttattaatgtataacttacaataaatatatctacatcaatttcgaaataaataatattatttaactacaatatattttttttttgagtgtatcgtaataatattttacaatcattatttaatagctataaatatatgtatatatacaaattaagaaaatattattcaaaggcatatatataaatagaaagctactcatcattttgtcttgcagagatttgagcttcaacaacttaagcggtccaatcccagattcattgagaaacattaatatgtaagattcgtttccttctggcaggcgcgcacttattaagcttttcctaataacatatttttttagttcactaagtattagctagtgtccaatatttaataaattattaaattaaaaatgtctagagatcaacattaaatcatcaaaaaataatatatataacacatgaaatggttttaaatacaactaatacattatagcaattctcaatattttatatatcgtattgatataaatctaaaattcatttatatatagtatagaggcatgcatgcctttgcttccacaccggtggtgagtctttctattttagaacataaatatattagggatattggcggctaaaccacccgaactttatggtttgtaacacttaaccacaaaaatcaaatttttggcggctaaactcccattctgttttgctc

SEQ ID NO: 113191 - DNA, 2977 bp, Cannabis sativa
  modified_base (866)..(866): a, c, t, g, unknown or other
  modified_base (2914)..(2922): a, c, t, g, unknown or other
tacgttttcccaaaatccaaagttagggaagagaaaaagaactctagacactagttctattagatctttgttattgtttaaacccgagcttcattatttaatgtgcatagctcctttcaaaatggaagagtcaaccaactggattgtacaatattaatatcacatcaagcccattaccttctgttagtatgacctatacttatttgagctccaaatgggaaaattttctcaacggtcccttccaaaagggttccctcccgaagatataacattcgctgcaaaacaacatgcacctctctataatgaaaaacataaacaagggagtaaaaatgaacatatagtatgaaagaaagttgcaagctaaagaaaatgttgcataaaactgacccaagcttccttctcacttagtatcagatcattgttggattcatttattcgagaaacgagcacgtgaagccgttgtcccacctatagcattcataaagcaattaacaaacatacacaattgtaaagaagaaacatgtataagtatagcctatgtgaaacataaactcaatttgacgatttttgaaggtcctttcaagtgctatctatacagtgtacaccatgtaactatggaaggtggaaaggtataagaggaagtaggagaacttcaatttgtgagtgtagacaacatgttataaatcacaattatactcataatttattagacaacaattccaagaaataacaagagtttattattctgaatagcaagacatatgtatctcaaaagtgataaccagcctagtcaaagataatgctaaatggggccgtagtgtaaagtgggtacacactctaataagataatatacatatatatatanatataaatatatatatatatcagtgaattggacataattttatactgcattaggttcaagagtaatattaccagagtaagcaagattgaaagaaggaaaggaaaaaaaatcttgaagattcaacttactttttctttcaagtcaccaaagttgtttattctatttactaattcagctttgggaataaaacctctcaaaccctgaaaaaataagattaaaatttggtaccaatcaattagacaacaaaagaaatgaaatgaataagcaaatacatatagacacaacacactaacctcaattcttgttagaaggcctccagtattccactctgtgattttaacctctacaggttcattcagttgttttatctgtctaagattaaaaaaagaatgaaaacacaaagtaaaaaaagaacacaaaacaccatgtttgagtaacaatgaaagcaaaaaccatgatgccatttcaaattaaacaacttgaaaatcactaagctcaaaatccaaataaacatacaacaaagagagaagagaacctgcctcactctgtgccaagccatccggcgaaagagtcttctagttgagatcaatgggcgaccactaagtgttcttccaagaacctcagcaaacaaaatagtaccaacttcaacaactggtttccatggtgttggtctttcattagcttcatcatatttcacaattcccattttcccactaacaaaaaactcctcagcatcacaattaggatcacacaacaaatattccatctctttatcatacaaaggcatcacctccttagtcaacattgtacccaaaaaatctgccccaatattcacatcaagcttattctcattcccagaaacaacaactccaaccacaaagtcaccagctttaggctcataataagaaatattaacctttttctcttcattcttttcctcctcctctagcccatcctcatcctcataatccaactcatttctttccttagaaactcccatttcatcttcattttctgtcattttgtccactccatctgttgtgaaaaacttcaaaaaaggcgccaaggcctcatctttatcaacttttacaacactttcttctgaagtagactcattatcatcactatcatcttctctaactaatggagatggtttatcaagcaagctataatctccactgtctctagctttatcctcttcttctggcttattattagacaactgggtactcgagaaaccatcaaaaacatcgtttctagagcaaaaactcaagtgggtgcttctcaaaattggaactttcctagaaaaaactgagcttgtaatcgaaaaagatgaggttttgggaactgggtatttggaaaaaccacgaaaagttaaggtttccagtgagttgtgaacaaaatcgaaagtagtagtagagaggtgtggacatggttgttgaaggagttgcatcttctttcttcttcttcttatcttaagaacctcatgagctctgttcctcagactctctccctcttgagttgatatttggtttgggtttaacataagacaatgagatttgaggtttggttggtgtggtcacttgttggacttggattttgtgtagtgtaatagatttttcgacatgtattatcttcattactatcacttatttttaagataatgaataataccacttttagtttggttgtgattatagggatggaaattttatttgtgagacgaaatcctaaggatgcctgcagggccggccctggttgaaatgggctataggtaaacaaaaaaaattagacctttactataaagataaatgacatttttaaaaattattaaaaaatatgtatattttttaaaatgtaatttttttatttggccctaaaatgagtaggccctaagcgcgggcctagctcggaggaaattacattgtatacccactttacttaacttgttttaatttttacctctatttttatatttttttttaaatgtacccacttttatggattattttcctatttagactccttaggttatgtaaattatatgnnnnnnnnnagtagagagtgagggtatattaggcaatccactcaaaaaagtgggtatattttaa

SEQ ID NO: 113192 - DNA, 2975 bp, Cannabis sativa
gatatccaattacacacctaaattttaatattaacttaaacatatgaagaaaaatacgtaaaaaataaatatcatcctttatttaagtttagactccataaacttaccatcattacaatgtaatgtaactaaaagttttaaataattaaaacaagaacatttctaaataataaaatagaacaaaacatcatgaaaataaatacacaaaatgaccaactgttacaaatttaacacaaaaaaaatccaatgaaaatataattaatgtatattatattttgttattatatggggttagaactcggcccacaactacatggtaccctatttgagtgccccatgatacactaagaaagccatgcaagcactgcaatgcttgcactctatgattctgaacctaaggtttcatgaatccgaagtagggttggagcaaaaaccctaatccaatgagaaattcaatgaaaacttgactcattgagatacaagaaaatcaagacttgaacaatgagtcagaattgtataaaaacaccctctcaaaggtgttaggggagcaatgccatctttttcaccaaaacgatgacattgttccccaagaagaatgacaaagggaaaattggccaattgtatttttctaacatcaatgagtataaaaccaatgagaagcaccaacaaatggtgatggactactttgggtgagcagtgccatctttttggcaaaaaaatatgccattgctcccataaagagaaagagaaggaggaagttagttatgtgtttttctaacatcaaaaacacatgaaacaaatgtaaaatcctaccaaatggtggtggaatgctctaggcaagcattgtaatatttttggctaaaaagatggcattgctcccatattagggtcccacaagtttttgagccccaaaaccaagaaagcacgaatcaccatcaaaaaaatcatccaaaacacaccccaaggtgttaaaaaacaagtataagcaagtagtgtcatcttttatgccaaaaagatggcattgctcgcaaggagcaagaattctaggactctgcttgcaaccctttattaaaataaccataatttgctcaattcttattcaattcaagttgcattaaaaatctcttttaaagaagaatctaagtttgtatgatgatcatatcacaattttgacgtttttcagccctaaaattgagttacaagacatattgccttatattactcacgaaatgaagggtttcaccaaaattttgcaagaagggagcctcatagagttgatacacaagctatgctattttcctagtgccaaggctcccgtaaatacacacttccataatcctttgctcacacaaattattatcctccaaaaaggagaacgccaccaaaacgtgttggacttattttgaagaattcagtaaatactctgaaagagctagcgaaatggttcttcagcccgccagccccccatgaatacttgcctaagtagatttcagttctctttacgtttgggaagaattatggaacattaaacacaaaatttgttatgacaaatgcattatattcattccaaggtatgggatcataagcacggttatctcgataatcattctactatcttgagtcgtgacacttttggcgagttttctacggaggtttgtgcaaaagagcgtgaccgcccttccaagcaagttcccattggagatgtggtggcttttgctaatggattctttccaaatggagggactagtgcataggagtgtacagaaagtcattaaatccaattacaaccgaccgatccaatagaatcagatatctaatcatagttggatgagatgtaaattttaaaaatccaatcagattggatcggttattagatgggacatctgatccaatggataaccaaaccgaactaatccaattatcatccaatcatatttatatattttttaaatacatttataattttatatatttaatatatgttatttcaaaaatatattaatatatatttaacacatgagataaaaaaaaatctaaatctaaaatattatttttcatctacctaaatactaataaaattatcaatcatattgaataagttttatttttcggcaattttattatgaaaattaatttagactaaaccaagttattatgtatattagattattgaagttaaaaaaatgtatgttaaattattaagttctaaattatatttcttacatatatattttttttttaatgaatcaacttaaatggtagttaaaataaattagatctatccaatctaatccaatagaaaaccggttaatgcatccaattgttggaacagatccaatctaatacctttattggattgaatcggatcgaatgactcaattcgatttgattggatcgaataacaaaatctaatattcaatatcaattagattgaattagttgagtccattgaatgtgatctaatgaacactctaaatagtgcaaatacagttttcctttcacctggtcaggaaaggctactcccagctaaatctttctccgcctctatagcttttaaggcaaactggagtgttgccaagatattgaagtttgcatacttttacaaaatttaaccgaaattgatgcaagtacgtagaatatctacaagatgaaatgaagtttactttccaaatagatacactttatttgtgtaattctttacaatcatatgagggaaaagctctaatgagagagtgaatgatgtggtaggtataaacttgaacagtttagcttgcagtaaagatttcagcggataacactttccttctctataaaaactaaactaaactatccgacgaaatttcgaccatctgatgaataattcattatttattgtaaaaagaatgaagatttgttaagaccacatataaaattagttgcaccagccttctttgttagaagtccatccattaccttgttagaagtccatccattac

SEQ ID NO: 113193 - DNA, 4658 bp, Cannabis sativa
  modified_base (1276)..(1303): a, c, t, g, unknown or other
gcaaagctttaccggcgcagtcagtgtacttttgccggcgcaacaatgcgccggtaaaagctggatttcttgtagtgtgaatctatctactatcacccatatagaatcgtgtaacccagtagtcctaggtaaccctactatgaagtccatggttatgtcttctcactttctctcaggtattctcaaaggttgaagtaaacctgctggcctttggtgtttaggcttcacttgctgacatgttaaacactttgaaatatattcaacaatatcactcttcattcccgaccaccaatatattgcactggtgtcatggtacatctttattgttcccaattatagggaatacggagtagtatggaactcatcaaggatttcctttctaatttggtcatttgtcgaaacacaaattctatctttatacctcaataattcacttggagtcacagtgaaatcctttgtagcaccaagctcaactttctttctgagttcaatcaatttgggatcattctgttggccaatctttatcctttccagtaaatcatactgcaatgtaatatttgccaacttcccgactacaaactcaatctcagctttggccatattatcggccaatcttagagagatttccctcaactcgtagatttgtcctggacctttctggctaagtgcatatgccactatgtttaccttgttgggatagtagaggatttcatagtcataatatttgactaactctaatcaccgcatttgcctcatatttagatccttttgaatgaaaaagtatttcaaactcttgtagtcaatataaatctcacacttatcactatataaattttatttttacttccatttaatttatttatttatttatttagaataatcataatactatggaatggattgagaattttaatggcaaataaattcttattttacagttatgaatgctttttttaatggagatgatattctaggatgtacataatacttaaacagattttaagtagttatgacaaattaactatttattttttgaattttgttattattgtggaattactttataatatagtaatttatttttattatggtatggttcaatatatatttattatttaaaatgattaaataataatttgtgactaattatgtaacatatggaagtattatttatgatttaaaataatatttgattatttaaaatttaaagtctaaattgggtgataagataatgagaatgaatatctatttatcagttattattattattattatnnnnnnnnnnnnnnnnnnnnnnnnnnnnattattattattattatgaaaaataaatggacatgtacgtgagaaaataatatttaagggagtaactcgttcaatctaatcagttattattatattatttattctttatttatactacgattacacaccactttagggattagaaaacgtccagaggcgattaggagtgagtctcttttcctctcttttttttttttttttttgagtgctaggaaaactctgggttgttttgaaagttttcattgggattcttagattccaaggaggggtttgaatgcattgaaacagtctgtgaacaccaagaacaaaattcactattttcatgcacgttcgtacacgttcttgagtaatcttggattcaaacgtgtttgagtcatttttagatttaaagaagattgtgtttaagcttaagggactcctagaagatgtttggatgttaagaatgaaagttaaaaagcctataacgaaaatcaccatttttagactctatttttaacggttcactgccaaggaagaagacaatcaggtttaggctattgtggctattttctttggcttttcttggttgttttgggatcttagattcattggaaggtcttataataaaaaaatacaaaagcacccgaaaaagagatttgcatctcgccagggccagaaccaaaaaactccaaagataactatgacgaccttatttttgaggatcttgttctcaacaagaaaaacttgatgagagattcaaggtaaagcaaaggatatacttagaaactgaagtaagaagactgagcatctatgcatagggtgtatgtgaaacatacaacagtattatgggtttaaatttatgttttctttatgttgtggtttgatgatttacactagtaattgtagcatgtgatactgataaggtctctcctgcttctgtgagcatagcacttgcaagatatattattttctactgcttgtatgcatttacttccaggttatcttatcatgggtgagtacaacttgtaataagagattgtctcgttgaatgccaagtgtgagaacaggacaagacaggacaagttacacttcatgtctgatcaacatcagtaggagtagattatcgtatgtaagaaaaatgtatgataagatgatgtatgatatgtgtgtgagtatagcatgctttgagtttactttgtgatatatatactgtatgtgagaataaggcgtgatatgatatgattatatatgtaggtaaccatagtatggattgatttgatgttgtgatattgttatatttatggttatgttatctagtttttgtgggggagttatgtcttatatagctcttcttactgggcgttagctcaccgtactctatgtgcaggtaaaacaaaaaccaagcagtgaggatggcaagctcgaggtgtagactacatgttagaagattatcgtggtgttttggttttaaatgtttgttaaaaaattatgccttgactagttttgtacaagtttatgttctaaagtttgtgaataaattaaacgttttgtttttaaaataatgagatctcatgttttatttattttttgacaaattaatttattatcttagtcgtgaatgatttttaaacaaattatcgagtgtaacgccttgaaaaatcagagcgttacagatatatgtaagttaaattgtttattatttaactttaaaatataatttatctcaaaacccattataaattactttatttgtttatttttgtgtaggggccaccagaggagcatgtggttgatgtttatagagatgctcatacaaaaaaaaccatcagatacttttgtcaacgagatagttgcacaagattatataagtaaaatttattatattgttaaatttaaatgttatattagttctacgctctaataatagtttatttaaataggagaaattgtttaaggatcttgataagaaacagacaatctcagagtgatacatctagtactgaatctaatacttatcaatgcgaggtacttgagaaagtacttagggaaatatttgactatcaaagaggaacgagttataatatcaaagggtaaagaaaaaaaaaattatacaatcaaagtcagcttgctgcacattcttcaatccctaatgaaatgtacaacattgtgggagatatgtttatgactatacatgacacaatggaaagtggtttgatacttgaacaacatgccaatttaaataacccgcaatttgaaaactttctccaaatgtatggtcagttacaaactcccggtggttcatcttctcagagttacactgctcctcctctgcagcaacactagtcttcacaaagtcaaatgtagttcgtatatgcacccctttgcgatctcgatctcctctgctctcttcaaactttgttgatttcaagatatttggtgggcttgggagttctttggaggagcaacaatttttttactactccaatcttcaaccaagctcaattaggagaactaatacttgacttgtcatcatatcaactatattttccttctctgtcatagttaccgcccaaccttaataatacaaatcaagattttttttctctgagaccttaatgatgattttatggataaatataagtatgttaatgatttagatattagtttcatttgagacatataatagtaatgaatattgtatttattttggtgttaaaatagaatatttttaatttatttaattatatttaatttttatttaatttattattttaatttttgatttgttcaattatatttaatttattgtttttttatttttcaaatactaaatatattagcagcggacattaaagcggcaacttccgtcgctaataatattacaaaactgactaaaaactcgctgctaatgtttgccactattaatgattattagcgacaaactagaaatttgccactaataatcattaatagcggtaagttatctactgctaataactagtcgcggaaaaatgtattattagtggtagatttgtccgcctctaatacactaaaatgttgtagtggatcgggatggagattgggatctggattttggaaagagatgaagctttttgtttttttctttatgtttttaagaaatcgagaaatatggagggagtatgtagtagagaaagagagaagtggattgtggtggttggtgggttttggtggccgatttttcaaactcggcttctctggttcaaactttacttagacaatttttttgttaatttagaacggcccctcttgctaatggaaattggagaatttcaatagagcaaatcggggctggacaggttaggctgggagtgaacgagaagaagaagaagaagaa

SEQ ID NO: 113194 - DNA, 5688 bp, Cannabis sativa
taaaattgggtttaagtaaaagttatcccattttacaaattatgtatagttttagattaggataccaattttaatccctaatatgcatataatttcaaatttcccattccctttttgttgtgagatggaaccctaaactttctattagtattgttttatttagtgtcaagaaaataataccctgtgttgctactgtttatgttttggttgttttataaagttttgttttttttaaaaaaaaataaataaaaattacagctatactaaatatttattattattattattattaaaaaaaatccatactaacaaattttggttaaatatgtttttggaccttaagttttgttaaattggatttctaaccctatattttacaaaaatggatcaagatagtaccatgaacttgattttgctcaaattttttttttttatcaatcaatcatgaatttcattactccaaataataatttacaacctatttaggaccttcaaatgaagacttgaatatcaatctatacatttcctgtataagcttttcaaacacctctgttagttactgctcaaattaattttaaatgtagttgtttattctttactctcgaactaccttctttgtttttctaatccactgcatcattggacttactaattgaatttatatttgatttttttattcaaaaaggattcgggggatactgccaaatagagaattaaatgttaaataacaaaatataatttagaaaaatactaaaggaaactttaaagtgtcaagcactagatcagaggtcgaatactgctattagtgaattttaatatcgagtctcacacattttaattcaataaatataaaaaaaattactaactaattataaagtgaaatgttagtatagtgttggacatcttaaagtgacaaataacacaggtccataattttagatccaaacaaaaatgagcctcattttctcatctttttaatacaatacaacttacgctagattgctacaaaaataaaataagttttcctctttatattcacatattaacattagatcatctctaatagaatatgtaaaaaattatacaatatttgtcatggaaaaataattttgtgatatatatgtactaatttttagcattgtactccataatatatataaacaaactatgatgcaaaagttaatatttaatttttaaaaagaagggtaaacagtggcataattacctaaagttttaagtttgtaagtagtataaaccaaatgttatatttttagcggcataagtacccaatgtttataaaactgtaattttcgtttaatttaataagtacagactatgttttgaatttattaaaagaacatttgatgtaactattactgtatatgtttctctctagattcaatgatcaagaatctgggccttatatgtttcatatttaagacaataacggagtgtgtactgacaaaattagagaaaaattaagtattacaaatcctgggtacttgtcgctaaaaatatacattgagtttatctcacttacaaacttaaaattttggctacttatgtcgctatttagcttaaaaagaataataactttgtcaataattttagtatggtaaatagtggcataagtactcaaagtttcaagtttataagtggcataaactcaatatttatttttaacagcataagtacataatatttgtaaacttgttagtacaaaatttattattgttttaaacagagcacatataaggcatagattcaagattttgagtctagatagaaacatgtagtaacagttcttttcaaatcgctaaaaataaaaattaaatttatactgcttataaacttaaaattttaagtacttatgtcattagttatctattttaatattttattatataaaattgtaaaaagtagttcatattataaaaatgacataaaagtacaaaataaccttttgacataatattatatcatttccacgtagtttagtaccccatagtaaaatctaatttcatccaaaaataaaaatcttcctttttctagtaaaattcaggttccaaacacacgttactgcaatgacatgatgaaaaaaaaaatctaaataaatataaaatcatcacccaaacttgaacaataatgttaattttcattaaaaatatataagtgtgatgatgattacccttaaaattaaaatcgtagctacaacaaactaaattactttttattgctgtgttcatgaacggtcatctttggtcaagccagttgggttttagatagataagcttttttttagctcttctattctatgtggactctttaatttatatatacataggaaggttgggttggtgagagtgagactgtgtgagtgcctttccttctaggcattatcatttagaataaatacctgtacatgtacaaataatgtaagaattatatacatattaaaaaaagtatagggtttacctttagttggaccaatattggcacaggtttgatttcgttttgtgcggttgttgtttgcctactttgttttgcttttattgtgaaattggtcaacaaatataactgctacttatatagattatagcccaaacttttattgttataaattttataaatcatacactttaagagagaaaattaattggtttccttcccaatatcatacagataagttatctctttcaattttcaccaaaccaaattctatgtcattatgttataatttcataactaccggatatagtcaatcaagcccaaaccttcatttttcaacttcaataatggactcattaatcaagttacaaaagtgtaatataaatataactgaatgaagtgtaatcaatttatgactgccctatataactatttttttagtgataggggaaagtaagtggaagtggttaataaggtgtaagcactgtttaataaactagaatttcactattaaaaaatacagtgataaaggtgcttttttattattattatgtagaagttattaaactagtaggataaccacaactattcatttaaaagttttgattctggcatttagtggcataataccgaattcaatattatatgtgtgtgtttgggttgtaactagcactatgagaatgacatcctataggtatagactatagtataggagtctctttgttttctttttgttgaaattaggtgctaaggtaattatgacttagagtgagagcatataaaatatatgagcattgttattggatattagtagtatctaacattttctataggtgatctcttacgattagttagcggtattatctaaaagttatttttttaaattacatgagacttgatatttaattacaccaataatagtattacaccaccgagaagagtgatatgcaataataatcttttctagcaattctcaaaatatatctacgtaggcaatttgtcagcataaaagttaaattaaatgaatctcaacgcacggttatgacaattataaataagcattataactatatcatagacagatagtagatagaacagtgattgcaatattgcatcatagggttggtgcctacattaaatgcatgtgtatattttctagttacttctacattttgtatgtcttttgctttttaaattgtcctgcttctatttcttcatgaaatccatattcataaacgttaatttgttttccaaatactttacacttaaccaagtttcaaggtgtttgataatacttggttatgggatacggcttcaattctcacgtaaattaaaacgtgcatgaaataattatttacatttttttttagaaaatatacttcattcaacactgaacaacatgattgcacaaggctatgcattctgattgctatgcagctataagtgacacgtttagttgacgtttagttagaaaaaataaaaaaaataagactaatttacaatattataaatagttcggagactatatttttaagagtttgaaaaatttaagggacacaataatatatacgtcatagttttggtggcaaaaattataattagctttctttcaaaataatgaaaaaatcattctattagaatgccatttaatactttaaattgcaaccaaaataaataaatagaataaaattatattctttctattctattatatttcattacctccaaccaaacatcactttaatctgtttagagacccgtgttacaaataaaatttaaaagaattaagtgatacttttgaaaaaatcaattatcattaatgatatcaacccttttaacattactaaaaaactagttttcccgacagttttaaacagtcaagtaaagtattcatgtcggtttctataactattgcatattcgaccgtcgcaaaacaggtggaataggcgacagtttgaaactgttgctgaaaaccatattcctgacggtgtaaaatcattgcatatatactgtcgagtataggacacaattttaaaccgtcacctatataggagacaattaaaaccgtcacctatagtataagtgacattttagtagtatatgcgacggtttaacatgtgccttatagtgtaagctacgattttagctctaaaaatactatttttcagcgattttttttctgtcgttatattagaaaaatagagaaaaaaaaaatacaattttctatcatttttctcttgcattaatttttaaattttgacaaatttatatagtaacaataattaaactaacgcaagtgtcaataacttaatcgaaaaatatacaagttagttatatgaattgagatatacaagttagctatatgaaaaatatacaagtaattagttaatgtaaagtataaacataaattgagatacacattgatcatcataatagctcttgtcgttgcacctccgctttcacgtaatcaatccactgctcacgtagaagatttttctcgttatttgagtacgaggtgatggatctatgctgtaaaaccaaattatatattaatatagtaaaaagacctattatgataacaaaagaaagaataatatttacattatttattaattatttaagcatttctgtcaatcgacatattggatcttgttcgttcatgaaattttcaatgaattttatgacgtagtattcacattgttttccatctggttgttgtcgacaaattggagttattcaatcgatgagaccaacattgcactagtttataaatgtatcatacatgttgagaaacctacacaaaaaataaagttagcatataaaatatcaaacacacttatatattatgatgtggtttatagaacttatgtggtaatgatgaatttcaaatcttctggtacttcatcattgctggaatccaagtaccccaccgtctgcgtacttggttggataagtacaagaatctaatgaaatatttttctacacaaacaaacatgggtaaaattgttaatacgtaataatctatattatgtggggttaaaatttatgaaattattaattttaaacttatttatcgattgttgtacggggcaacaacccaattatctaggtcggtctgggccatactgttacgaaaattatgatcagtacgcaagtatacgtaatcaagtagtaaactcacgcgagtgaggtcgaaccacagggaattagattaactaccactaaattatacttatgatt

SEQ ID NO: 113195 - DNA, 1918 bp, Cannabis sativa
  modified_base (39)..(69): a, c, t, g, unknown or other
tgtaacatacatgtaaacatacttcacttctaaattgannnnnnnnnnnnnnnnnnnnnnnnnnnnnnngggcataaaacccaacagcttcttattaaagaagatacaccctcctgatagaatttggtccctatcctcaacagatccaaatcacaccagaaacactccataagacaacattcatacgttatcagtcttgtccttccaaacacgatgcacaaagccctctaagatcgacaaagggggtttccacccagtacatagcagacaatggagggtgtccaataatccacttcctcttgaatactcattcgctatcttaattccctattttgaagaagagccagaaaagttgttgtccaaattttgaattatgtttctagaacgcaatataggaggaattacattcttaccttgagctatcacagattttgtatgtatttgagcttccctgaattgctttgcctccacaaactgagcaaattctaaacgaatttcttccctctgaatatgttcattcatcgctaccccaagtgaaaactcctccgtgcttttcacatattacaaatgcctcttgacaaaatcaatgtcagattcctcatttgagaagtggataggttcaatccctagcacttcatccatggacttagtcttccttacaatagtactcgagttaggccataatttttctttttcttaggtgatgatctaggtttggtctacttcgttgcccttgtccttgccatagcaccgccagctcagggagctgagagaaagctcctatcaattggttttttgttgttcatttgtttagattttggaaaacatacatattttttgttttggtaaacagtaagaaattcatattatgaattcataaatattatgttaaatttattaaaatatttaaaaaataattaataaaatttttccatattaaaatttgaacatagttgcaatagaaagtgtaggaaaatttgctctaatacataggaattaacctctgaaattctaggttcaagatcacacttaaacaaataaaagttaaatcaaaataaacaaatcaagaactaaaaaccaagaaacacatatgaactccagaaacataatacaaatgaatctagatagcttccagacacaacaacacacgagaactatacgggttctgatcctaagttcaatgtgaacttggtcatactccagtttgaaagcattgctaccaatctttattgataataagaattagagatatcaatctcaagaggtacaaggaaataatcagagtaagtcatctatggtgttatccctcaatactcattaactcatttacccgagccaatgatgagtaattggttaaattatggtcgtgttactttgttttatatgcattttcaatgatgagtaacaagttgcactaggtagaggtatttttaatatcaggatgaccatttgtttcagatttctttttcgtgatagatcagatttacttttttgtttaacctatttttaagtgacattttctttcaaatttaattttataactttacatttttacatatacttttatcaaataatgtttaaaaatttttatttaatttttattcttcaaatcattatttatttactttttttaaaaaaatggttataagcaacagttacttatacattattttttagttcaaacatgcctatattatagtattggtaactacttactatatcaaaataacctaaaagtgatgatgccaaatgtttatatttttacaaactctttatttaaaggccacaaaaatgataaattcacgttttttttttttttgagttagataaattctgttgggaaacttacaaaaataatagaatttgggttaacttttacaaaaatactataacacggaaattttttcaaaaatactgt

SEQ ID NO: 113196 - DNA, 5256 bp, Cannabis sativa
  modified_base (35)..(47): a, c, t, g, unknown or other
  modified_base (654)..(665): a, c, t, g, unknown or other
taattaataaataagttaaatggaaattttatttnnnnnnnnnnnnnaattattaaatagatagaattgacatttatagagatagtattaaagaatggcatttgagaaaagaaagataaattttaataaaatggcaaaattgaaatctactaggccaaatagggttttggccaaggatgattaataaagctatttttatcttttttttatttcattttaattctaaacctaaccctaatagccaccctataaataaaataatatggctcttatttttagatgatgttcagactccttttgtcagacaattaaaaaataaagagagccattattattttcaaaatcttcttctcttctcaataattcgaagcctatagtgattgagaatatgcccacacatgtcaaagtaatacttagcatagtgaggaagattgtgtagaaaaactatcaactaaaggaggtttaggttcagatcttgatcatattgctacaacagaaaggatcaagggttagagatctgaacaaaatgagtcatactattctgctactattaatgtaaggttttctataaacttttatgtgtttatttcatttttttaggaaattcatatttgggatgttagattatagttttataatcaacatacatgttannnnnnnnnnnncctggtaaaataagttctaacaaaaatatcattatagtcaatgccctctttctatgtaaatcatatggcaactaaccttgccttttaccttgttccttctactcctgaaattccttctttccatttaaaaatctatttacatctcataagtctcttattcaatggtctcttgactacaatctaggtttttttattttcaagtgacacattttcctcttgaatggcttgcagccattttgcaccatcttttccataattgcctctaagtagcttttaggttctacactctcaaggttaactactgatggtgaacatgatgtgaactcagcatcatacttgtatggagctttggtgatcctcatctctctgtccctagccaactgatatccttccaagcttgtttgagcatcttttgtggttgtagaatcatttagatcttcttgtgtttcatcaattaaagatttagacactaagtctacctcaatctgaggtctactactccctatttcttgagctaaagtaatatctgtcttctttgccatggccatttattcttcattgaagatgacatttctactgataatgcacttcttgtagccaggttctacacaccacaatttataccccttcacacaatctggatagcctagaaataaccacttgagtactctaggctgaagcttgtcctacctaatatgagcataagcagtgcattcagacactcttaggtgttcaaacttaggtacttgatatgtccacaactcttgtgtagtcttaaaattcaatgggttagaagggtatctattcaccaaataacaaggtattttgatagcttctccccaaaatggtctttcaagactagctcctttgagcatgcaccacactctctctatgagagttctattcatcctcttagcaagtctattttgctgaggtatgtctcgcagtgttaaatgcctagcctttccatgcagtttgaaaaattcatcaaactggtttgagtaatattcccaaccattgtctgtacttaacttcttaatcttgcatttggtctgattttcaatcagtttcttccatgtgacaaaaggtgttaaaagcctcatctttgcttttcaacataaatactcacactttccttaaataatcatctataatattaatgaaatatctagcaccacccaagggtttaacttttgaaagatctcagagatctgaatgtatataggtgaaccttttcttagtagtatgcacaccaatgctgaatttgattctactactcatcttctcatatacacattcctcacaaaacttcaatttcccttccagtccaccttgaaacaagccttgcttgtccatttctataagctccctttcactaacatgtctaagcctctaatgccaagtcttgatgttttcaacatcattcttactaacttctggagctgcttctccaatcaatgcattcccaactagatagtacaacccattcttaactccctttaataaagatcaaggaaccctttgaaatcttgagtgtaccattataaattctaaatgaatagccatgattatcaaacatgccaattaataaatgattgctctttaggtcagttgcataccttacttgtttgatagtttgagtgaaaccatcatgtagcatcaaattatagagccaatttcttgaatttgacatgccttgctgtctcccaacatcacagttccacctagttttcaatgtagctattgaacaagttcttgtttagtttcatgtgaaatgagcaccctgagtccaaaatccactctccaccttattttgaactagatgcaactagtacccttgaatattcatatccatctataatatcagcttctccttgattcttgttcttgttctttccttgactgttctctcttttcaatttagccttttatgccagacagtcatcttagaagtgtccatctttcttacaataataaaacttctttctagttggagttcttgagttagaccttcgcttgtacccattcttagatttcttaaattctttttccctattctttcacgaacaaatagaccatcaccacttgattcaggtctctcatcaacttttttctgaattccttttgaattcaaggtttatttaactacagacatagttagtgtatctttcccatatagtatattattgacaaagtgttcatataccttagggagtgaactaagtagaagtatggcttgatattcttcttcaattatgatcccaatattattcaggtccagaattaacttattgaaatcaactagatgccttcgaagctctttagcctcatctatcttcatcgtgtagagtctttttttttcaagtaaagcttattggtcaataatttcttcatgtaaattgatccaagcttgttccataatcccatggcagattcttcatcaataacctctctagggacttcatcttctagactcaaaggaatagcactatgtgctttcacttcgatctcttgagaaaccttcttgacatcttcttcttccttagaactagtcaccatgactgcatccgtaagtccttgatgcacaagtggtgctttcatcttaatccttcataactaaaagtcattaagacctgtaaactaatctacttcatatttggtagtagccattcttgatgagttcttgaaacttcaaaacttgattcttgaatccttgatctaaccataaagctctgatactatttgtggtgaattaacacctatcaagaatccaaataaaacaagaattgaagaactagaatggctgagtcaaacaatgacataaaccaaaaataaatgcaaaataaactaaatgaaatacagacgaggtttacgaggttcatcaccctttttatggtgactaatccctgagaggaactgttctttggccaagctttattcgatcttcaataatagaggaatacaaaaaagaatacaagagttgagctcaactatggtgtcttgcaccttacaaattaactcacttgagagagatgtgatcaaacacgaatcttttttaacaaccctcatcactcattagaaatgcaataatcatctaaatttctctctagaccatcacttaaagaagtaatacacaaagcattatataggcaactcaatatgaggggtgcccgaactatatctgaaataactaactcggaagttgactagataaacttgcgccatctgacaggttactagataagactaacagtaacagtacaccaagttactaaagtctcccacactttaatctattacttttctcaccaatttagtgacacggtgttggtcaactattagtatcaacaatcacataataatgtgatccccaaacacacattaaattaaataattaatcacacataattaaataatgggtgtctacatatttggtaccctgtgttttatctaaatacaagttatgtatcctgtatttttaataatgtgtatttggtactctatattttaaaatcatacatatttgataccctaaatttaattttttttttcataaaactttatcaatacaatcaaactgtctaaaattttataaaatctgaatccaaatttaattatttgattacatataactgagatttatttggttaaattgataaaattatattgattaaattttactttaggttactaaatatgtacaatttaaaaatatgaggtatcgattaagtattattaaaaacacaaggtattaaatatattcttttataaaaatacaaggtactaaatgagaatattctcctaaataattcaactcaactatatcaatatattctaatacaaattctcctatcaataaagtatgccttcaatgaaataaattttgagatatttcatttttggagaatttttaaaaatatttttcttttatgttttgtttacaattttacaacttaaaatttttaattacaaaaatacattttattcagcaaaaaataaaaatacaatgaacatcacgacaactataattctactataaaataacaaaaaataatcaaaaaaaaataacctcatgataaatactataaaacaaccaaaaatagtttattatatttttattgaaaatgtattttataaataaaaaagttcaaaaaataataaaaaatatattgatatatttttatatatttttttaaaaaatatgatctattatataaatttttctaaattttataatacttattattaatcatcctatcaatatatcaaatcatcattttttttttcttttgttcatgaatcaagacacttaatatgacactactacttttacttgatcaatttgagcaacatgcgtgccaaatcaatgagaaaatctttattatttttattatattaatattattatgaggggaattatttcatatactatttttttaatttttttcttcaaatttacgattagagtttctaaagtagttgcagcgctagtttcaataggagttactagacgattttttgttgcaatttaggttgcagcgctagttgcaatatgagtttctatgtagaattcttaaaaaaaaaaaaaaaa

SEQ ID NO: 113197 - DNA, 759 bp, Cannabis sativa
ttttttttttacttttgaaatgatggagaattatgtatataaatttcttttttattaaaacttatatagtacaatgtttattaaaaatataataaagataaaataataaaaaaattcaagcgtgtaggtgtattgcatgttgcttaagcttttacctagtctataaaagcaaagtcaatatggtattatcatatgatttttcatcatactcaacgtattctctatgaatatatttggggattcattttatatactatttttaaattttttttttctttttacggtttgagctgttctgataatttctatataagttgttatgtaaatttagattacgaatatgattgatatgttagtttattacatgaattctgtaaaaataaaaaaaaatgtaaaatcaatagaaagactcctaaatattattctctaaaaattattaaattgatctacatatcatatgttatgatataatttacatttatattatttacagtttcacatgaaaaatttcacaacaatgatagtaagcatgatgaagtcggagagtttgtatgcttctcaaggaggaccaataatattgtcacaggtatggaatttttttttatatcaggttttccctaagcaaattatttgaagtttgacataaatttaaatcatttgaataaatatgtgttagataaattaacaattaacccaagatctatttgtatataacatagaacacaataataagatataataattaggtatgtgtacctg

SEQ ID NO: 113198 - DNA, 2027 bp, Cannabis sativa
ttgacttcaagtctaacttggtttttttggcttgttgcaactcatccattagtagaggccaaaatcattgaagaaattaaccgttgtaatatcaacactactacttgtcttggtgcagaggaactgaacaagtttatctatttgcaagctgtattgtatgagacattcagactctatccacctataccattcaatcacagaagtgcagataaggatgacattcttccaagtggtcaccatgtgaggaagaaacaaagggtattgttgtcattttactccactggtaggatggaagagatatggggtaaggattgtttagagttcaaaccagaaagatggattacagaggaaaaaggttttgtgtatgtaccatctcataagtacccaatttttaatggtggtccaaggacttgtattggtaaagacatggttttgattcaaatgaaagtggctgcaatttctatactttctaagtattcttttcaagtggtggaaggacatgatcctatatctcctagtttaactatctctcttaatatgaaaagtgggctcatggctaaggttgtgaaaagatgttcttgaaatcaaatctatgtaatatgtaactagaatttaagatcaagttctctacttataattaataaaaataattatccactatgtttttgttgcttgtaccacttattattctcttgcatgtattatatatttagcaacatttttgaaaaggaaaataaaaattacttatatattttatgcatatctataaatgtaaaaattttctaactccaggaaattgaaaaatactttatttgtagggcatttaatagtttgttctaatttgacaattgcattgtaataccctgatcttgaatgcaatatatttaaattaggattgattaaaatctcgtgttattcaaaaaaataattcaatattagctatcattaaatgtagtcaaagaataagtcattgtcttctcaacctcacctcttgtgaattgtcaatactaatttattaattaatcatataattaacattagacattcagatattgaatattaaaataagaatcaaattccataaacttaaaagaagatatattttttttttcgaaatgaggctgaacccataaaaaaaaatactaaaattattagtagttgctcttttttttttctctttataaactgaaaattataaggacaaagtgttgaattgaaagttagatgaagaagaatatgattcttttgcgggtttacaaaattcaaaaaatctcaatttttgaatttgattgatcttaaatttttattttaattttttttttggtttggaatctgaatctcaatcaatttggctttaaacaagtttttgttggtcaactatttttaatgtcttaattaattattattcatacccaaaaataaggaagaaacaaccctaacaatggacaagcaagccgattttgtcacttaatatatgacttaaaactattaggattcgtttggtacgtcgtattacaccgtattgtattgtatagtattatattgaattttattttatgcaatatttttttgtaaaaatatgatatatataatctaatttaatacaatacgacataatacaacatttcaaacgagcccataattattattattatatatatggataatatataaataaattattgatacattttttgttttttttactttgaagaatataaaataatgataatcaaactaattaatttttaaaattaattgatcaaggccttatataattaattttttattatattgaatcaatattttaggagcatgatgtatgtatcactaaaagttaaaagttaaatttagggttagaatttaaatctcaattaggtcttgaactgctcttactctaatctgaatatgattagtgatttagggcaatgggttaactcattggaatgttccaaatcttggtttctcttcattgaatttaatgattgctaatattaaaaaaaaaaaataagtgtactcaaacacac

SEQ ID NO: 113199 - DNA, 1722 bp, Cannabis sativa
  modified_base (1583)..(1586): a, c, t, g, unknown or other
tatatatatatatatacagagagaaaattaaaaatagtatggttaagagttctgacttgtgggtgggtgcaggtgataggaggaagtgcccctttgggttcattgcttcattgattgctctgatagtatcccaatgcgcatttcgaataaatgcacgcccaactcaatcctacaacattgtaatatattgaatggtcaatcagtccaagacatgggaagatcgagaaaagtcaagagtggagttagttactagttagaccgcagtagcttcatatcatgaatgaagccctgaaaataattgataggctgtggctctattctatgactactatcccctcaaaaaaccaaaatggactttattaattcaattatgttatctctctaaacaatatgacttgtcaagttcaaatgatcattacagggatttctctatctggagcttaattgtgatggaagaatattcattctcttcttatcatattgttccctggtgctctgttttaaaaagactattgaaatttcggtcattaaactaatatttgccaaccaaattattggctgtgtctcttagggcaaatccaatgcaagctaccttctacttactttggtggatctcatttttcattttttaattataatacttttaaactaaccaatcaaaatagaaaagaaaaacaaaaatagctagcatcgctgctactgtccaatagctctcaaatgtttatatttgaaaagtcaaatttttttttgacaataggtcttatttttctgagagccacatccaatagcaactccattagagatgttgcacttgcttctcttatgttacacttattttagtattattaactaagggtggacattcagactaatccaatattttttttctcatccgttccaattcaattaataattaaataaaatatcaccctttttatttaaatttattactccataaacatataaatgtaatataaccaaatatttcaaataattaaaacaatatttctaagtaaatagaacaaaacatcatgaaaatgaatacataaaacaactaagtgttacaaatttaaaaagaaaaaaaattctaataaaaatataattaatatatattatgtttttcaatattttttataatatatataattggattagattgatttttaattagattttgagattgatattcaataaccgatctaatccaatttgaatataatttttaacatctaattcaatctcattgtaattggatatctaatttttttataattggattaaattaaatcgatttaattggattagattgaatgttacctacccctaatctattaaccactcaacaaaattaaaggattcatttcaccttgaggaatgctacgcatctttcataaataatcatgaaattgtatcttcaataatatgataatacttatatttaaaaatattcactcaaaaagttaaaacataaatttataaaataataattataatatttcatattttaattaaattacgggaaacatatatttttaggtttgtttggtatgtcatattacaccgtattgtattgtattgtattnnnntgtattgtattgtattgtattgtactatattgaattgtatttcattttatatttttatgtaaaactatatgtggtattgacttttatgagtacctaaatatataatattttagtataaattaaaatttaacatagt

SEQ ID NO: 113200 - DNA, 2232 bp, Cannabis sativa
gactatgttaggatccgacattgattaagtatgggattggttagtagtgtataactatttgggcatcctactcttttaggctagcttttgggagttaaagttcggtttatttaatatccttaattattctacaatgtcctgctctatctctgaaactggttcattctactcattaagttttggtggtgactgacaagaaaattactaacaaaaactttcaggtaagttgactgataagagtgatgtctatgcgtttggagtagttcttttggagcttctgttgggtcgaaggccggtcgagaaactggcaccagctcagtgccaatctattgtcacatgggtatgtgtctttgttttgaaaacaccatgcagttcagtctcttttttcttgtaaccaaaaataatctataatgctcttttatgcaggccatgccacagcttacagatagatcaaaacttccaaatattgtagatcctgtgataaaagatactatggatcttaagcacttgtatcaggtaacacttcatttcaatactatttggaagtgaataactttgtccaaatatatataattgttgtactacatcgtcatgttttggctcgagtaatgcataatatgctattcgtaggttgctgctgtcgcagtgctgtgtgtgcaaccagagccaagttaccggccgctgattacagacgttcttcactctcttatccctctagttcctgttgagcttggaggaacactgagacttacacaacccgcggtttctgtaggatctgctgtgcattctgatcaatgataaaactcaagagagttggttgtttgatgatgactctccaacagtttgaggggtttatttattccactgctcaaagtacaattccaaaactatgactttgcctggcttatcgagatgattattatattctggcaaagtgacttgattgaaaggtaaaggagtaattttttttttgggggatcagttatcacatttgtaaattagagtacattgttttgacttttgagcttgtgggatttgtgaataggaggggggcaaaatcaaactgtcattttaccttattattatcatatatttttatttgcttatttttctcacttttgatgtattatgaattaagctaaacttgaaaaatattcacctacatagctcctttcatatttcattggagttttgtaaaagtgcaaaaggaattgtctcatttctaattccaaattggctcaatttcttgctatttattaagaaaagctaatctaaactaaacccctagccagaagaaaattactagttccgcttaattaatggaaaacttgatgatttatgctttatactgtaccatctgaaaaaaaataaagtgccaacataattattattgttttggatgaaacatgtgccaaaataatttaaagctggcattatatgctaattacctttcttttgacaataatacctcttcattcaaactcctctccctctttaaccttttggtttctccatctctttctcatgtctcacacattttcgaaagatgaaatcgagactctgatcacctcctgccctaaccaccattaacgccgctttatctcaccactgaccctatatataattgtatttttaatgattaaaaatataatccaaactttaatctatgcaattattaatttaaaacactaatttataggtttcaaacaagtatgaatacaatttgttggtttgaattggaatttttttcttaaaaaaattctgaaaaagaaaaaacggtgttaaattgatgcttaacgatagtttagctatggccgcataaaaaaacgtgaatttaggccaaaaacgatatttgacgatattttttcaatactctcatgaaacatgattttcacaaaatggttaaatggttgtttatgctaccacgaatacctaattgttgtccaaaacacaacgcataacgatgctttagcaatctttctatgaaaacatgtttttggcaacaaaacaaacaaacaaaacaatacttaatgatggttttacgatgatctcatgaaaatttaattttaatacaatacaaaataataaataagaaatatacttactaattatttggttatgctctcatgaaaatatactttttaagcaaaaaataatgtttgacgatgattttatgatgatgtatatttatatatatatatagggacacgattttgtcccgtgatgtacttt

SEQ ID NO: 113201 - DNA, 7424 bp, Cannabis sativa
  modified_base (1291)..(1293): a, c, t, g, unknown or other
aaaaaaaaaaaaaaaaacgaaactagaattaccgcctaaccctataatatttgggaataaaaaaagatcggattgttaatttttgacatgacataaaatcatgaatggtcaacttcaaattgaatcaacttctttcaaaaacaaaattgaatcaacttgtactaaattttttaacttaccatgatctagattaaaactatttattatgtctgtttgtgtgataatttcataatttttttatgtagttatgtttgattatgtcaattttatattgtatcataatccattaatcgtgatagtattgagtttaggtcacatgacacgtctattaaatatgtacatgttgtgttgcgttatgtaacctattaaaaagatcattttatatttgtatttaaaattttgatatatttcaagtacgattggtaaaaaaaaaattaattaatattttgttttttaaattagaaaagtgaaatattttttaaaattatgttttataaaactgttttcactttttaatcaatattttagactccgatcccaacctagaccttagaacttggacacgcacctgaccccgacccggaaccaaacttgaactccgacctaaatcccaacctgacaccctacccaggacccaaaccccaacctagacccaaacctcggacccaaacactggacacaaaccttgacatagacatccgacaccaacctcgacttggaccttagccccgaccctagacccaaacctaagaccctgaaccgacctagacctaaaccctggacagggacccgaacccccgacctcagacccaaacctggccccgaactcgaaaccaaccctagaccccgaccaggacccgaacctcgaacccaaaccccgaccatgaacccaaccccgacttggattaggaccctggaccctagagtccgaccttggaccccagtcctggaccccgatccaaactcgaacatagacctcgaccccaacccagacccccacctcaaaccctagccccgaactcagaccccgatcccaatcctagaccccgaaccctagacccaaaccacgcccctggacccgtccccagcaccagatttggacctagatccaaccccgaccccagccccggtcccagcttctgaccctagccccaaatttgacttaaacaaaatcaacaaatgaaaataaaatttactgaacacacttttgttttttgtttttaaaattgaaaaacaaaagtgattatagaacgtatttttgtttttaaaaaataaaaattttacttttatnnntgtgattaaaaaatttaaaagcaagtattaccaaacaccaccttaataattctaacgtgtttacatttatcgtattaacacaaatacaatacgataacaagaactacaatcctagttttatgaacatcaataaaactgcctcctgtaccaaactaccctacgttcttatttcctagccttagcccttactcccacaacgcctatcccagaaagatgacataaaaaataatctacaatttagtcttcttattaggacaaataccaataaattatatctacaaccacatctactttagcctttagaaactgcaattttgtgagtttgtgtatgttatattttagggaatatacttatttagtattttttatttttatgaaaaacatatttggtaccttgtatttttaataatacttaattagtatcttatattttcaaattatacatatttaataccttaaagtaaaatttaataaaaacaattttataaatttaaccaaacaattctcaattatatgtaatcaaataattaaatttgaattcagaattcatattaaacagtttgattgtattgataaaattttatcaaaaaaaattgaatttaaagtaccaaaaatgtatgatttcaaattacagtacagaataagcattattaaaaatacaaaatacctaacttgtatttaaataaacacaaagtaccaaatgtataaacaccctacattttaaatgtattaattaaacattttgggctaaagcctaaaggcttgttcgatttgaagttttcaactcaaaagagcaggtagtaaactaacaaacatcggtttccagttagcatttttgcttcagagtattttaagttagtatccgagttcagttgctaacttttctactaggctaaaaatattaacatatcaaaaaaccaggacaaaatacacaagtgactggctaattttttgaaacacaatcatattcaacaacaaacaaaagttttccacggcccatagcttctttacacgattgtaacacccgccaattacattagtgctggaggtgaacctcattgcagtatctcttgaagttcaaagcctcgtccaccaaatattcactaattaaaagataaatcacatcagcaaacttttataaagaaaaaaaaagtggtgttcgagctaaaaacatgtgcttgttaatgcactcacaaaatccttgctgccattagtgacggctcccatcttggactccaaggatagtccaccagatgatgtgacttaattggtgctccttgagagttgaaatgctgcattatcacattaatatacctattgtgagtatcagacatctaacaacaggccatctaattttttttttttttttcattcaaatttttttttttaattaactgttaataagcatagttctgtaatagcatagctgaaaatattattataataaacaaaaatagcagttgttcagtctaataatatgacttgttgaagcaatttattaagtgcttgttcggtaacaattaaaaaaaacaattttctgattaagtaatcaaaaacagtgaagaaactataaccttttaaagtaatattacaaaaagcaaaaatgttaccgaagaaccactaactaaatacttgatcataactatgttgcttaactaaatcccttccattcaaagctggggtaactacatagttgcagaatatagaaaaaagaactggttgggatgtcatccaaccaggttactagcaagctcgtaacaaaattgcatgtgtactgatgagtgcgtatttgatgcatttatttacaattatttcctcttgttttggcttttcttccattttagggtggatttaaagtgtttccttcgtgtgtgtagtaatagtttaaatggatgacttttgggtcacattggatgttcaaggcaatgaagtatgcattacgtcgcttcttcttgagcgacaaatcaccaaaatatgaaaaaagggacaaaaatgtatggtgagacctgagaatactgctgctgacatgttgccagctacttggcaacgtgtcaccggtccttgtaacgctaaagaattgcaacgagcaacacgttatttgttgtgatgtgacatgttgcctgttacgccgtgacgcgtcatcttttgtgccaccaattgcgggatatctaattgcccacacaattttcatttactcaaatttaaattggaacggccaaagggcgtgtttaggggctagcgaggggggcatgactaaaacacaaatattgacgagagaagaaacaaacgttgagatttaagacgtgaattgaagccaattgacgagttttcaatcgttttcgttcattcttcattatttcttttttattttctgaattttgacaatatattgagattatgaaccacatcatgagtggctagttttcttatttataagggttgaggtggacctattattatgattttttattcagttatttattttgaaactaagatctccacctagccctacaatatttagaaactaagaaagcaattgctattcataccccatgaggggctgaacctcagaccttgtaggagcaaactatagggtattgtattgtattacaattcttgatttatgatttaatgaacagtttagtttagcccattatttgtaaaatttttgcaacacgtataaacaattcaagattagtaaaagaacattgttacctgggaactttgaagtatcagaattggatgttgccttggaaactgggttgaaataagaaagtgaacctacaacaacaaaatacaggaaggagtgatcagcagcaacctgagagtaaagatatgcagaaaaagagatagacatttacaatgacttaaacccgaaccagtaacacacacgtttattacaaaatagtgaaaaattaactccgaagttaatctgaatttgtcactactccaaataacaaaggacgtgaacagaataaaacaaaaacaaacaataactaatatgccatataataccatgaatgtaaatactccagagcaagcgaggaatgttgcccttctacagaaaacctgtcaaaaaagtatttcttaggctgattacttgaagttatatttactttgtaaataatacttggcttagatgcttactgaatcagcttctagaggtcttccaaacacaacagctaatgcctcgataaattgtcttctaacatcaatggagataacagcctccgagaccttaaaaagcaaatcaaataaagttctaatcatattaaaaattcatgcttcaagttattaccaaaaagaaatgaagcatagcttatgcagttgacctgtttcgccagagattcttccaaatggggaagatattcagccatgcacctgtgagagaagaaaattattagaaacagaacagccaataaaaaccagaagtcagatagattgggcacatataatgtatgacggcatgagagacctacattccatccacccacacaggaagtttaacatcttcaatgagaaacagtgccttcaactcagatgtggaaaataatttcacccgaggagctgaaggagtagaaacaacttttttcccaacaggatatatgacctgcagagtcatataacactgttattaacaaaaatgagagagggaacatcgaagaaatgtggaaatgggagagaatcgaggagacaattttgacctgtaagtatatcttctgtggaagtctccaagggcatccaggaaccattttatttatgtccatgtccattagaggtattgcaaatttgacttcttctggctacgctacattcaaaggtgtaaaaaccacacataatgaaaaggcatatccagcattatagagctcctacatttaaattgaaaacgtacattctgctttggaaaataccttttcaaccccggataccgtatgcatttcgatcccctgatgcaaagtaaacagcgattaaaacaatccgtcataggaaccattgtttaatccaaatatccttaacatatgcattaaacaatccaaatatcattaacataaatctgcattgtctcgcgatacagatatgcttcagtcaatgaacatgacatatgattatttgatatgtcaaataactataacgaaccatcactacgtcaccagaagacatcattttttatggtattacactataagattcaccccaattcatgaatatcagttattcagttacaatcaaaagtgtcacgtactagcgacttagttcaatcagcatcctaacttattatggaaccacaaaatctagttaattattacctctctaggtaacattgtgccaacttcaaatttcaacctatcatcatcaacctccccaacacgcctgttctggtaggacttgtattgatccctaatcaaataagtaaatattatcaacagccatgtattatccatgaaccacattgtcctcaagaaaactctaaatagaaaccaaaacccattgcagtaagctccttacctgagttgttgaacaagaatcataagccgagtagggtctttgctattccaatcactgaagcagttctttggagactttaagtaaccttctccatcaccatccattagaagaaatagattaaaagtttcgtcctcaggtccaaatattacatcaggagcagaaaacggagactccgcatcaaatataatatcccctaaaataaattgaactcgttatgaaaacgaaaccgataaagtaatatataattatacaatactcacatttgagaaagtctagacaatagggtatagctagagtgaaccgatcaagcgttccagggtagtatttgctaccagaccacatctgctcaatctgtaaaatcaaattattcccagacccataatgaagcagtgattttcttttttctttcccgagaaaatgaaacgagatttgtttactttgaagttgaattaaagaaaggggaaaaaagagagggtttaccttaatggaaagaggaaaatgagttacgaggtaattgagctgagcagcgatgaaaggatgaacattctcagaagacatgtttggtcggagagtgagttctggtttaggtccggtgtactggaaactcagaacaaccagccactcttttcttgtcgattagtcttcgttcgttgcagattcgaattgaagtaataggagaaagagagacaaaggtttgggggagtgtgtttgtttgtgtgtgtgtctgtgattgggaaaaaaatttgggttagatatgtaagcagtcacagcaaaaaaaaaatacattttacaatatattttttttttttttgacatgattatattgtgataaattttctctcatttatataatctggttatgataaagttgttcataaattagttgtgaacgcatttaagtgtcaatagtgagctagtttggatgaagattttgccatcttatctttacagagtactaaaggctgattttttttttgagttatttgcggcaaaatctcctaaagtgggcaggtttttgcaactaaccccctaatctaaaattttggtggtaaaactacctagaccactattttgttagcaaatacactcccccgtctaactgaccccgttttttgcttatgtggctgggtagcccaagtgcccagtcaacaaaatccatattacgtggcattgtaccatttaaaacttgggtttataactgaaaattaaaattaatttataataataactaaataaaatcaaataccccattaaacacaaatccactttaccagaataagaacccaaaacccagatgtcacacccattttcgttttaaatcaaaggaaatcgagagaagggggtcgaaatcaaagaagaagattaagaatataaattcgaagggttggggtactcctacctagattcatcctccattgtcgaaggggaagaacaaagctactgaatatgtccacggggcctcacctctgccgatgtgatccccctagggttgcagagatgaaaacattttggacgaataagaatccctgacgaaggttcgttagatgcccattccatcaggtgagatcctattgctttaattatttgccctaatttttgtgttctttcttctttttttttcttct

SEQ ID NO: 113202 - DNA, 5911 bp, Cannabis sativa
atcaatgatgccatgttcttcttcatcctccaatccaattgcgagtaatacaattagaagataagtttagaaaataccaggatggagattatgagaaattatcgggatacgactcagacaaagaaacagaaccattccatcctgatattttgaattctcaatttcctcaaggattcaaaaagccacatgttgctaagtatgattgtacaactaatcttgtggcacacctaaacaatttcaataccataatgcgagcaagcaatgctttaaacaacttgcgatgcattttattcctgacttctctgataggagccgtaagcagtttgtttgacaaattcaccagctattccattacttcttgggaacaattattaaaggacttcaatctgcaagagatcagcgaccaaaggaatctttgctaaccaatgttaagaagcaactaggagaattcctaaaagcgtacttaagccattttagtatggctacatccaaagttaggatctgaatgatagtattcagttaacagctcttcaagctggaataacaaatgacttgtcaactataggggtgagttatcggataatttgcgaggtcatcctgttagaaacattaacgagttaaatgaaagagcacaaatttttatgtagaaggaagaagcaaaaaatgagatgaagctgctaaagtccaactcgggagacgaacccagcacaagcaccgcaacagcgagcactgtgacaaccaaatccaaaaattcacatccgactggctcaaattctaagagaaatgatgattcgagagactcgtcaaaagataaaaaagaaatagaagaagcacgagaaatatattccaatatactcatgatatacataattgaatgaaactcgtgaaaatatctatctcgcgaatgaaaactgggtcgcatttcgtagacccgatccaatgaggcatgtaagaaataagtgaaatactaacaagtattgtcatttccatagagacattgggcataccattgttgaatgctgtcaggtgaaagacaagattgaaaatctcatctctcgaggtaacctaaggcaatatgtaaggcctcaaggaaacgaacaaaatctacctaataactagaataatcatagatacaacctcccctagttgagggcgagaacatattagtcaaatttggagggccacacctcgcaagaaacaacaataatgctaaaaaaaggtatataaataaagtgaaaaacgagaaatcagccttcgttctagaacccctaaaataggccaaatctgatgaacctcccatcacctttactaatgaaggcgcattgcacgtacagtttcctaacacaaatcctctagtaataacaatgcagcttgataataagagggtaaagagggttctcatggataacagaagttctatcagcattctttactaagaggccttaaagaagatcgacttaggagaaacaaggttaaaaccatgcatgattagcctatgttgattcacaggcaaaaatgtcgcgagtttaggcacaattgaactccctcttatcttgggagaaccgccattatccatgactcagatgcaagagtatctggttttcgacatctcttctgtttacaacatactgatgggttgcccaacattaataggaacgggggcaataagcttaatcaaacacttaactctgaaattctccactcattcaggagtagggactgttaaaggcgactagttattagctcgacaatgctatagtgtggagttaaaaaatagaagggaaaatcatcaattgatggtaattttgacagaagaaaaagaggaagatatgtaagatctagatcctagaatccatgatgaaaataaccaactcaggcctatcaaagaattggaagaggttaatttagatccaaacaatcctactaagtttgtcaacattgggcaaggtttggaggaagaactaaaatatcaactaatcacttttttgaaggcaaactaagatcagttcgcttggagccatttatatatggttaggatcaacccgaacatgatatactatcacatcaacattgacctagcttatccttcaaaacgtcaaaaatgatgacctttagatcctgagagatagaatgcactaaaagaagaggttgaagaattgttgactaatcacttcatacgagaagcattataccccttgtggatatctaaccctgttcttgttcgaaagccaaatgggacgtggagaacctccatagatttctccaacttaaataaagcatgccctaatgattgttttccattaccaaggatcaaccaattggtagatgcaacaagaggacatgaactaatgacgttcatggatgcatattctggttataaccagattaaaatacatgtcccagatcaggagcatacgagtttcgtaacaaatatgggactatattactataaagtcatgccattcaggttgaataatgctggagcaacataccaatgccttgtgaatggtatgtttgaaccccaataaatgtgcttttggggtatccttggggaaattcctaagtttcattgtgaatgcgagaggaattaaagccaaccccgataagataaaagcaatcgttgagatggtcttgccaataaaactaaaagaagtacagtctttaactagaaggatggcgccactcaacagattcatctcaaaatcaactgataaatgcctcccctttcttcaacatcctgcgaggaaataaaaagtttgagtgtaacgaagagtgctaaaaggaattccaggagatgaagaagcatctatccacacctctagttttggacaaactaaatactgaagaaacacttttcatttatttggctatcttaaaaaacgctacaagtgtagcattagtgttaaaagaaggtagaactagtaaccaatttactatataagtaaaaggttactaggggcaaaataaagatacccaccactcgagaaacacacacattgcttggtacatgcatccggaaagctgcgaccatactttcaagcacaccctgttaaagtcctaacagatcaaccattgcgacaagtattgtcaaaacttgatgcatcgggaagatttattaaatggtcgattaaacttggatagtttgagataacctaccacccgagaatatccatcaaaggctatgctttggctgacttcttcatagaagggataaatttaggagaagcctccacaacaggaaatgaaataaaaacatggaaattgtttgttgatggggcttttaacaagaatggctcaggggtagggtgataatggtgttgcctgaaaacttcaaatttcattatgcactcaagttttaattcaaaacttctaacaacgaagcagaatatgaagctttgttaactggactaagtatcgatgaaacattgaaagtaaaaaatgtccaatatttcagtaattcatagttggtcgtgaatcaagttctgggagaataccaagcaaaaggcacgggaatggtcaaatgtttagagaaagttcagaagaacttggaatagttggattactttaaaataaaacaaattcaaagagaaaaaaactctaatgcagaggccttagcaaaattggcatcttactttgatctcaatagattaaacttggtcccagtggagttactggacaagccaagtatatgcaagaaagagaatcaagagattgacatgatagatgcgagccctatatggacgacccctatcgttaaatacttgctagatggagaacttccaacagatataaccaaggtacgaaagctcctatacttagttccatgatatacaatagttgatggaaaattataaaaaaggggatattttatgcctctactacaatgtgtactaccaattgaagctaacgaagttatcagagagattcatgaaggcctctatagagatcacgcagggtggtaaaatttgtctaagaaaataatctgtcaaggctattattggccaaccatcaacaaggacacacataaatttgttaaaaggtctgacaagtgccaacatttctcatatataccaaggataccacccactgagctgagaatgatgacctcgccatacccattcgaaataagggtgattgacttgattgggtctttaccaacgagtcgaggtggcacaaaatatgttgtcattgcagttgacttctttacaaaatggacagaagcaaaacctttggtatccatcccccaaaaaagttcttgattttttcatcaagaacataatttgcaggtttggcattcctattaaaatagtgtccgataagggtactccgtttgacgaaaacttattcattgagttctatgaaaggaataaaattattaaaagcttcttgtcagtgtcgggaccacaagccaacagacaagttgaagctattaacaaaaccttaaaggacactataaaagagaagtaaaatgtagccaaaggcatatgggttgacgagctaccactagtgatctgtgcccatagaataatagaaaaagtagaaatgggacatactttgttttcattggcatttggctcagaagcaatgtttatggtagaagtgaacattactacccataggcacggattctacaatcaagaacaaaaccaggaactcctcaatatgtccttggatctacttgaagaaaagtgcattgagtcacaaattaccaccctggttatcaacattgcatcatgagatactttaataaaagggttcaaaaaagactttttaaagtaggtgatttggtgttaagatgcatatttgcaaatacgcgagatccatcagcaagagtatttaagccaaattgggaaggcccgtttgttttgaagctgtggttggaactggagtttatcaattagcatggcttaatggcttactaataaaaaaaaactagaacaatgaacatctaaggtcttattacaagtattttattttattgtattaagatgatgcttgtatataatgttctttattttaataaagttgaatgttttaagtaatcatacaatctcatttcttaaaaattacttggggggcatatacatatacaatagctatgtattacctagaagtgtatgctaaaataactaggctcgctaagacatagaaaataattttttttacaaaaaaaaaggtgtttgattataagctggtcctgagcatcataaagtcgaatactttgaaacctttcttaaagtagaaatataaaaatagcagttgtaagagagacttctaagtctcataaacaacacaaagctaaatgcaatctgaataaataacagcttgcatattatagcatgtattataaacgagataccctagtgtcaagtgtgtcttgaataataatacgcaagctaaagtatgagtagagaattaactattcatatacaagaaatcaagaagtatttaaagcagttttaaaaactgttcaaaatatttaaagttctctaaaaaaaataaattatggtagaatattaactggtcgcacataatatggtaaaatactaactgctcatacataaatccatcaaaatatatttaattacgcaaggatatttaaggtcgcaatatatcctaacttaaattgagaaagatgttttgtttacttgtgggcgaaaatacaatattcaaaaacattcataactcaaataaagcaaggtaagattgcattaaaaaatataattacagtaattttggccatccaacaaagcaaatgaaaattagagtaatttgccgcataaatacctaagcttaactcccagttacaattaaataccgaagtttaatttttggcggtaataatacctaggttataattctggaacttttgtaggtacctgactgttaagtgttaagtaaattgccacgt

SEQ ID NO: 113203 - DNA, 3030 bp, Cannabis sativa
  modified_base (2976)..(2977): a, c, t, g, unknown or other
aaaagtgttgtatcatcttattctttgtaagatggtcccattgcctctgttgtcttgacacaacccaagaggtcaataccatttagttttcctagacagtattttgtctattcgagtaagattaaactcaaagattggaaggagtagacattaccactaatcaatgccatcttaagccacgacaatccaagcactccaataaaaaatttaaaaaatcaataccaagcacagattgggtttcattttcctattcccatgctaataaacccttataccaaacaccccctaggtgttgtatcccttcttcttcacgcactagcgcagcactggccgcattctcaaaatagatgaataattcgtctctatatattcctcacgcactagaggtctagctaagtgatatttgagagattggaaagcctgttcgcattcattagtccattcaagcctcattgcatccatttagtatattaaagaaggaaccacacttgtcgatgaatttggagacgaataggttaaatgcagcaattcgtccaataaaggctttgcactaacttgtagtaggttggtgaagtgaaatgtatgcttaaatgtaaaattttaatgtgaattggtttaaggagaataaaaacaaaaaaaagagaaggaaatctgttgggagaatgtatggaagagtattttgagtactccacaaaatgtatacctattccccaatagttaactttagcctaatgtttcatttcctccctaatatatgcctagatgccccctagcgaaaaatccacttaccacgaagaattaaacaccagaaaatcatgtttagaaaataaagtagtttccatatttattaagaataacaaaatagcatcacatgtatctggtgtcttcatatggtaaaacccaaaaaaaaaaagtaaaaacaagctgaaataacagaaccaaacccttaaacaatccccacacataaaccttattttgttattgaaattgtatcaggaaaacatgacccaagaaccaaagtcttcaaaaaccatgaatcttgatgcgatctttcttgacaagactcgcctgaacaaggaactgggacacgttcttgcgctgatcaccttggagttgaattattttacccaactctttatcctgaacaacattgccgttgcagcaaaactccttcttaagatccttgaggatcttctcgtagctaaagtctttctttaacccctgcaccgtagtcaggcacttctttccattcctttgctgaactcgaacgtgtacattctctttggccccaggggcatcagtgtcctgcgcctcagcaaatgggtcgaaagcagatggaatctgaatgtctaactcaaccatgtaccttgctggttttgaaagtagaaatctccgtacgaaagccttttaagctgtgtgcaactgcgatagatgaagtgaaacaaacacagttagttagctcttaattcaaaataagaatcaaattcaaataccctgttcccaaaataacataaacaaagctatataaaacacaacagaaaattatatccgctacctaggtgtgtcactacatggaattaataaccataagatcaggcccttacactcctacagcaaaaaaaaaaccacaagaccagacccatattttgaaaaatttcctttgaaaacaatacaataaaccgtatgtttcaacaaaatcaaatcatactatagtttccagccacaaacaaaaggaccaccacaacccagatcacaaattaataaaaattcagaaaacaataatagtcatgataaaattctacagcttttagttttattattaagattatcacttctacaaaattctattaattgatattaggctgatctccaagtataaaaaatagctaaaaaaaatcgaaaaatcaaaaagaccaacccaacccatgttcaacaaccacgccaaaacaaagaacacataaactaaacgtcctaagatatatatatatgtgtgtatatatatggcagccactctaaacttccacatatatatacaaatatagaaatatatattatactacacgtcaaaattatattatactagactgggaggttaaaaagataaaataaaacccctctacatggacctcaacaattggcagcctcggcttcatcaaagataagaaattgaacagctctatcaaaacataaaggactatctaatgatcacaaaacccgtaacacaaattcaactaacaaaaagacaacgagagacctatgagaggacagcccgattttccaggttaagaaaaagtaacagagctatagaaagtctcaaatcttttgaaggttacaaacgtaaaaactgaattcatgcacaccaatcaagaaaaagatacccagaaaactaaaacgttacaataaatattaaagaaaaaaatcaaaagtaaaaactagggagagatgtttacctgaagataacaacctcagagaaactcaaatattcttagacttcttagaatatgagggctattgggtgtgtatttataggaatcaaaacaaacgcggagtaagttgtaagccacaaattccaaccatggttgagttgggttaggattggattcgaattaaatcactagagaaagtcggtgtaaaagcaggctgacggtgtagattgagtcttgaagtaattattgacggatgggatcatgagatgtttacgtgggtcaaaagttaaagatgcgaccgcgtgcattggacgcaagtttcatcaagtgaactatgtcggataaggaataatatggtcccattgagaagattccagagcatggcgaggcccacgacttcactgtttgggttttcggtggactttttgaggcccgcaacttcactgtttaatgggcttttactgcattttttcagggttcagatgtaaaatagttttaaatttagagagtaagttgccgtttggtaacatttttgttttttaattttttnntcacaaaataaaagtaaaattttgtttttgaaaaataaaaatatgttctgtaa

SEQ ID NO: 113204 - DNA, 699 bp, Cannabis sativa
caccaccaacaccaacaccaacaccatcaccatcaccatcttcgttctcactcgactcatcattataactcgcaaacctaatcctactcgttgaagattcttcgccgaaagagttgacagatttggcaaatttatagcgccgattgtcatcgggaaaccttgtaatcgttccggcgaccatctgatcgtgagtacggctgcgcttgggggctgcggcgggtgcagaggagggttgaggggccatggaggcgtctatggcttcctgaaattggagacgtaaggcgaaatcgaggtcggactcgaagggttgggcgtccatggcgttggttggtatggttggtagagacacaaaccaaatcttctgaaagtggtagcatggcagtttggcttctctgttattatatatatattgtttggtgtacacgtgcatttttgattggtggaattaattaatattttattttttaaatttttggttgaaaagatacttgggtcgaaattatcgctcgaaacaaatttgggaagtgaattaaattcgagtaattgtttgtttgtaataaaaaataagaataaattcgaataattttttttagcaatatttgttcataaaatagagggcgattttacaatgcacccgtttaaaatgaatatactgatacagatttgtttcgacatttaaaaaaaaaaaaattagtctaa

SEQ ID NO: 113205 - DNA, 2239 bp, Cannabis sativa
tgatatagaataatctggattacattgaaacagatttttatttagggcataaaacccaacaaatatatctccctatgagtgtcgctttcacaagctgccagactacaacttcctcaaatgctttggttgtgcatgctatctgcacctcagaccgtacttgcctaacaaattgaatttgagatccaccaagtgcatcttccttggctatagcttacatcacaaaggctatatttgtgagaacaaggagggccgcatttacattgctcgtaatgtcctcttcaatgaagatgaataccctgcctctgctacaacaacaacagatcaggtacaatctaccttcatttctccttttcccacagtcagtttcaccattcttactttagtctctcactcaacttctgttttatctgaggcaaatggatctggtgagccttctgttgtgcaaccatcacctgcaatagcctctccttctcagcaacctactggttttgcctctgatgcatctcagcaaccgtctgtctctcagtctccgcataacatttcccctcccacaaacactcaaacagatcctccatccaaccaacctactatttccagcattcacccaatgcaaacccgatccaagagtggagtgtacaaacccaaagcctacctatccactcattaccctttaccagaatcattactcccaacaccaccaacttccttcacacaagcccttgctgatcccaaatggcacaaatccatggacactgagatgcatgcacttagaagaaataaaacttggaccctggttccttatcaaccacacatgacaattgttggaaacaaatgggtacacaagatcaaaataaatgcagatggctccctcgacagatttaaatctagacttgttgcaaagggctactctcaaacacctggtatagactacactgagacgtttagtcgagttgtccagcccacaacagttcggcttcttctcacacttgctgtatcttttcaatggtcggttcaacaacttgatgtatccaatgcatttcttaatgggactcttaatgagactgtttacatgcagcatcctcctggctttattgaccccacacaaccaacacatgtctgccttctacataaggccctctatggtctgaagcaagcatcacgggcctggaatgacaagctcaaacaaacactctgtcacaagggattcactccttccaaatctgacaactctctatttgttagtggctctggcagcgatatcatttacctattagtttatgtctatgacatactaataacaggccctattttttaggtgttaaagttcacaggacaacctcgggtatgcacctttctcagaccaaatacatctcagaattgttaacaaagcttcacatggatggtgtcaagccctgtccctcaccaaccaattcagctcagcaactttctctaaccagttgagaaccattttcagatcaaagcttgtatcgcagcaccctgggtgctctacagtacttaacgttaacaaggccatacattgcttttatcgtgaacaagttgagtcagttcatacatgctcccaccacacatcactgggaagcatgtaagagattgtttcgatatcttaaaggctccatcaatgaaggactcttaataaaacctactcttagattgtgtctacaagcttatttggatgccgattgggcgagctctcctgatgatcgtcgttcaaccgggggttatgctattttcttcggaggtaaccttgtctcctggtctgctaagaaacaacctgtggttgcccgttcaagcacggaaagtgagtttcgtgctttggcgaattgtgttgctgaagttaaatggatcagttctattctttcagaacttcatgtttctctgccatctgccccaatcatatgggttgacaaccaaggagccgcaagtctagcagccaatccagtgtttcacgctcgatcgaaacacattgaaatcgacttgcactttgttcgggatcttattttggccaagacaattgaggttcgatatgtcccttccatcgatcaagtggctgatatcttgaccaaggcattgagcaaagacatatttctctatctcaaaaccaaacttcaattgtgtcctacacaatttcgtttgaggggggatattacagtacaaagttagttaaagtcctcttctgttattttctggtttaatctgtcagagttagttacagtctcaa

SEQ ID NO: 113206 - DNA, 3757 bp, Cannabis sativa
  modified_base (3587)..(3588): a, c, t, g, unknown or other
aaaacacaatatataatctttaattttaaccgttaattcataaaataatgtgatattaatatagtagtatatttatttaaattagacaacaaaacaaataaaataggatttcttcataaaataagaaaaaaaaaaatcataaattagagaaccaaaatccagccaagctaaaacttaactttaagtttaacacaaaaaagaattaacaaaaaaaaaaaaattgatcaaaatctcattttatattctagttgttttacactgattgtataatgttatgtggatatatatatacatatacaatatgatatatttatataaattgaaaaatatatataataaaactcaacggaatggtgattaaactaaaaaaatttctttagttttatatatggagattggattgattacaagttaagattttatttttaaaaattttaaaggagtaaatgatagatttaaggagaagagatagagatgagtttatgaaaaaaaaaaaatcttaaacagaaatagtgaagtgcaaaaaagaaaaaataatggctaagtttattgaaaagagaagaaaagataaaaaaaataataaaaaaataaaaataaacgtaaagatagatggagtattttttttaataaaaatcataagatttattaattaataaatttgtttacacacttcataacaatcctaacaaagtctcttaccaagaaaatcaaacataaaaataatgctcttcctagatagactaagtgttttagttgtgtttaagtgggtatattaatcaatttactttattaattaataaaaaaaattaaaaaataaaataattttataaaaaaattatttagcaacaatggttttaaaagaaagttttttttctttgatatgaaagttttaaaagaaagttattagatgaatatccccaaaacttcaccatagaattattttatataattatgtagtatgctatttttacagatatattgacaaacaagaagtaattaaatgaggagcatatgttgatttgatcatattccctgtacaatgctgccatgaaaacgtcttctctcatttgtgaaaaccagagttccctaaaaaattaaaagattttatgtaacgttaccaactctcagttttgcaatgacaataatttgagtgttatcgatgtaatacttgtgctaaggataatgttctccactttatggcacttcttccccagtgctattattaaaatgcaaaaccagatgaattgtaaaaacttacaagggatatcaatgaatccgacaatatatttagaccaggatagaggaaaatatgacaaaggacttccacttattcattgttcttttttggcatgtgtggaacatcgaaacgccattaaatacgggaatacagttcctaaatctgatgctcttttggaattgtatttgtatcagcagtatctcgatgagttctaatcaactatcaatttctccactaaaccactggcttaaacacgacattaaaatggaagccacaaaatcatggtttcctcatgatgaagtaatatctagcttgaataagggtgaagttggcccgaaactggtgtgaagaaattgagccttgaccgtaagtcccgcaaaccacttgaggctagctcaagtggctataggtgggtgtgtgttggaggtcgagtccaggtaaatttgtaatatataaacgtttaaataaaaaaaagacagtaagtcccgcaataaaacatgttctcattttgatgctattatgtttgtgctctacgtataaattgtggcgctaagaaaatattgaaagagataggaattatgtaaccataccagtttacaaaaagtagtaactaatataattctacagcaactcaacagcagcagaacctgatgtttaaaacttgtgcaatcagtttaagcacaccacaaaaaaaaaacaactttcataatcaacaaaatttgataaataagagcttagttgaaaacttagctgcctaacaaagcaattgacaagaaaataattgacaactaaaactaaatgaaccagaaaagaacaatactgaaaaacatttgcatttaaaatgaaagccttcatatactatccagcggaatttaatcacatgaggtgactttggagcctatactatgtataaagcttccacaaaatcaccattcaaatctccgttcttaaaacaatcacaaggccaatttacacttacagcattacaaaaataattaaaaaaaaaatattctcaagtaaatatagcttcaagcctcagcggtagtgacaattacaaatcatcataattatttctgataatacgtgcattaaaatgcatcattggcaaagcaaaaccattaactaaaaagctaacaaattcaattaaaatgaaaaagttttcatagtattaaacatgatagtatgcatcagagagattccaagcgacaaatcatcaacactccatggagttctgatgtccctgtctattttatcgtcacttgcataaaacataaatgttagttgaaattgaattgcaaataaacaaaatctcataaaacttttgaactttgtgggaagaaaaaatcatcagagagattcccaaagacgtgtcaacatcctcgaaatgagtactgatgtccctgtctattttatcatcacttgaaacaacccacaaaacgaatgaaatataaacccagaaaaggaatcatcaaattaacaaacaaatacaactataatgaattaaaaattggtacctcggtaggaattatcaaccaaacgatctacaaagctgcaagaggataggaagagcctcaaaagcctcagatttaagtttttttcatagagattaatctcaaagtatatttaaaaaccatcataggcaaaggcacaagtaaacacattaaagagaaaaataataaaaacacacatgatcaaacaataagaaaattaaaaaaggtcgatagtaggttgaagatgtatagaggtttaagaagtgttttgatattagggtttttgcttagactgaatatatatagtagtgaagaactgaaggactagggcaccaaagtgaggcgtacggcaatttccacaaacacttttgcctatagatttctgttctggagttccattggactagaagaaatgtccgtgagttgaaagtccaaactttgtattgggctaaaatgtcacccaatggactgggccaaggtcacgtcacaacatacctatgcactaccattgaagcccataatttaaaatttaggcttttgtttctggatttttacaaaagatgactaaaaatcaattttttttactttttttttcttatgatgacaagtttttcttttttaacataatactttctcttttttacatttatacggctgttaagtatttagcacccgtatggtacgcaggattgcactacattggactgaaatagattggactggactggacaagattgaattatgctgaaagtaatcctgtgcttggtttaaaagtagactgaactattttattaatctcattaccaaaatatttttgggccgaggccatcattacttcttgttatattttgaatcgtgtnntcattaggcccaacatgaataaaaccccttgtgagctttggcaagggagaaagcccaacattggctattttagagtttttggatgcaaatgctatattttaaataccaaggacaaccttagaaaatttgatgcaaaatccgatgtttgaatttttatagggtattcaac

SEQ ID NO: 113207 - DNA, 2117 bp, Cannabis sativa
  modified_base (28)..(38): a, c, t, g, unknown or other
ttaattaatcacgttttccataaacctnnnnnnnnnnnaacgagctgcacagtatgtttagaaatcacgtaatacgcctatgttaattagggtgttacaatgttttattcaccttcctgttaaggttctcaaacatggtcaactcgttcaacaattgagtcatgttgaaatctagctttttcatcacatagcttttggtgaaagccttgaagctaggaaatagcgactcaagaatcatagtcacttgagtcctatcgtctatgatagccccatgtgtctctagctacctcatgcattagctcaatcatgtgcaatacatgagattgaacaggaacacccttcttcatcttacaattcatgtagctacgagtagcatcatctcttgtttgattagactactgcccaaacatggcctatagagtatttattatttgagatgcattctttatgttctcatgcatcttacgcagaatatcgtccatgcttactagcatgaaacacttggccttgttgttggattgaatccaagcatcatatatgtcatgtatattttttggggcattggtagcaggctccttagttagggtaaatttttaattctcacaaactagcattaaattcaaattcgatttctatttataaaaattatcaccattcaatatttcaagtactagtaaagtagtaaggggtttcacatagtaaacatgactgaaataaataaagtaacataacgattgtgcatgaatagtaaatatcgttttggaattactataaatgtgatgcatgagcacatacaagtaaaacacataaaatcttgtttaagttatttcacaataaagctctttgataattgattatcgccttaggattgataaaaagtcaagttcattaagcctatgagacaattctcatctttattattttaaaacttaaatatctcacattttcttttcaaaatatgaagtaccgctttttgaccaagttaacaactaagtactatgaagcttagttgcactttgtgagtgtaaccatatttcctataacacaaagttcacaaacaagagaatcagaaacacaagaaggaaaacaaagaagggctcaaaaatcacatcgtttgacaccgaaagggtttaggacataaggaaactagtcacaaaaacatcactctagaccttgtcggacctcatgaaatcagcatcgatgcaaagtggaaaaggaaagattctcaaaatttaaatttccctaaagcatggaaaagtttcaaggttcgatcttccttattgatttctaagtttcagataagaaaacaacttgaaacaccacccttcatggcagcgcatacacgaatgtcgccatgaaacccataaaaaatccaaaaatgcatgttagtatcacttaaagtggctacacaaagcctacctacccagaaaatggctagattataagtacgggatggaaacacttacttgtaagagtaggtactgggggtgccaaatttcaaacagtagaatgaagcctttcttggaaatccttgaggcgccttatcaattcatcagtgtctgcttggatgtctaacaacagagatgtagtagataaataaatgtctgaaagtggggctgcttctagaaaatgctttgaccagagttagggaagatggtggtgaagttcagtaagtaatcggacatccaccaaaaaacttctgggttttttagaagagtttctctctcgaaaagtttgagagaaacctaaaatggaaaaaaagttgctatgaatgggctcctcacttatttatatccaaatggtgattcgcatgccttcaagtcaacgacccagatcaaatttaaaaaaacacattttagaaaaatccaaaggaataccaaaggtcaccattaaatgctatacaaataaccaatgaatactaatgataacctccatctcgagaacttcactgacatgctcagctatcaattcgcaaactgaggcctcacatgtttgcccatactgcatgacgtgtatgaacaaagaaattgatgatatgtgtattcaacccacgagatatgaaaagtttgtgggtgtaatgaccgctctagtaatgtggattagtaaaggcaattagc

SEQ ID NO: 113208 - DNA, 1759 bp, Cannabis sativa
  modified_base (915)..(927): a, c, t, g, unknown or other
  modified_base (1710)..(1733): a, c, t, g, unknown or other
tggtggtggtgaaaagtgaagagagtagagagagagagagaacctgaagaagaggatgagagcggtgagaaggaaggcagtgagggcatatactaaggcaacagttcaagcaaaaaacgttcttctcgttcttcctgcgattctcgtggaccccacaaccaccaaagaatgtctcagccatcagaccctctagccatgcaggtttcatattcgtatccatacctgctcctgaaccatatacttctcttaccatctctctctctttctctctctaccaaatttctttctttctttcttttcttctttccaattatatatatatttatatatgtaaatacaaagaaagagtagtgagtgatatgagaaatatgtagagaactaatgaaagctaattattaatagacccagctgaagctgagagaggaacttttctctctctctctctaaaagatagctaggtggagctgacaccagtactctctgagtgggggtgtggcaatgaatatttacgagtttatttttcttaatttcttcttttttctttttggggttgttgtttctttgttctacaagtgacctttcaaaaccctaaaccaaagttctctttttatagcagagggaggttccagaattgttgtcgtttctaggagatcagagagagagagagtatctgtcattttatatggacaaagtgaaaaagaaaaaaagaaaagaaaaatgtatgtatgtatgtacgtatgtatgtacatgtatacaactaatttttattgaagaactcacactctatagtgagaaataaaatggtttctaactaattgatcttaagaaattgtaataccggccgggaatgatgtttttgtaggataaggatacagttattaattggcatatattaatgataataataataataannnnnnnnnnnnnaataataataataataataatctggcctaagcgagtaactgagtactgcgctattttatttttatggtacgtatcaattaataacttgattttttttttccgcaaggtgtaataacttgattgaatgtagatacatctctatctatccaaaactgattggaaattaataaagcacgttttgaggaaggaaaaaaaagcaatagggagtcaaatttgtaagggaattaaacatatcaaaaggaaccatttaactgtgttaaaataaaatttatcaatgcgaattgtaaataaatatccacctaaaacatttcaagaaaataagtacatataatatatcatttcatttaatgagagactcaattatcttagctaaagacaaaagcaaaagagcaaaaagactacttcacccattataagagtgatacgagaccagatataaggcaatatgtttgaatggataagaaggaaagaaaaaagaaaagattgattcattaggaaggatagggtggaatactgggatatacattgcgatgaaataattctccattcctctactttgatataattataccatgattttgtgtttggctataattttatttttgttataaaatcaatcaacacgtatgatcatagccacattagaaggaatttgtcatacactaatttagattttttttttccatatataaaaatatatcatatttattataataatagtttaacttcaattgcacatatactcagggtggccttaagtatagaggaaattacactctatannnnnnnnnnnnnnnnnnnnnnnntttttaccttcttttttaaaatctat

SEQ ID NO: 113209 - DNA, 3441 bp, Cannabis sativa
  modified_base (3396)..(3409): a, c, t, g, unknown or other
ctatgatgggttacttcataaaagaaaccttgttaatgaaaactccagagggggacttctccaattagttttgagggaggcttcgcccggtaccctatatgtccgttggatgtagggtattaattgcatggatttttcttccactttttaagtgtctggtgaacctcgagaagattcataaggcgtctcccatggatgtacctcctatagatgttgatcccaaagactatgcttcaaatggcagaccctctgaagttattcggacaaaaatacgacaaaaggcaaaggaaaggcacgcgtcacatctctagctcctcttatacttaatgattccatctaggaaatagaccaaaggcaaaactagttgagaaattatggtttgctagaaacatacttggctgatggaggcatacgaaacattttgggactcatctggcactagaggtctgttcttggagagtcagcatcctagaatgtggatggtttcagagcttggagttgggcccacatctcatccagagcccatcttccgcttaagagttacttttccaagttttgcatcaaagctggacaaacccagaagaaatattttacttctatgagttaaaaccgtaaactatgcgaggatatcctacaatgattggcttttattgcctttaaaagtacaaacacactcaatgtcccacgagcacttcatctaactacacagacaaacgcgactcaaattcctagtgatctcaaagagaaaacaactctagaactgtctgttatgataacaaaggcacccaaggatgaagagcttcttgccgctgcctagaacagtcatcatctcgaactcctcacaaaagaataggaattatagcctaggttccaggtattgcacccagatgcaagcacttctggagcgagtactatttgaagaggtaaactatccttccgcataatttgtaccctcaacatgtctcatatgtcataggtagaacaagagttttttgaccaattattcctaagcttggatcctcgtagatatctgatgaaggattatttcgatagaatagattaaatagttaggcctataaacaacaagaaattccccctaaaattactaaggtgggtcctttccttactatgttcttcctagactttatagaatatgacaacttcattgaccaggaagaaataacttttttgacaagaggggaaccttaaaatgactcattccacaattgcaatcacatgatatctttgttattttatggtgtgttgcttaagttgctatttcttgcttctttgactgatttgatcatggtggtgttttgatgtttccttatacacttatgtctaggatgttgagtgatttatgagcactattcagaaagttaatgttgtagttgaaagcaaagggaaatagaaaaaattccaggccaaaaaagtcagccacattgtggaccctctaacacccccactcaggatcaaggaaactgccatgatttgagtgattctttgaggtggaaacagcggagccacccaatagataactccatcaggcatagtgtttgaagagagggaacctatgctaccctctgatgaagaagactctagagacggattggtattcccaaaggcagctacaacattgaaatgtgccaacatcgctcgtcatcctaaaagaaaggataagagggctaggtacttaattcttgggaactctagatctgccagagggggaagccttccaacctgaaactagcagccactctcatcaactcagcccctaaatggcaacaccaatgaaaggaaactggtcctagtgaccacaaatacattgacccaaattcagtaaaaacaacaacacacccaatccaaaccacaccaccatgttttaggcaaccaagcaatttttccctcaacctcctttggtaaccctactaagcaaactctggacctcaaaataaatttactaaacattctacctttgccgttcaagtttcctgtgaatccaactcatattgggggtgaggtcttggtgctagtgcggaaggcaaacagatacctcaagcaaacgctggtagaggaatgtagtgttgttcaattttgaaccaatcaactatctactgttaagagggtcgagatgacaaagggcattcatgacctaggttattcggcacctataacggatgtcctagttgtgagcaagcagttaatctctctgcttggtagggaatcgacacccttaatgctgaggcaattgaggatattgcggtcagcctgatggagctgaccattaagaagtgggccattggcagtagctctgatcttctgctccagcccaacactttgaggcaacatgcagttgggatatttcttcttttttctttagttttcccttttacttaatgcaaaattgaactcttgtccttgactattttcaactacttctagattgcattcttcctaaagcgaacctgaatggaggtgtagacgatggtggtccagctgaaccttttcttaaccacctggaaggacctagaactacggattgaagctatcaagaaagaggctaagcaacattacgaagaggcagatttagtagctaacaagaactacttacaaaagtacaaagacaataaggcatcctttccctctgaaacagagaaaaaatttaagtctcaccttgaggagctagaagctacctagtccacacttaccaaggagcgtgaggaagctctgaaggccaaaacagaccatgagaatcaggcattactctagacacatgaactctagaataaaagtgattgcataaaggggttcgaggccaaggtcaacatggtcgggggctacagaaggtcacaaaagatcaggtaaaaactttaaagggttccattgaggagaaggataagcaaattgaagcataggtgaagatcataactagactacatgagatcaaaccctcaaaccaatgtggctaagatgatgctttgaaggaaatttgttccttgcacaaagttctggacattaagagggacgggcatcaagaagagcatgagtctcaccaataagccctaaattgttccatgaacctagctcatgttattttgttggtctgccttgaggaaattatccataatatcttcaaccatcttagtaaggatgctgagaagttttccaaaagggtcgaggtcatcaaatgcagtgtcgatgactatcttttagttacgacggggctacggtcacaatagatggcaaagaccaaactgctttccaaggggccaaggacgtactagttagtgaagaccaactattagagattggagagattccctcaggagaggatgatcccatgccctagaatacctccaaagttccaccttgatggaaatattttaccaggatctnnnnnnnnnnnnnngtatgtttcattaacatactaatatgaattct

SEQ ID NO: 113210 - DNA, 3314 bp, Cannabis sativa
ctatagtttttcagagaaggaaaactgaacgtggaaagggaaagggaaggaaaacgagaatagagagggattttagtgttttagtgagaaaagagagaaatgaaatgaaactaataatgaagagaatggggtgaaagaaaatatataaacggaggattgttctctctttctctctcccctctgcataagtgaccccccacacgactagggtagcctaccctttattttatatgactttttttttttaaatgattttttaattttttaatatttaatcatatcatatatatatatttattacacgtagatacagagagagaaagtgggtgtacggtcagttgaacatgagatgtgaggaaggaggagtaaaggggttaaggaggggtcaatcaacagctgggctggcattattatatatatatatgatatatgatatttgatataacattttacaatgagagtgagaatgcagtactatacctccaatccaagacaataaggattaatattaccttgtagtagaatgggatactcttcctttactttgtactcttcaatcttctctgcccttttaactctttcctttttttcattttggctcttatttgttcacgggcattttcaaatgtcatatattaataatatgcagtgaatgcatcataaatattttctttaatattttcccttgatgggaaaatggttcttagtactccatttgttgggtgttttaattatttactaactttggagttttctacttctaataataagtttattttatgtttgattaggtcattttttgttttggtattagtaaaacgtgtatacatacatatttattgatcatgtatcatcacttgggttatcatggtcccctaattagtatgtactcgtgtacaaacaagcatcaaatatcagacctgcatacactttatatacactaaattattggatgaatccttggtataattggcatttagtatttattttcgttgtaccttttattaatcctcatcccttaaatagctgctgctctcacctaagaaaacgaactacttaccacctagaggcattgaaaacagtaattatagcataaattttaaaaatgctttttactcaccttcttaaaatgatacaattattagtaaatcaaaagtaaatttttccactggcacttttaatttaaaaataattaattaagagtaatttgtggagtttaattttggtgtaaataaatatttaagtttaatttttagttgtaatattaagttaaatttgtacctagcggttaaatgttaaattattatgtgttatttttttattagtatatttaaactatttttttgtaaaaaaaataaaaattaaatgacttgaactaataaaaaattaccatagtaatttaattactgataaaaattaaacttagatatttatttataattaaaaattaatttaagtatttatattacaaattacttattaattaattaattaatattttatacatatatatatttattatatatgaaaaaggcaaatcaaaatttggtaagtgttgctaagtatttttttttttgtcaacaccacctcaatgaaatgaaaatatataattatgtgtcaccattacatataggaagaggaatttcttctaaaaatatttattgtttatttataaaatatgtttaaccaatattttataaaccacaacattaaatttacttcagtctatcatggaagataagccccaaacttttcgttcatactgaagaaatcaccaaagtattcattttgtacaaaaggtgatgagataaaaataaataggacataataagaaatctcttagaattatagtgcggtaactaaactggtaaatggtaatgctaattaatttataatattctaataattttctagagtgttactttatatattcttgaataatatcattttctaaaataacatttctacaaatttcctaataaattaaaagcataatagaaaactgtaatgattttttttttataatcataaatttggtgatgtcgtcatgagtcacagatttctttggggttaggagtcaatctactattggttttgcggcaagacataatgacatggatatttctaccacacatatcgcatctagtaaaagtaaataacatggggtaaaaaagaaaaagttaatttacaaaagagagatgctaaagagtattagtggtgttttagcacctttctatatgtcactattgttattggtttaactaaatatcgggtctcacatagttaaatatcataattttagaaagtatcgctagttaatcgtaacgtaacatgtcgagaaagtgttaaacatcactagtgtttaatagcaatgctctttacaaaattataataaaatgttcctctcaaaaaaatgtaagtggaaatggattaataaacaactagagggggcttttattggtgatgtcattgggctttactgatttggtcccagcttgagaaaaagctaaatttaggtttcatcaattgtccaatcacaaggataatcaaaaatatataatttattttgctcaaaataggataatcaaatccctatattataatatatgatacaataaaaggcatgatagaaattgatataattaatccaagtttaaatcattaattgtttgcagctgtggctgatggaccaataactgacactgtaaccccttaccaaaaaaataaaataaataataaataaagtttataaaaaatctccactctagaaaagctatatataatatgcctttctccaaataaaaaataaataaataaagctatatatgatgttactactatactgtggtctcactaattaaatacaagtctagaaatgaatgaatccatccaataatcagattcagacaaaaaaagcctttattatgagttagttggactatctatgtgttttggaatctccattagggttttatttgatacttcattattttactaatcttagattaacattcttttttcttttctaatttgacccctttctctacctgtgtcgatatataccaacctttttttctgctgctttattttttaatgacgaaatttaatcatccaaaaagttttactttgtacggtatatatgagtatgagatatagatgtaattgttgtgttttatgagggagtactttgatattatatattaaattaaaatatcttagatttgatattgatttacacctcacttttttttaagaggaaattatattttatactctttttatattgtcctcttttatttttaccctctttttta

SEQ ID NO: 113211 - DNA, 4161 bp, Cannabis sativa
  modified_base (3289)..(3290): a, c, t, g, unknown or other
  modified_base (4072)..(4079): a, c, t, g, unknown or other
tatatatatatatattttaacaacggttgtatttggagatgatatgcctttcacagtttttttcaccatacggttagtctattttcttctctcttctctctttttttattattatttttttattttttattttatatgtatttatacagaaaacttcataacacatggaattatatctctcctacgtgaactatccttggaagtagatgtccatctgattctttcaatccaaatgcagaatttgatttaattataattacttttggtttgatttaataactacctaaactatccttactcatatataataatctctttttagtagtgtagaagtttatcaataaaaaaaactatcaaaaacacaataaatgaaaatgaattgagttacaaaaacttgcaagtaaaatacactttgaatttgaacttatgataatgtcagctactttgtctaaagaaggaacatattgaatttctggccataatttgattttgaataaaagagagatcaatttcactgtgtttagaccgtgcgtggaatattagattagcaacaagactcgcagattcttgattatccacccaaatgataggagcagtgggtagctggatatatgaagctcaaagaggacaaagttgatccattttatttttgcagcacaattagcaagagcacgaaattcaatttcagttgtcgaatgggctaccacagttgtttcttagctgaccaagagataaggtttcttccaaagaacacaacataaccacctatggatcgatgatcataagggcagctggcccaatcaacatcagaataggcttgtagacacatctgtgagctggtttaatgagaaggccttcatatgccctttagaaatctacacaatcttttacatgcttcccagtgaagtgaattgtggtgggagcatgcatgaacttacttaatttgtcgacaataaatgctatatatggccttatcaatgtcaaatacagaagagtcccaagagtacttctgtacaaattgtgatcaggggaagggtcaccattgttaaggattagttgatgagtagagattgttggagaaggactaggcttagctccttccatgtgcaacttggtgagtaaattcgagatgtatttggactgggataaacacatactagaagatgttatgtgcacttcaaccccagaaaataatgtaatgtcccaagttttttgacaaaaaactcagtgttaagatcactgattaattgagtaatgagcttatggttgggtctagtaattaatgtgtcatcaatatagactaaaagaagaatcaaattggaaccggaaccatgcatgaacaaataattaattagttatcaaacatagatatggtgaaccctttgttgtataatatttgttcgagcttctcattccaagcatgtggggcttgtttgaggccataaaaggtcttgtgaagaaggtagacatgtttagaagggtccacaaattcaggaagttgcttcatgtatataatttcttgcaaggtaccattgagaaaaacattcaagacatctagatgttgaactgccagttgaaagatacaactaaagtgaggagtatcttgattattgttggttttacaacaagtcggtgtaatctattctaggtgtttgagagtaacctttagcagcaagcttggatttgaacttgtcaagtgtgccatctgcattgatctttattctatgaacctatttgttgccaattagggtcatgtttgggtgataaggtattaatgtccacgttttattttgaatgagagcatgcatttcctggtccattgaggcatgccatttggggttaggtagagcttatttaagagatcttggttcctttggaaagagagactcagctagagggtggctagttgatagaaaggcttttggcttgtgagtcctagctttggaacgggtctgcattggatgattattggtggtagggagtggagatgaggttattggggaagggatttgagtagagggtagaggaactgtttggtttattattggtgtaataagagattctgtatgagattctgggtgatgtgttgtttgggtttgtggggaaggtgttgattgtaacaaggcagggttttgggtaaatgtttgtagggaggcaccaacttgtgtattagtgtttccctcagaagaggatgacatgctggtggtatcaggaaaactagtgttatgggacacagaagcagtaaccacatcaataggagtagcagtggcttgaggtggtgaagccatcaattcaggactgttagaggtagcaacattgatgtctccaaataaagcagtactagtgtgaggaacaatggcaggtgtaacaaagctatttttgggaaccaactgttgggtagatggggttaccgttggttttgtggtactaaatcaggtacatagtggaaatataatttctgattatcatcgtatcacatcctcaatatcagcatatgcatgtatattaaatttgaaataaatagataaaaataaaatttacttattaaagtttattagagtatcctggattttttttcgtaagttgtatcctcggatgatgatgaagaactcacactgtagtctttccaaatcttcctccacacacaaagattagtgtgactaataggatatactgtatgttcttggtttatcctaacacatgagcaagaactatgagagtgatgatgatagaaaaaagttttaatcagaataatcttttttaggcttcccaaaattatatgtatatgtttttaagtttatatggtatatataaattaaaaccaataaatatttgaattcaaaataataaattaaattatatttaattatttaaaaataccttaattctaaaataatatacctgaaacgaaattaatcccgaattcctgtattatttttgtgggtttttaaaagtaacattttggttacttattacttatgatgccggtaagaaattaattagctacttttacgtaaaaaaagttatttttaaattatataatttaatatacaatttggttacctctaaaaccttatttgtaaacatcttaataattagctaattctaagttaaattgtgctatcttattatttaaaatataattgggtaaccttaaagtttaattttgaaactaatgagtttttatataatataataaattactatttttgtttaccaattattttatatacctttttgttactttgaaacttatgtgtttgtttttaaattatattaaattaatttnntattttaaatacttttacgttacttattttttattttacttttgtaaaaaatattgttgttactttcaagtctatttaataaactaaaaagttacaataaaattaaaaaaaaaaaaaatacacacacaaaacttattagtaaaattgataaacatttaaattgctcattaattattttaaagttatatttttagttaccttaagtttatactaaaaactaattagttttgatatagtataacaaataagcatagatatgaaataattttatttagtatactttatagtaatatttaaattaattataatttagataatatgccaattagttacttatataaaatgatccattttaaataaaaatatctcctgtagataatttttaatttttagattagttatttaaaactatatgatcatctttgctttatattatgtttatttatgttatattgtagtatcttattatttaaaataagatagagaaagaatttttttttttaagttggagagaagagagaaagaaacatttattttattttattctttttctgtatagttatctgattttttaattttgcaagtatgtcttttaaataaaaaacaaaagaaaaaaaataactgttactttagttataaaatgtaaaacagtataataatttaaaaaacgttagaaacgaacgttaaaattaatattgtgatggattaagttattattaataataaaagacaaaaaacgtgtgtacgtgtaaattatcctttttttaatctatggcatttgnnnnnnnntcatagtggttttgacaagattaatctctgcaaagagttaatattgttgggttttataccctaaataaaactccaattcaat

SEQ ID NO: 113212 - DNA, 5267 bp, Cannabis sativa
taattttaataatgcaagtaaacaaatgtaagggaatgattaccttactattgattcccattacttattagtaaacatgccactaatgttgaaacaaactatacaaaattgaaatcttcgtccctctctctttttctgtcggagatgcactcacggagaagtcgtcggtggtggtggagaagcactcggacaatgtgtttggaccacgaaatcaagatctacgacccctaaaactcagctcctcccaaactcgtctcttttattttccctctctctgtttttttctctgtgtgtgtgtgtgtatttttttttttttgtgcaggtttgacgaggatggcgatggggttcgtggctcgaaggggatgtggggtcaggtttgtgggttcatggttcaacggggatggtccgggttcgtgggtttattgtttgatgacagggatggtattcttggttcgacggggatggatgagttcgtgggtttgtgtggagatctcgtaagtggatagtccgggttggactttgcaatgaaagtagagatcttagatctggttcgaagttgaagatctaaaatttttgtgtatataagtatgtgtttgtttgatttaattttgtttaaatttaatttaagttttgtttaatttttttatacgtgtgatttggatattaacagtagggtgaagtggtagtgcttgttgcgctgatgctgggtgatggtgggttgtgaagaagggtggtgggtgatggttgttaatcatgtaacaatggtggtgatggtatatgtgaaagtgaagaacttaaaaaaaaaaaagaatgaagaagaaaaaaagggcaaaaaagttatttttttattttttaaaataatttcttacgtggaataataaaattgtatcatgtgtacatcgtgtccacattgtgtcatgtgtacattgtaactactccagcatttgatttcagacgcaaaaattaactaagagattataattagtactcttataaattctatcatgataccactaattaacctagaataaaattttgtaatatagattattttcgactcgggaattaaatgaaaaaagaaaaaagtttgaagtttatcatggattctaaatatatcaagttagaaatgaaggatatcataaattcacagttggttgttttttctagaacaaaaaaaaggaactaaataaataaaaagataaatttgcgatataagttttcaaaaacttatatttcatgcagataaatttttaatttaaaaaattagtggtaatagtttttaatgtcacttttttgaaattctgatactcttttttttaataaatctgtcagatgctaataaaaactctacatccaagacaaagctcatcgtctatgtttagagctcgactgtcacaacttatggtctatgtttgaactcgacaagcactcgactttagcgaggctccaccacgagtcatcttttaaaccacggaaaagaagaagataagagagggaggggacttctggtagtgcgactaaggtcagtggaccctcaagtttgggattcaatagacgggaagatctgtggtggcctctattttcaacagctaggcttcatcgacaacaaaagatcatccctcaagtttgggattcaatagacaggaagatctgtggtggcctctattttcaacagctaggcttcatcgacaacaaaagatcatcccagtcctgaacacggttaaggaaaaggagagagagagagagatttggggttatgggatgagggtggggtcggggtgtagtcggagaatagaggtgactataggtatgggagtgaagatcgaagttggctacacgtagaagatgaagaagaaaaaaaaattaaaaaaaaaaaagtaacttcttaatttttttttttaattttaaatttttctaatctaaattattaattggaccaatactattttaacatatagcaattttgaataagcaaacaaatcagttaaatttaagactaacaaacttacaaaaatcacgacattagagactataaccgccaatttttgagattgaaaacttatctgtatcaaaagtttttaaagaaaaaaaaccatctgatcaagtcaggttcattgagatgacacactgattgaacatacaacttaaatatcacactttccaatatacaagatacaagctaccaagcgttatatatatatgcaatattttatgtacgcactcttgctatccaacatcatagtgacaaattcttcatctgtatcatgacacaatagtaaatttatttaccatctgttcaacattacatagagtgttcggctggacgggactggtaagttcgtcgcctgagttgagattctggtgttggctgctgtaggaagattcttgttggatcgttcgggtccacatatctgcatatcattgagaaaacaagaattaataaaattgttcttattagtttgacaagcgcacataggtcacttacgcgtgtcttatcatctcatcaacgggagtctgtgctgcttgtaaaggatccgtacgtggtggctccggcattgaactagcttgctgctgttgtcgattatattgtctgaccgaagaaatcaagttgaagaaaaggggaacaaatgttccacagcctccttccttgaacaaaatcttgaatgagtgagtggaaaataaagccgcaggttgattttccggaaccacctgaaataagtcatgttaaggcattatgtatcggtaaagcaaggaatcatggcgttttatcagtaaccaaaccaaattacttacaggctccacttgaccagcaatgttgttacagaaaaatattggttgattaaacttctctccgtggacgaaaagctgcatagaaagtaaaagtctatttaagcacaaaccaattaacagttgcactacaataggaccctaaagtgaaatgtgataagacctcccatttggtaacatatgataagggcaagaattagggcaagttctgataatatgagaaacaatttgattgtttaggatctcttcttatttctgttttatttggtgagtttaaggaataaatatgttgagagtgtacggttaggatatgtttattctaatccatattgaggcttggctcttgggagagaaagcagggctcgaatttccttgaatatcaattaaaacactctttgttttgtttatttttctctggttttccttagttacctgactctggtgtatcaaatgaaagctgcaaatatttctggtggccagcagcaaaatcaaaacaaaatcactgagtcatgcattttgttagttttaagagctatctattttactggctcccccagtttcaaattatagtcagtaacattctttaagcaaaaataaaatgtataagctatgctctactttcttttaagctagatgtatattacccatatcttgcggataaagtgtaattaaaatatcaaggctattttaattataagctatctattttacaagctcccccagtttcaaattatagtcaaggaaattctttaaacaaaaatagaatgtataagctatgctctttttttcttttaagctaaaagtatattaaccacatagtgcagataaagtgtaattatcatataaaagcaactttccaacatcatagcaactaaaggagacaaagatatagcaatatcaaagacaactttccaacacaagcaactaaagaagataagaagtattacataccagtggcacatcaaatgcaacaaattctccaactggtttacttgcgacgaataccattctaatatttgacaagtaaattgttccctttgcttttacatgacctccatgatttctgacaacagagatacaaaagtgagtgattcaattcacataaatgaaaaaattgtggatatttcaagtaaaaaaaacaaaagatggtagagtaaaattatatacagggcataacaagaaatgagagattgctgtatctatggatttgattgatcctttgggttttcaagactaacaaagagaactagcgaataaaactaaaacaaataggcaaattgatttgggcagattcaatggaaacagtaaattgaatccatgctttggtttattattctgatatcaaaacatgagagccaatcttcaaaaggacattgaaaatattccatatagaaaattggttagatcaaaaacttcaactaaataatctggcttcatatgtaattaaagagctaaatgtttaatagtttccaatttccttttctttctttcttttcatttttctttttcttttatcctaatctaaatatcgatttcaggtacagaaatcctaaaattgagcctgagaacaacacatatcgatgttgaataaaacatggaaatctggtctaacttcctagtagttatcaagtacatatttttcactaattcgcataatcttttctcgtatagtaacaaaaaaatcaaaaggtatttccattaaaatttcatctaaatccaaattctaattacgacaacaagaaaaatcaaccctataaccatacagttacaacaagtactggacccaatcgaatctccgtgcagaaagaactagagatttgatataaacatcaaaaatcgatttgcaataaacataggtgaaaatgattgaaagtaaagaaagaagggtttggggaatagaaaactaacccagggaccttgtcgatttcgaattcgacgccatctctggcgaggacgaacatctcgttgaggaaaggaactggcattccattggggaacaattgcgggttgagagccattgaagattgaagattgaagatgattgtgtttggtttggggaatcaaatttaaattctttctgttatcaaaaccgatctctcttaattacttctataagcttccggaccttccttcttcactttcatcatatcttatttataggtgtttttttttttaaattaggattatttttccaaccaaaattatgtctctcaattataagatatagaattagaaaaaaagtgattaaatttaacgatttcaataattcgaaagaatttttaataacttgaaaagtttacggcatgatgatatatgttaaagttcaaaaaataaaaattttaattagtttaaattaaattatgtgtgatttagtttgggaaatttaaatatctatgtattaattcggggataattttttccttaattgaatacatatgaaaattgaaaatatgtgacaattttatctaaaacccaatact

SEQ ID NO: 113213 - DNA, 1309 bp, Cannabis sativa
tattttatcaaataaaaataaaaagttacccataaatttctcataaaccaagaatttcagttatataggcacactttatatagaaatagatatatgagaatttcttttaaatgtcaaaccaggtcacgtgagacttagttttaaggaaataattaataaatattaattcaataacatctctctctcaataacacttgcacatgtaatgtaccaatatattatttccacatttattaaaacttcaaccccaatgttcaaaaattagtaattatttattttagagaaattgtactaaagggtaggacttttaccatgtataatatcagattattaatataatttaatatcgagttttatatattttattttaataaaaattaaagagaactgctaatcaattatatataaaatgtcgcttcatagtaatattagatactttaataccacataacaatattctttatttttatttcttttttatgagaatttaatgtcttaataagatcataaattacacatatatcctttatacatgtatattttattttagtgattttgagtttgaaaaatacttagtctcatataatttaatttaataattattataaaatattgctaactatttacaaaataccacctgtaaaaagtagaaacaccattgatacttaacaataatactctcgaaatttacatatgcatgagtcacatcatttttaataaatacatattattatttgtataattatatattatataacttatttgagttacaactattagaccatctctaatataaaatttaaatgttatgctaaatttaacaataaaagtaaacaaatactatatttacaataatatttattttcttagtactcgtatcacctatttactaataataacctagtagctcttatttatcgtgctcatgtacaataacattttaaaatacaaattatgacaaaaaataaaataaaatctttttaataatcattaataaattaaatatttaaaaattagttaattaatgtcaatattataattaaaaatatatattagtgcttattattaattataaatcacaaaggtgcaataaaaaaagttgtatctactatgtgctaaattttacataatgttatattttgtattaaatttagaatatttttttttggcattttagcacaagatttagtacactattggctcgtttggaacgctgtattaggtcgtattgtattgtattgtattatattaaattgtattttatataatatttttatgtaaaactatatgtgacattaacttttatgga

SEQ ID NO: 113214 - DNA, 5381 bp, Cannabis sativa
  modified_base (110)..(147): a, c, t, g, unknown or other
actagcgctgcaaccactctagaaactcaaaccgtaaatttgaaaagaaaaaaaaaattaaaaaatagtatatggagtaattccgctactactactaataataataatannnnnnnnnnnnnnnnnnnnnnnnnnnnnnnnnnnnnnaataataataataataatgagagagttgggggagataaactaacttatacggtcgttacattttatcctcttcactctcagttcccccgactaagattctcccttccttagcttcaaaatcggttaatggaggttctcaaccactgcttaaccaccaaaccatattttcataaacccttttctcgtaagcctccatttttagactccaacctcaaaatcaccttctttctccctacttctcgttttcattgtaactccaagaagagacctttttccttcaccgttatctcttgcaggcatagaagttctcaagataacaagaagaaccagaaccctataaccaagaagattatactttccgaagtagcaccgccaccgctggcaaccgagaatgaggaagttccgggaaatcctggccccggtaataagaatggggtcttgagctttgccaagagaattcccaggaaggttttggctgttttgtctaatcttcctcttgctattggcgagatgttcactgtcgctattctcatggctattggtaatgcactgctgtctcaaaattctagtacattgttttgtcgctttacatttttgtgttcttgtttggaacttatgagctgatcaaatgatgttagtttgtttgatgtttatttgaaattttcatttacaattaagagaattctttagtacatgaaatttgtgtatataccattgtctgcaatacctttttattctgtttgtttatacaatggttttgcaggaactgtcattgatcaaggtgaggccccagatttctatttccagaaatacccagaagacaatcctgtgctgggattcttcacatggagatgggttcttactcttgggtttgatcacatgttctcctctcctgtttttcttggtacactaactctccttggggcatcactaatggcatgtacttacacaacgcagattccccttgtcaaagttgctagaaggtttgatattctttacatagtttcttcacaatttagttgggtaagttgagaactaaaccaggaatttaatggtaaaatagatggaaatttatggattctgcggaggctgttcgtaagcaggagttttctgacactcttccaagagcatcagttcaagatttaggtgtcattctgatgggagctggatatgaggttgtactttgcatactattgcttttctttttatttcatttcctcccaattaaacccttttgatttctgattggtttcttccgttagtggctgaatttttcattcctttgaagtttatgtttaattattatcataatacctatcttatgtattatcaaatctcgaacccttgttcaaatatgaataaactttaccagcacaaggaactccattcccatctagttagatttcatttagtcaacttggatggccaagagtgtgtatttgtatggagttagaagattatgcattaagtgtattgaacttaaatagctgactggttttcaatctatataatcaacatagaactctcactatcatgcggggatctctgatcactgcttatgatttatactctcagatgttttaatccattattgacttaaatgggtttttggatataggtattcttgaagggcccatccttgtatgcctttaggggcctggctggccggtttgctcctattggagttcatatagcaatgctactaataatggcaggtggaactctaagtgcagctgggagcttcaaaggaacagtcacagtgccgcaggggctgaattttgtggtcggagatgtactaggcccaactgggtttctctctactccaactgaagcttttaatacagaagttcatgtcaatagattctacatggatttctatgacagtggggaggtatatgttaatttcactcactgttagattttcttttatgaaatggaatgtaaactgttgatttataaatagtctacagtcttttcctttaatgtgtcacgttccttattatagtttatctttagcatatatcatttagaatctctgtggactgtgataccatctaccgttccatatgcttgtttgattgtttctgttatttagtgtatgtaatgttgtttcattttcctctggtttatgtaataggtatcacagtttcacactgacctttcactatatagtcttgatggaaaggaagtcctgaggaaaacgattagtgtaaatgaccctttaaggtacgaagggatcactatataccagaccgattggagtttttcagcactgcaaataattaaggatgatgaagggccctttaatttggctatggcacctcttcagataaatggagacaaaaaactatatggaaccttcttaccagtaggagatgctaattctcctaatgtcaagggaatgtatgcccttctctcactccaactttgatttcttgttgttttctattgctgatatcttttattaatgtctcctcttaattttttaagaggaggatgtaatgatgttattcctgcattgaaatgtttcttttaatctctattagagttagtcccacattgttaatgtatagaaataaattctcatataaaagataaatgggttacccttcccattttcaataaattttggaataaaacttcatgcatcttatgccaaattctaaacctctatactgcttggcatctttatctaaaatgggcctggattactttgtttaactcacataaaactaatgttcttttctcatattatttgtattttagatcaatgcttgctcgtgatctacaatccattgtcttgtatgatcaagaaggaaaatttgttggagttcgaagaccaaactcgaaacttccaatcgatattaatggaactaagattcttatagttgatgcaatagggagtagtggcctcaacttgaaggtaaaatgatacaaatttattttagtatgctatttgccacgattttaactcttatttcactattgattgaaacacggttctttgctagactgatcctggggtgccaattgtgtatgccggatttggtgctttgatgctcactacttgcattagttatttgtctcatgcacaggtaaaatctcaattttcatagtttaggtgagttgaatattggatatacttatcacttagtggacttcttctagggctgtcacaaagtattcgatccaattcaattcacaatatgcagatattatcctcacttatgtggattgaattagattgaattgaaaaatctaaaatctgcaattgtgtgaattagatattatttgatctcaaaaagtaattgatcaaacccaatctgcattttttatatagatatatatacatatatatatttaaaaattatattgatgaaaattacaaatctaacaaatctgagtatacaaattgttgacttagaaatctggacaaagactttcaacttccaagccacacccactcactagattggcgagaataaaatatttgttaagtaaaattaaagagagagacacaacaatttatagttcactccttatatagcaacagtaataaagctacgtctactttgagtttttatttctcacaagatggtattaaaaaaaatagactaagtgtcaaagctccaacttttagagagagattccagatagagaagttctgactttgtgggtagttttctagatctaaaaaataaactaagggagctctccttttataggtggaggcccttgaaaataggagaaaaatacaagttggctatttttgatcgtaaacgatgatctaatggtgaaaattaacttttgaggctgatcgtcaattttcggagcctaggtcgcaacaatgggacccgctctgggtaagctagagcttatcttcgtaactcccttggggtaaaatttggggtcgatagtttcagaattgtgtttaaagtgtgaaacctgacctgatagagcattaaaatagctttaaaacgcaagttggatcacgtaaatcgtatgaatattgaatgagttatgaccgttttactgaaggctattcatgacccaacgcccaagttgacatctagggctcaagttgacatcctagcgctcaggttgacatctcagtgcccaggttgatatatgacatcaacctggaggctaggtaagtgaaaaaacgtccaggggatgtactttatgatgcctaagttatattttaacatcactaagtcagtttctgtgctttggcgaagctggtcaccagttttcggagatgttgttctgcggaaatgagagactcaaaactcttcattttcgagtgagtttcccatgttggaaatgagaaatgcgaagttgtaaatttgacttctctgacttcatggatcttagttattttgacaaagtagatgaacggttgaaacgaaatcagaatcagataagtctcttgcgcctgatacattttctgatgagtctcttgtcccttcacctgcctcgatcatagctctcgcaatgcctacacctccaccatctcctaagcctcctatagtgtacttcaggcgtccattttctccacttcatgtttcatgtcctgtacttacatcttcatcattagatcttgaagtcagcgatgatcttcctattgcactacataaaggtaaatgccaatgtacatatcctatttcttcttttgtttcttttaatcatttgttctcttcttttgctcttttattgcttctcttgattctatcactattcctaaaattgttcgtgaagccacgtctcatcctggttggcttgctgcaatgataggagagatgaatgctttagttgcaaatggtacttgggacttagttaatttacctttaagaaaataagctatggggtgcaaatggttgtttatggttaaagtcaatccagatggaacaactgcttgctgaaaggtctgtcttgttgccaagggttattcttaaacctatggagtgaacaattatgatactttttaacctgttgctaaactcacatctgtttgattattcatttccatggcatctattcatcattgcctttgcatcaacttaatattataaatgtttttcttcatggagatcttgaggaagaagtgtatatagagcaaccttttaggtttgttgctcaaggagaagtagggcaagtttgtcatcttcgcaaatctttgtatggattgaaacacagtccttgtgcttggtttggtaaatttagtcaggctgttg

SEQ ID NO: 113215 - DNA, 2718 bp, Cannabis sativa
aagaaaatggacctaattaattaatttataaataataatcactaaaagtagtgatttggggaaatgtgttcatctgactagattaaaaaggaaagtggtatacatatatttatatagtaggggagtatatacgtgttaaaaaaacaactaattaattgtgcggggattaaggttccatcagtcaatgaaaaacataaatatatattagttgatgaatatatgtgatgatgatgatggtgatgatgtagagtagtagtagtgatgatgagtcgataagatagatagagagagaaagagagtaaagaattaattaattaattaataaatataaaaagaaataataaaagttaaattaaatttacctggagaaaactcggccgcagtcgcaagagtggccgcgggtgccgcaggtcttgagatgggccttgaaatcagagtgaacagcgtaagccttggagcaacgctgacagacccactgcttgtggttactgtgctttctccgaaagtgtttctttataccaacgaggtcgcccagggcatggcaggggtcgtggtggagacaagtcggttcaggacacacgaacaccctcttcctcaccactcccgctggggtttccctcttcagcagcttccatggcaccttgtgcctacgcctgtgcatctgcaggttctggtctctctggaacccttgattgcagatctcacacacataccggtctgattccagtagcgtcttcggcgacagtgacactacttccgcatccggatctaaatttatttaattataacaccataaattgttaattataaatatatatatacatgttccatcatcataaatatattataatacatacatatatatatatatatattatcaccaatacaaatacaaacataaagtacaaatttataacctggagttcctgcgggtcttctcttcctcttattattgttgttgctgctgccaatgatattgctattgatattattctccattaagcaagaaaagggctccgaagacgaacaaatattattgacccctaacataacatatgtatatataatatatatatatataatcaaaggtatatggatcgatatggatgatgatcagtattgatggtgcatatgatttgagatatatatgtatatatttgaacaaggatccaattatgtatatatattgaagacgaagagaaatcagcgatcgatcgatctacctagctaattgaactaattaataattatagggatattgagagaacacaagaaggagaaaacacatgagaggccaactggggaataaaaaggctgtttctttcttttgaaatttggttatactatatagctaagctatagctagctatatatatatatcagccttttctcaatatacaatatactcttagctaaactggtttctttgtttcttccaaacaacaaaaaccctcaacaagatatactttctttgtggtgatcaacaagctctagcttagctatgatactaaataagagcgtgagaaagagaggactagttgagtcttgttaaaaggaaaaaaataaaaaaaataaaaagaagaagaagaaagaaagaaaaaaaacttgtgttcaaaaggaaggcgacggggagagagagaaccaatcagtaagattgaaacttgatgatcccacaaggcagcagctatgggctccagaaggaaaaacatccccacaaagaaacaaaaaatctctcataattcatctctatatatttcatttcagtacagttaaattcttaggctttgcatttgcatgcattaatacatatcaccttccccgagctccaaaaaatccacgtaagcaattctatgtatttattaatatttttatataatatatatttttcctattttaattaatatccttctttacttttacttttcttctttggtattatgtttccatattaattttccctaccctagcctatatatatatatatataaaaacagtactatacatgatatacattgccctccattttcagacgcatattattatttggctttatattttttttagactaattgcgatctattccttcgatctgaaatgacggaaatgcccttctagtcgtgaatgtccagatactcagattttatattaaatcagacacagcttttataaaggtgccggtgaggatgtaaagtcacactcaagggtaaactagtcaatgaaataataattctgtgtgtgcaaagatgcttgctttttggtaaactgactgcatcagcattacagtgagtatttaaaattggcaggtgtctttttgtggatcaatttggcagttttctcggtttttatctttcccctcataatttatgtaatacgaatcatatcatcacaaaattcattttcaattcaacaccacaaacagaaatttataaatcaatacattcaacacatgaactaattatatacatacatacacctacatataaacagaattcaaattaaatagaaaattctgtcaaattacaatatctcaatcagaatccaatataattcatattgtacttgtacttatttagttaaattgttcattgttttagtagaacaaatatatggtaggatgattttatatatggtgcatcacccttcaaaaattaatgtatgatgcatttttttagggcttttttctgttatagcaaaaaaaaaaaaaatgataggttgaga

SEQ ID NO: 113216 - DNA, 7354 bp, Cannabis sativa
  modified_base (40)..(63): a, c, t, g, unknown or other
  modified_base (111)..(116): a, c, t, g, unknown or other
gcgttgcgattggcaagcgatactccctaaaagctattannnnnnnnnnnnnnnnnnnnnnnncttagttggaccaatagcgatactaacacataggagagtgctaggcannnnnngtgccctttagcatttctctttaggaaagggacccgattcctctttattctttgatttgtttccttttatgtacgaaaatcaatatcagaaaatatacctttcccattttttatttggtatcaaagccagccgcctcctaaccctaactctaatcgttttcttctctttcttcaccatgtttgacgcctcaaatcaatcaacaaacattccaaccaaatctaccactattccagtcgcatctgccactgtttcatccaaaaccattccttctaactgtcactgtgtccaaatcaccaccatttggttaaatggtgataacttcctcagatgttcacaatcggtacaaatgtacatgtgtggtcatggaaaaatggggtacttgacaggtgagaagaagaagctagcagaggatgattcgacatgcgagacctgggatgctaagaattcaatggtgatggtatggcttgtgaattccatggaggaggagattagttctaactagatgtggtaccctaaagcgaaggatctgtgagagaatgttgttcaaatgtattctgatttagagaaccaatctcaaatgtttgagttgaatctcaaacttggtgagatacaacaaggggggactctatgacaaaatattataattctctaaaaaggatttggcaagaccttgatctctttgacacatatgaatggtagtcaattaaggatggaaaacactacaaaagaactattgagaagactcaaatttataagttcttggctggactcaatgtggagtttgatgaggtgagggcgagaataattggtcgacaacctttaccttcaattggtgaggtgatctcgaaggtcaaaagagaggagtcttgaattgaaggagtgttatgttgggaaaaaaggttcttggaactgttgtggaaggctcgactttggctattgtgggaggaggttatggcagaaacagcaattcttcacccaaatctgatgagaagcctcgggtgggtgtgacttctacaataaacctcatcatacccgtgagacttgttggaaaattcatgggaaactagccaattggaaaagcaaagttgagagatcaggaaggtccatgccaacggctaatgaagttgaaaccagtccattcactaaggagcaactggatcatcttcatgcattgttaaaaattaccttgacctcatctagtattcctacagtttctatggcacatataggtaatgaaataaatgttctaaactgttttttaaacatttctactccttggatcatagattccagagcttctgatcatatgacctattcttctaaattgtttctcttaaataccttgtctgagtagtaaaaaagttaagctagcaaatggtaatttctcatctattgcaggtaaaggtttaattaaaatttccaaggggatagatcttaaatatgttctccatattcctcaattttcctctaatctcttgtctgttagaaaattatctcgagattctaattgttgtgttattttctataaatcgcattgccctttttaggatcagagtttggggaagatgattagcaatgctaggatgactaatgttctctactactttgaagataagaattccaataatgaaatttctcaagggtttagtagtattagttctctttctgttcatgatcaattaatagtttggcattatacacttggctgtcttagtttttcttgttgaaatatttgtttcgagtattatttaagaaattgaatcatgtatcttttcaatgtgaaagttgtttattggctaagagccaacaaaaatcttatgctaaaaattgttaccaatcttccaaacctttgtatttgtttcttagtgatgtttagggaccttcgaaggttactacaaatcctgaaacaaaaatgatttgctacttttatagacaaccatacttgtctttgttgtgtttatttaatgcgtgagaattctgaagttgaacaaatttttttagatttttttagaataattgaaaaccaatttcaaacgagaatcagtattttacgaacgggtaatggaactgagtattttaataataccttggggacctttttaaaagaaaatggtcttttacatcaatctccttgtccagatactcttgaacaaaatggaatggataaacgaaaaaaaaataagcacttattagaagttactcgtgctatgatgttttatatgaatataccaaattatttgtggggatgccattcttactgcatcatatttaattaatagaatctccactaaggttttaaattatactactcctttagcatattttaaagaaattatttcttacatctataattaattctatcttgccttcaaaaatttttggttgtactgcttatgatcttcctaagagatctagattaaaattatatccaagagctgaaaatgtattttttgggctattctcctaacacaacaaagttataaatgttttaatcctgttactaaatgggtttacattactatggatgtttttttcttaaaaaatgccccctatttttccaaaaatttgattcaggggagaatgtagtggaaccaaatttttggaaagtcattgagccattaccaaaattgattactgatattcaataagggaaactcaaccccagcctataaatgtcaaatctgagcttggtttgttagaaaaagaaatactacgattatggtttattcaaggaaaattatctttgaaaaaagtaaagatcaccaaatcatccctacacaagatcaattgcatgccttgaatgatgattcaacaagtactacatgtaattttattcccactactaattcatctcctattaatactattctaccagttgtgtttgaactagttacaatcgcatgtgactcagatgatcttcccattgcccttgaaaaaggaacttgtaattgtattagatatcctactgccaaacacatatcgtatgatcatttatccgaaacctatagagcatttatcacaaatatttcagagcttgttgtgcctagaaacatacatgaagcattgggtgaaccgagatggaacatggttgtgtgtgaggagatgagtactttgaaaaagaatgggacttggatagttattaaattaccaaaggagaagaaaattgtaggttgtaaatgggtgtttactattaagatcaatgctgatgatagtattgaaaggtgcaaagcttatggcgaaaggtttcacgcaaacctatgggatagactatatcaagagacgtttgctcccaaacatcaattctattcagttgttgttgttgtcattagatgtaaattccaattggccattacatcagcttgatgtgaaaaatacatttctcaatggagatcttgaagaagaagtgtatatatgcgtcctccaccaggattcaaaaaacactttggttttggcaatgttcgtaagctgaaaaaatcattgtatggtctcaagcaatcccttagagcttggtttgaacgatttggtaaggtactaaagcttcatgggtacatacaaagtcaagttgatcacactatgttttacaaacactcagcagaaggaaaggtggccattcttatagtatatgttgatgatattgtactaactggtgatgattctcttgaattagagagactaaaagagaagcttggtgaagaatttgaagtcaaagatttgagcgttttaaaatactttcttggaatggaattcacttgatccaagactggtatttttgtaagtgttatggatttattaagtgagataggtatactaggttgcaaacctgctaaaactcctattgaacccaacatcaaagtacagcctatagaattagttaatgtgaaggaacgagagcgttatcaaagattggttggaagacttacctatttatcccacactcgtccccatatagaatttattgtgaatatggttaatcaatttatgcattcaccataagaccgtgtcatgagcaatcacacccacacatttcatggagaaaaccatgagtttcacctctctacccaaccctcacaggattcttttctcaacttatcccaggcacaatagaaaatcacttattaaattaacagaaactatttccagcactagaatattgaacccccaaaagacgcaaccagagtcacacaatgaaaacatgatcttgattacaccagtcacttaccaaatgcaacatagagtagtcatcagatacaagacaaacgggagtgatctaatatataatttactagagcttaaaatcaacatgaacacaaaccttgttctagaatgtcatgtgctagccttgatagtctatcactacatctattcatggatagttcaaatctaaggctatccatttcccgaatgtagagatccatagccatccacctggataaaagagagacatcttttgtaacctgaaaataaataaccaacaaatatgattatgtatcacagaaaaagatattaataataattataataatattattattattaagtaattgaaattattagataatatatggagagagacagagaggggcgaggggtggaagttttgagggaaaagaaatatttgctgaaacagaactgttatcggactggtcgataaataaagcccctaccttagatgttacattaggattcccatctctgtcgccacccatccaagatccaaattttattggtgtgcatgtcaatggaagaggctttccagtatgctgttaaatcagtagaaggacaccttacaatgtgaaagataatacgataaaaacaaatgggcttaaaaaatacaaacgcatttatacatattacaagcactacatctgggtcactggagaatctacaagcaaaacattacagattgaagtaaaccttcttcaaagcattgctaacacgccttaaataatgaggtacagctttccaaagagattgttccacaatattcaaacctgagttagaaagttaatcgttattttagttttagtttgagataagtgatagcatattgagatccaagcttgtgtatttccaataatgtgaaaaagaaaaattcaaggccttcacctgccctggcctcatcaactggtgtaggtttgtggcgcctgagttcatctgtttgccatattgaggttatctctctcacctacaagaacgaaataaacaatgaggactaaaagaattttcacattgattaaaacacaaacttcctatctaaaatcccattgtaatttctctatgaaggaaaaagtcaaaataccagatcttcaataagcatttctcgatcttcttgacttagatcagaccgatcattataatctaggagatgctgcaataaatatgaactactgatgaaaaacctgaagttacaaaatatataagattatgttatgtttactgattactgattacttacagcaattctaatgtgtttgtattgtaaggtccggcgattaatttgtgtgggatgtgcagtaagaacaatttcaacttcctacaaaaaccagaaagtagaaactgagattaactattggaaacgcagcaatttcttgctgcaataatagttttgagccactggcaaaaattcacagggtaaccagaaaaaacgaaactcaaagcagaaataataaccctcatacctgtttgcaaacagcctcataaagctcattaggggaaactccactctgtacaagattatcaaaaacatcatcacatgatcttgatagaagtgccaagttcctttgcttacgagccctgcacaaaataaaccagagtaacagggaaatacgatttattttcaaaagcatatagaaatcagtctcatgaagataacattaatcgttttggtagacatatacagtatattattatatatactaacatatatataaatatattacctgtgatgggtttcagcaatacccattaaattgaggtaatgactgaacgcacgagccagagacaaggcctcctctaaggtcatcttcgaaatctctgaagcgagctgcttctctaccagctcggccatgtcctctactcccgccatcctcatattattagcactctgaacacatacacttcattccattataatattctcactatttaataattttatatgtatgcatgcttgaatgaaattcaataaaatgtctaagaaaataaacagtttgaattcgaaactaattattagctgcagctctcaacaagaagcaaaaaccagcatcaaaaacaaaaaatataatatcatcattaaccctattcttcctcatgcacgaacacttaatcgagaatttcacaaaaaacaatacatcttagaagaaaagatcctcttcaggttccattttccttctctctgtttccgtgtctttctttcgtctacccatcaaacgaaacacgaccaagaaaaattccatggaaatctatgcaaaaaaaacacacgcatgcaactacaggactacattgatgacgaacaccagtgactccgaaagtaagaaaacagtaaacggaagaccgaggttcctcaaaaacaaaaactgatattaaaagggggagagagagagagagagagagagaaagagagacctgagcaagaatccgagttctctcgagcttctccatgaattcgttcccaacttctctctgcaagacatcattgagaaggttaccgagtaacttacagtcatcgtcgaagacctggaaggagatttcttcagctatgtcatcggtggtgtccgtcattgttacagaagcgaagatggttagagaaagagagtttgtgggtagagagagaaagtggagcagaggaggaggagaagaagaagaaggaaggcagagaatgaagaaggcgtctgtgtagtatccagtgtctacacactactacatgtacggagttttttgtttgaaaagaatgagtggggccttgcctgttttacccagtcaactaccaatttctgtttgccacgtgtcatgtcctccggaatggaagggcttgtttattaatggtatggtgtcactgaaactcggaaaatatattttctgtttggtgttcacagactgccaccaggtgatcctagtaaaacttcagcaaaacaaaaaaatttataaatgtatccaaaattaattatttatattttattgggtaaatactattttggatcctatttttgcaaaagttacagattggaccctgtatttt

SEQ ID NO: 113217 - DNA, 2543 bp, Cannabis sativa
aaaaaataaggtcaaacaagctaaattatttttaaaaataattttctgtttttaaaaacaaaaaacaattttttaattacgatgccaaacatgcattaaaccccttaattttaaataacacactacactactacattgaccactattttattataattttttattatttaatattgttgggagacctaagagacacgtctaacttgcttctcctctctctggtagaattttctaaaatatataaagtatttgtaaattttgtgcagtagataaaaatggtatggatctagaagataattgtccgcctaaccaaacactaaattaacatatatataatggattttgggagaaagccccgaatcacggcgagacagctgataatttattgggaagtgaggtgaaaatgattttattattattattattattattattattaactaactaagaagtaattgtaagggtgagatgagtgagagacagtgagttggacgacgatggaaagcgcgtcacccctcgagtgtcggtcgaaacgtgcaatgtttctttgtttacctctattccatatatgtctactatatatgtatgcactatgcaagtgtatgtagcaatgttaatttggaacagaacatgaccatgaacatgcattagagatttcaatttccatcataatttggtttggattcatacacatatcatcaagagggaccacacaaatcttttggacacccaaactctactcaactaaaaataataataataattattattaccaattactattattattactcattaatgtttggaaaataccaaacgacgttgaattaatttctcactcaaatcaaagttctaatcaatagtgtattttagagaccaaaatcacgtgctttctataccatatgcttcatctttcttttcttaattaattttttcctttctgtttgatataaaacaaggacaatttataaagaggtctaatctcatatatcttatctgtggtgcaattacttttactcaactttgttttataagctatagactatatagagtagagtacattcttatactatattagaaaagatgatgtgttactacatgtggacggtcggcagcagtaacaacctgagcacatgacttcaattcaattgggttcagtttgcattattatttttatattttattttagtgtgattaaattatatagctaatacctagctgttcctttctccctctaaactaaagaactctctctctctctctctctctctctctctgacttggagtgactagagtcaaagctagctgtattttatgcaagagagcttattcctaactgttctgatctcttatccaaatccaatctaatcctttgcacttgcaccaaccctttgttttccccccatactaactccaaactaagactctttctctttctttttgttctctttccacttttacattcaatgcttatgcaaatatcttggatagtaaatcttaataaataaaatggatcaactaccactactacctattactattaataaataccaatatacattcattacttgcttttaatgatctctcaattttatttgttagtctatttttgtgaatctgttttactgaaaaatgaagttttttgacatcttttcttagatttagtttagacaccaatagctttaccatgaataatgccaatattattaatttataatattcaatggaactttaatctaagaataagtgtccctcaagtgaacaaactattacagatacttaacaatttaaaaatagtaatgattcgctaaactaagaaattttaaagctcaagtaacaaactataacaagactgtgtctcaataattgaataaacaatagataagttcatgaactaaataattaattagcagtttggcattggaacaacattgtatccatatattcactcacatgctttacatatatatatttatatatgtttacatatattagggttttgattatatataggttattaaataataaaggattggatataatgatcgagtagatgatgagctagctaagctaacatattgtcatatcataatttaatgcaataacagttggagaggaaccattccagctcaggcatgtcatttctgagaaattctcatctaaccaaattatatattatccaatgaaccaagaaatgggagaaggcaccttatttacttagaggttatgattatttaattgattaataatatggtttcatttcaattagaaaaaaatgttggattaaaattctcaatataggcttatatgtatattagtgtattgctatttcaagtttggctcaaaataaagcgatcattttagtaattgtagatcattaggtattaaagtgtcatgggctaaatgtgtagatatcccctaagcgatatttttaatttattgaggggctaaattagaaaacttaaaattaataacctagctatgaggttataaatcggcagtggtccctaagaaataagagccaatttctattctcatcttcc

SEQ ID NO: 113218 - DNA, 922 bp, Cannabis sativa
  modified_base (838)..(851): a, c, t, g, unknown or other
agtatatgaagtaattcccctttttgatataatgtaaaaagaaaatatattttttgatattatttaattaagtagttaaattaagcataaaaattcaaattttagtcattaaataaaaatttaataatttaatatttttaaaattaatatttataattaaatttattcaataactactaataccattaaaaagttttttctcatatatatatatagttatagattttttttttgttttttgagaagtataaatagttatagattaaacattacaacaaagtggcctttaatgcaaaagattttgaacattaataatgatgaatagcatgtttgatcgatctttatgaagatttattatttacaacattgtccctacactcttaaatatggatctaattgctcgaatattattataaagatttctgcattgcttttttttttttttaattgaaaaacgtctttattattgacagtaatatgaagataagaagaagataaaatgatgattttgtttgtatagtctctctcattatcaatcttaatcatgattacttgtttggtggtatatagatatagtctctcatgtgagcaacattaattgtagtattatcattacataaccaaatcaccactttttaactgtccaatcacaaacaatacccatttctttgctcaaactggcattttttttcttcaactttttaatgtatttttagttttcttaaaagaattgagatcattataactatttggatccacttgaattggatcatgccaactaataagaaagctttgataccataaataagaattataggactcgtttggaacgccgtannnnnnnnnnnnnnattgtattgtattatattgaattgcattttatgcaatatttttatgtaaaactatatgtggtattaaattt

SEQ ID NO: 113219 - DNA, 3246 bp, Cannabis sativa
aaaaaaaaaaaaaattcaaattatcacattaatgatgccttcaatcatgagtataatagtacacaaggaaaatattatatatgtatatagacaaatgctaaagggtaccagtgtttaattaacactctcttatgtgttaatatcgctattggttcaattatgtatcgggtcccatataatttaaaataataatttttagagagtatcgctagtcaatcgtaacacgacatgtcgagaaggtgctaagcaccactgatgcctaatagcaatgctcttatatataataataagggttttaagatgttttttttttcagtttatgaaaatgatgaaatgattaatataatagggtaaaaagacaatacttagcagtaataagcaaagggttaaactttaatgtataaacaacattatatataagataacatagtaaattgtgcctctaccattttatattacttccttttccaatgtgaagttatttatatatttatttttgaaatggaatgtaaagttttttcaatacatagtgtaataaattgatagtgtcccttttaaagttccataatcctaatatatataaacctagtattagatgatttaaatattattagttcttgaattttgattcgataattgtaattaatttagtagctcataaaatttatttgagattacaataataaaataagataacatacatttttttaataatgtgccacatatgacatatacctaagtatcataatattgaattattatgtgaccctacaatatttatgttaaatgataccatttaccctttactattttctatatatataaacacacataaattgataatacatataagataacactgtttaattagttaccaaaaaggaaaaaataattgagtttactatttgattgagaaaatattctttttatcttatcttataataagctagcctttgaattgaatataatttattaatttcttatatattcatggccagctcctacatacatacacctattatttaaataaataggaccatcattaataataagaaaaaaaaaaagagataatttacttattggggaaaagataatacattaatcataaatgatcacattcatacttatatatatgtcatatctgtatttttgtatttattcaattattattatcttaacaattaatttttttttattacatttttattatatatgtttgcttgatcctaaagaaaattctctggaagatcatgattggacgatacgtaccctaccgatccactcacactaatcataatgcttttcttttttctacataattctaatgcttaatatattaaataattttttattaaaaaattaaactaaataattaattgatattttcttttgaaatggaataattaattgagattttatgaaataataattcaatcaaaacataaacctcacttttaaaatgatttttttaggaaggctttatataagtatggaaaggagtctgttttttttttttttttttgaataaaaaagaagttttgttttttgaatacaaaaatgattttttatttattttgaaaattatcaaatgagaatacactcaataaaattttatcactattaattaatacccatagtaattaatttttttcaaaacaatttaataaatatttgcaatttttattgtaattaatttatatgtgacccttaactattaatatttaataagttgtttggatggctgtgaattaaacattaatatcattaaatttattgatgcataagtttaaattcacaacgctcaagaaaggaattcgtcatcaattttcaattttaagaaattttaaaaatgtttaagcatgatgaaaatttttgtatagttagtagatttttttttctgaaaatattaattaaaccattatttttttatgaaatattttttcattgctaaaaaaaatattttataaaagtcaaagtgatcaaataattctgattttttttttttttttggtaaggaaaaaattgcatgattaatcaatctttttatcactaggattctataacttatcctaagatttccctttcttatatttattctctaaaagagtttgagttcttaaaataaatttagactttaaataaaagcttataaacggcattagcttataataatatttttttgaaagcttaggttttaaaaatttgagtgtataatttaaaattaaaaattattgtgggcttggcaaaactgcctaggcatatcacattaattccttcaaacattcaactttcataactagaaatactaaataaatacattgccaaaaaaaaaaagaaatattaaataaatagaaaaacttagaggttgttatttttcagtttttaaaattgtttttttaaaagtaaaattaattttttatcatttaaaaatttaatgatgtttggttaatatttttttaaaagttatttaaaaacttttttactaaagaaaatactttaatatttgacaccataccacgagatgaacttagctccactccaaactcggccccaaccctgggcctgaccttgggaccagaacccagaccctgaactctcgacctagacccaaatctaggtatgtgatgtaaaaaataataagttagataaaaaaaaataaaaaaaaatttaattctattttcaaaaaattgttataaaatttggtcaaacattcctataagtttttcatattattttttaaaagttgttttatgtttttaaaaattaaaaatagattttaagttataaagccaaccacctcttcttctcacatatattgttagcttgaattttcggcaactcaaataaaaaagaacaaaaatatttaagagaactagttcgagtattaatgaatcctagtacacgagttaatattattagtgttgttgacgttggaacttattttactagaatcgaatttactaacaagtatgtcttattatatacattataatctaacacatcctaaaatatgaaattcattagaacccttacattggttgcaacagaaattagtgactcattctgtgacagtcaatagtcctatgatccgtaaggggatatacaggataagttgtgcaatcccacactgcctatggaaggtcaagtggattgattctaagactgtgtaagtatgggactccacagttgaagagtgcttaaatggattgattggtaccacctatatcgacaaggtgcatcttattt

SEQ ID NO: 113220 - DNA, 4397 bp, Cannabis sativa
  modified_base (1642)..(1649): a, c, t, g, unknown or other
caaaaacagagggtaacttttgcaaaacagagagtccaaaatagtattttagtggtgaaatatcttaattttgattgggagaattattattattattattataatatgagttaattagctgtgtctgcctatacctttatctgtttctcacatgagagagataccttagctttgcatgctcacaattcaaattctctactgcacgtgaatttttaatgtgtacacactcacaagttcacaacatatttatataaatatatatacatgtgtacttttaattgcttattaagaaattttaagtttttaagttaattttttttttacctaactagaaaaatcttttagaattgttgtggaaaaaaaattatgaaaaaaaatttcagcaaaaaaattataaacaaaatttgttggacttaaatattttgtatataaacatttttttaatataatataaaaagaaataatttttatttttttatttaagtagtaaaattaggtataaaaatttaaatttctcttttattattcgttattttattaaaatttaatggtttagtatttttaaaattaatatttatagttaaatttattttatatatatacaaatacattacttattgtttaatctattattgactttttttttttttattgtaaggcaatcctagatattgaaggctaatttattattgaggcaaatgaatatttctattgaaacaatgaagcaaaatagttgattggttttatttatatatctaacttttttttttttacttagttttggaccattgataatatatggatctcacttttgttggaaatcagctaaacttatatttttttttttcatagggttggtttgtggtccaaatttggtggtaaattaaatgcccttttcctcaacaaaatttaatgcaatttttcatttttgaataaatatttaatgcaattttgatcattcaccttactttttttgaagtcaatgtctaaagcctaatcatttcaatcttattttcttagtgcctaaataagacatcaataataataataaccacctactgacagctgggaatttttttttttttttttttaatgttcaattattatttatatatgtatatatataaatacatttttcttacctctctttcattttactatggaactcttcaagtcacttctttttttagtttttctagttttaggttaatcaatgactttattaccatataaaaaggttgtgtaactaagggtggatttcatttaatatagctttgaattgattgaagcctatattattttttttttttctttttcatatcattcattaaggcattatttagacaaacttttagaatcacccatcaaagtaaattttacttttttgatggtgctttatgaaaaagagagtgaattacttttataaattgtagttttttttttgaaagtactaccattaaatatgttatccactaaccattaggaaaacaatgtagtgaaaaagagtatcatcatctatgtttttgtatgagctttttagctttaattaatttgaaagagaaattttaaaagatatcagtggtgccaatgtcaatattgatattgctgtaatttagtatcgggttccatataatttaatatnnnnnnnnttagggagtatcgctaaccaatcgtaaagtgacacgtcttaatggtgctagacaccactggtgcccaatagcaatgctcaataaaaaatactaaatgacactaatatgtgaatactactattagaggggcgtttaaaagtaattttataattattagatcgtgtaattatgtttaaatattaaataataattatgatatgaattattatttttatgtttgacaaatgaattagtaatcatataatttaataatattaattagttacaaagcttaaaaatggtaatattttgtaattaaaaatttcagagtacaattgagaccactcaattacctttattacatggttactgtataattatctagttgaacaaacacaccaaattttataattactctaaattacacttaattccaattataaagtgacttttcaaacatgccctagaataacttaatattatgtctcatgtattttaattaccaatcctaaggcggtgttagatactactgttgcctaattagtaggcttattagtttgagttatgaatcagatgaattgtttccaatttctcataagagaattgattttaaaattttttacactacgcactgaaatttataattttttttctactatggggtggaatttttttaaaacagtattttttatgttgtgtactgtgttaagtttttattattatttcacgattatttttagtagttctactattgttataattgttctgttttgttgtttaacaattgttttataaaaagtatttttataaaaaaattcttgtgagagtaaaattataaatttttacttaaaagtttagtatttttataaaaacctcatgattttattgaagtatcacttttgggccattttcaaaatgaaaaagcccaaaaacaagttactcacaaaactaaacttgaatatacagtcaacactttacaacaatcccaagaagatgagtcaaattcaagtattgaaaaatcttcattaacacttgattattattagcaagatgaatgaataaacattttcatgtgcaaataaaacaaaagatgagaaaggtattgaattatttggtgcatagaacataagtgaataatggaccaattatagctttctttttagaaacctttaatcctaataatgtgaccattttgtacagctaaagcaaacactttcacagctaaaaaagcaaacacttatagctagtaaatgtccattcacttcatccccaaaaattgctaaaaggtactattaatgtttaataccttactcagtgtcataccgctcttagtttaattaagtattgaatcccataaaaataactcttaaaaaatatcgctaacctaaaaggtgttaagcaccaatagcaatactcatatatcaaagggtgatgaaaattgtggtgattgcttaaacatgagaaattgtacagagaattttgtaaggaaaaaagaattactttactggaattgtcagctaaatttcatcaaaaacatgattaattataataataataatacacacatacataaatatatagatatatatccgaattatatgaatgggaagctgaatggcttcaaaaagggagattaatgtagaaaatatcatcaaagtgtatcagaagcattttaatataagcaatcatctgatcaaggaaagtaggcttcactctttgcctccagctaacttttcccaccatttcttttatatatcttcactttttctgcaacaaccaaaaaactttaccatttagattgaagatgaccaccaaaaacatacatgcaaagttgtttgagttgagtcataacaaaaatgctaaagcacagcttaatagtaataaggtggtggcaattttggattggttggtcaatatgatttttggcatttttgaatgctcttgtgtaattgagtagtagcattagcagtgtattatgatatatatatagatatatatatcatcattagaaatcaatgattaaaagaggaaaaagtgagattaacaagaaaatggaacaagacttttatgctgatagatcatatgatcaaagaaacactatatactggattatgatgcagaaaaaaaattgaaatagcattccatctccctaattatgatgcagaattacagcctatatatatatatatatatatatatatatactttgctatgcaaactcatgctagttgatcatgcatacatttctattctctgatagagaagaaattagtagcttcctttcagaaatgcatgcagggtttataaacaccttcaaattaatgcatgagtaatttatgaaccccacatcttgatacaaaacaagatagttttggttctagatatagttaataatcttcagaaagccaatttttttaagcaaatctatatagagcaggctgatctagctatttctagttactgctaataagaggcattgtagtaagttgcatatatagcttatttcatttataggcaagggatcacagcaaacaagagtttcaattttagatcagctagattacaaatcaccataactataataccaactgataataatatctatgttgagaattatgggatccatctcaaaatcaattgggagtagcccatgttcttatatattccccctcgagatgatggctattttttgctcatcaatcttgaaccgtatcagagtggacatggtcacatctgtataggtgcggatcagataggatcacttgcccg

SEQ ID NO: 113221 - DNA, 4348 bp, Cannabis sativa
cgtactcgtgtataagagtcgttaatccgtgggtgtaagggcctaatagaggcttgaagcagggacgttacaactccctatactcaactctaatcagcatcgacctaatctatcttttggagataattaattctccgctaggtaatagggttccgaatcctatttcacaattgtcacaaggcctacctaatttatcaattatcttggtcgccacataaggactagcttcagcatcggtttgggtaatggaaagcactcgagttggagtggatttgcctctggttttgattcttccttcttcaaacatgagaagtctctcttgaagtgacctaccaaaccaaattgatagcatgcattacgattacactacccaaatgatgtttcttataacaagggcactctggataagtataacgaccttcaaggctaccattttgaccaccatgtccttgtttccctcaaaacatcttattgactcaaggccacttctattgatggagcttttctcttttgatcagccgaagaactaccaccatttccaccaagattagaagtaagaggagcagtgaccccaccaacaagtggagtccatcgaggcttttgaacaaactctgcagtgctctcggtcagcgtgtatcacatctgattcttcctgaaggactagaggtccttacatccaaaattatatcccatacagtggttccatttggttaccaaccatactctattctgttggcaacactagactaaaagcaattggtatttgaggtgaaggtacgatatgcgatcctttttgtctttatctcttgatctcttatctcctcatcttgtcattgaatcatggcctccattttaacaaactattgctcccagtctagcgtagcttgtggtggatttttataaccacctccataagtcattcaacagcctctgccttggcctcgaaaatgatggggatcccaatctccccaaccaccactagtatcgacaacatcgttccaactccttatgtttcttcaggcatccattttataggacaagcctaagaattcatgagtcaactaagtcaggtagcaatcaaaattgtaatctatttactgcttacatgggaacttaatatgctcctatttagctattagtttgctaacatgcttcctatcatacttttctaatcatgcataataaattaaatttactaaaacatgtaagaacttattgaattgtgactcgatcttatctttgattatgattatacatatattgacgatctttgatgtaataccccaaggtttaataactggattagtaaatctaacaaggttaattatgtactaatgagaaattatattatgatatgatttaatatgtaaaactattatgatttattgcattttaagaccacgttggtgtgtcatggatatttttcgtaattttgacccagaaagagtaaaatcataattttatgatatactgtgcttatggactatactattatatagtatgtttattctgtttatctgcatctattttctgacaagtggacgcggtatagtcacaactgggtattttgagccaaactgagttcagggcccaaaatacattttcggaatttatttatggtatttatgtgataaatgagaaattataatttatgtgatatatgtgtgtctgaatggtaatgaccaatttactctttttatgtttatgcctatatatatgtcgtaggggcattttggtcatttagccaattaagcaattattcaacaaaaactagatctttatcaaaataaaaaccattttctgaattctttcaaacccaaccggccctctcttcctcaccctcaccatttgatgatttcaaattgattgttgtggaaagcttggatttggtgtgtttgtgtatactcttgtgtgaggtaattacttttgatctattttcttgtagaatgtcttgatgttctttagcttatgattgcatgttgtagaaaatagtgtgaattatggtgtttttgggtgtgtggttgttattaggttcatgcttgaggcacctttgttgttttgggaggttatagggttgaactgtaatatttaatttatgagtatttctttgaagctttaaattttaagtttgtgcaattgtgtgcatctatggtgtttgtgatgtatgttgaatatgatgttcattttgatttgtttagccttgtgtggtgctcaaatgaatatcgatgttagattggtttggttttagtttaaagagttgattatacatggttttgaataggtttttgtatgtattgtgttgatttttgaagctttgaatagttggcatgtttgggattccagggcccattatcgcagccacagcttggctcgtcgcggcgaagccttatttttcccaaggatttttattttctcatttttgctataacttttgactcggaactccgttttagatgttctgaatatctttgaaaagctcgttttggcctctatatgttaatctgtaaatggaattcaaattatgtgtatatgtgaaaatgaatttgggattaacctatttgtgaaatctcgagaatgtgtgactaggattaccggcgcttgctcaagaacactcagtgatttggaatctccacattcttagattaccaggtaagacaataaactagcacatagagattagcgatgtggtgcccgtatatgttattttgtgtatgccatgtggaaaattgagattaaggtgattaccctaaacttagcggtaatgtgatctaggaatattactctagaatttaggtgattatgaatgcaatattatgatgtatatgttgatataagaattagatggttaagccatagactcagtaattagaaccgagataaaacattctaaggccttattgtaaatagacatgtgggtgtaacacgtaggtctatgtctaatagataatagatgtagtggcatcaataattatatgatttttgattatattacatattgcatattgttatttatattgtcttgctaggtcttggctcacaggtgctctattgtgtgtaggaaagggtaaatctgttgttgatcagccatgaggttgagggcttttgcggtgtattatacatgtttaggccaagctagaccacatgagttaggtctaccaggggaaatatgttgtgttctccacttttgctgcttaggtcggcgtgtactgatgacttgtaatattttgaaaagtttttacggagtcctgaaacaaaaatgtaatcttttggatgtttgtaatgtttaataaatacaagttatgattttaatctatgttcgttttaaaggttaatttttgctcttagctttagtaatctcgatttagcaggattagcatttgtttagtcattatttgtggtgttcctattgttagggtgttacatttgaagaacaacctggtggctctgacaccgaattacgtgctacaatattttttttaattactatacactcagggtttattggaaaatttaattaattaaaactttttaaataaacttaaacttgaataaacaaacataatttaaataattttgggataccgttaaaagtttacaactgttttaaaaatatattttatacaaaagttatcgcccaacaacaatcaaaatgtgagcataaattgtctcgaagacccaaacattctaggtttaatagtcttgatatgtacaatcttcatccagctctagattcattctggttcagtcatggctcttacccgcacatgcaaataatatctgcagactcagtaagaaaaatataaatataaacatataactaaactgtaactaggcacccatacacctaatcacgatcctatcccacatccaacgcgtactagtgtagagtgttcttgataagcctagcataaatttgtcgatatctagtgcaattctatgtacacctatgccattcttactgatatgctaaactaatggctttagaaatttccaaacataaatttgtcgatatccagtgcaactctatgtacaccgatatcgttcttacaaatatattatctaataggcaattataaaaatatgtacactaagcatgtatatcattatattaatcttacattgattatgaatttaggtgtgtcgattaacttgagtgaaaaaacctacttgacgatcagtgtaacgttctcgcttcaagcctccattgggtccttctacccacggaatgatggttcttatacacgagtatgccagcttggctacttcctggattgatgactgaccctacagaccaacacaagtgtttccagcgtgttttgtcctcactcgcacgcttcctgagaaaact

SEQ ID NO: 113222 - DNA, 2312 bp, Cannabis sativa
agagagagagagagagagaatcaggaggagtctgacaccagagggtcatgtgcttaggacctgcttgaatttatatatataatttttattttttgtggggggctttagggtaatacaagttcaaatttcacaaaaataaaagatgattcttcttgttactgttgttggtacttttctttatttattttttcttcttcctttacttttcttttttggggtcactagaatcattaccagctataaaacctatgtagatactctttaataatcttcttaatttcaatatttgcttctgttacatataaccattgtaattctatgtgccatacattatattacattaattccttttttttgttatatagttatagaaatgcatggtgcagaaaaaatcccacctccaaaaatggataattaaaatgatttatatatttacatataacaaatatgtaacatataaatgcacatatgtacacatacatgcttttaaacattaaagggtgaaaattattggtagcccacaaaagggtcaaaaagagagctggattctatggttgtgattaaacgcaagtgtgtaaaatgcaaaaacctccatatcaccggcataggtcctagatgttggacacgtttacagccaattaagtgtagttattaatgtcttcatgtattaacaaagtactctatagatatctatattattgatactaattaattaatataatatgtaatattaatgattctaccatgattatattgaattacatgttaatatattattaaatacacacaccaaaaaaactttattaattgagagagagaagcatataccataatccaaaattatttatttatttttaccaggaaataggagagagaaagaggacatattcaaatggggtttagtatcaatccaccatgcaactttcttttcggtttcaaaagttacataattgctctcaaatttagtgcattcagagagaagaggggaatatctaatcttaaaatatgaaacattcatcttaataaagaatataatatttgcccctaaggaaggaatatcttagttccaattctacgactctaaattaagggagcacaactcacaaagcttaaagggccaaaaaataaataaacaagaactatatatatatatcttccctttaattaaaagaataataaaggagcctaagaatagggaatcttcttctgctactaactttaatgaagtgggtaggaaggtaagaagattctttataaattttagaggaatttttatggggttctgaacctccatcacaattcggatccgggtcagacaaataataataatattatcattgtatagtactactagggttcaattcagcttcaacaatatcagatcaaacgtaataatatctgcttttctagtactcctgagtcctgaccctctctgcaacagtccttgctcttgttggtgtaccaacacctttttttttttcctcacgacaatatataatctataattaattaaagataattccttttattaatgtttaaaagaacatgctttacttctaatgttacttaaaaaatgttcctaactttctcttcaatagagaatatcaaccatatatcaagtggtcttattagttctttataaaatgtactcaaaggagagaattaataatcgcgcatattcatatatgtgataatactgatatgttaataatgttcatttaatttgttgataactgcgccagctgccaaaaaaaaaatgttgaaagtgcaaggtttattaattcttccttaaatttatatgcagtactttttaagtaaactgtagggtatatcttatatatgtgcttaatttgttttatatatacatatatatctttaacgacctgatgagctcttatattttgaattgtaaaggctagctaaccataacgagtttccacagtaaaaataagtaggaactatatgagaggacccttaagtaatttcacattccatgccagagtttacatataaacatgtaaagttggtccggccctatactagctagtatatgtgtcctctctagtattctagtatgtgctatagtatagctgttattgtttacggaaaattgcggcataatcttcaatagtgttgcttcgttagaaattaattctttaaatttattttttgatggtaaaatcccttaatttcaagttctgttagcacttagttctatgccattcacttttgaaattaattgataagttggttgttcatgtataataaaatttaacagaatgatcaatttacaatgttatgaataactcagg

SEQ ID NO: 113223 - DNA, 3344 bp, Cannabis sativa
  modified_base (3275)..(3291): a, c, t, g, unknown or other
ttatattaaattatataaaactatcattttaattgtaagaatagtgatttaaattggtaacaaaaagagtaaacattatcaagggccaatactagtacacagtatatactatatcctatgcacatgggctccccagagctttatgcagtactttctcgattgacccaaaatccccattttcattcttcctcttcctctcaactcaaactattctcacctcactcccacctcccatggcgttcgctcacttccttcctcccattcccctcgaaacctcaacccacccaaaaacttcgattcccgcattgtcttcttccgatcgtctcttttctccacctttctcctctccttttctcaggtctagagcttctcctcaagtctctatctttaacggcctccgtcggatgggtcttataggtaattttctgtaaaactatcatctttttttattatttctacttcccttcctacctacttattactgtattgtattgtgtgtcaattgattttgtatcagcaaaagctcagtctcaagaagctgatgtgagctcagcttctgctgatgcctttactgggttcaagcatttactcctgccaattacagaccgaaaaccgtttctttccgagggaacaagacaggtgacctaaaactttcttaagggcttacttgttttgttctttctgaaatttcccttaattttcattattttaatttgtttcaagtttatgtatatttgggtggctgttggttttttttagtgttagctgctgtggtggaccatttttttttttttttggatatttcaacatgatatacaaataggaattgttattagaaaaaattgtttaattggaaaattgaagagaacaagtgttggatgtttcataaaaatggttccaaacttatggttcgatctatatttattggcttaggaatttgtaagatcaactgtggttgcaaggcactgttgctcaagtttgttgaatcaatgaaccttgcagatattaaaagtattttaaatatgaacaggtctgagtgtactgtgtagtgaggtgaacatttacggatttatctaagaaatctattgctttgcactgtgcatagaccagccttaattagattgtatgatccttgttgaaaattttagagaataaagtttggggaaaggtttatgagaatggtgagcactattcttgaacatacagcttagtggctagatcaagtggttgggtatgttgtgtgggatgggaagagtttcagattctcattgtgtgtatataagaaaaaaaaaactattctttaacaaaccgttgtttctttatttgtgtgcttgctcacccttatttgtaaattttacaggctataggaaccactgcttctttggcgaagaagtatggggctgacatcactgttgtgggtatgtgtgctgacctttgttcataatattctctatttggtaataatggaaactgagttgttgaggcatcacccccaccctttcatgaagctttttaagaagatttcaaggaacatagaagttaatgttctttgcagttattgatgagaggccgaaagactcattgccagagcacgagaaccagctctctagcatccgatggcatctttctgaaggttagtgcattctcttgtgactacaaatgctcatttaaggtctgtcataaatttaaaattaaagaaaataaagcataccaaagtcttctccttagcttcatcatacctttattatatgcctagaaaacataatgaagtccttcatgaacaaattgaaccaaaaagttaggttgcaaattgggcacctgagacagtggtgaacgaaccttttgccctggtgatgttatctccaattttccttttccttctttcttttctgacttaatttaaaccagaccttttcaaataagagctaccctcctttctagttggtaagtagttttttttttcaaggaagttggtgagtagttttgctttactactacagatttcattttgcttttattggataaactatgttgttatatatgtaattgttgcatatatttgcacaaacctgtgttgaaatatcattaatccaaccccttgaaagtttatttattcttatgcccgtgcccatgtgtgtggcgtgtgtatatatatgataggtggattccaggaattcaaattgctagagaaactaggagacgggacgaagccaacagccatcattggtgaggttgctgatgaccttaatctggatttagtggttataagcatggaagccattcattccaaacatgtggatgcaaacctactggctgagttcattccttgccctgtcattcttttaccattataaactgttgtaacatttcagacctaagggatttaactttgatagcatctttgatctccatttcttttctcagactacaaagagagagagagagaccttttgctatctgtgtcatgtgtcatgcttgcttggtttgattggaaatggtttgtgttttgtttgtagtagctgtgtttggactttgtggagagttaaaaacttaaataaaacatggcagtggcttattgctccaagataagcttgttgtttctcttatagattgtaaatttgttggaaatgtgtgtactaatgataacacccaatcgatcacgaagtgacaagtcgttttacatcttgtttcctacttcctagtatcaattggacaagagttctacttattcgacagaaccaaaacgtaagtttaatttgtaattatgcctcccgttataaattgtttgttaaaacttaaaagatagggtggtaaaatactcaatccaacctatatgatacaatctaagatatttgcagttgcgcagattggaaaatttgattaacatagtaactaattgagtccacacacatttatatatatttaatattttaatatatatgaatatcatacaataaatatataaaaaattatatatgtataattaatattttattataaaaaaaataataataaatgtaatacatatataatgatagaaatgtattttaaattttaatagatcaaatgtatattctattcttatttatatagaaaatttaatctaaaacaaagctaaacatttctttgtacatataatttttttctcatcttcttttaaatttgttatttttttttgttttgttttgttttaatttgttcttgaagacatgaaacaattataatttattttaatttgttgttagttatgtggaaaaaaaaattaataaatattnnnnnnnnnnnnnnnnnaaagtaaccaatccaatctgcacttttattatgcgaattgaattggatctaaa

SEQ ID NO: 113224 - DNA, 3876 bp, Cannabis sativa
caattgtgaaatgataaaaaagaatcaaagctaacaaaagtactatatttttgtaaatagaatagttcacaaaactttatcattatgatgtacattttagatgatataatttggtagtgttataagttttggagatacaatactaattatttttcaaaatagttgtgcttaaatatttttaagagccccacacgtgcgaggcacgtgagacgccactagttattaataaaaagtaaataaaaattaaagttttactaacattaaaaatttatacagctaaaaaaaaaaatcattaaatttatacccattacaaactcaaaattttaatcactcatgacataattatcccttatataattataaaatattattacttttaaataatcagctattaaataatattcttttttatataattaataactttttgcccaacataaataaaaatttatatataattactctttgatatttaaagacatctaattttaattatattttaaaacaaagtaaaaattttatattttagaaatgcaaaacggaaagcatgcagtttccataattcaaacaaaaatttgacaaacattacaagaaaagataaagcttaagagaagctttgaacatagttaattcctctctatgcaagagggtctaaccagttcttagcacaaatgagtgtctctattgtcttagaagataacaaagtattattagataagtcaagaatcatatcactactgcaacaatctgtttcagaaaatgtaaaagaaacaggaatggcaaacacatctcttactatcctaagtaaaatctcacattcacaaaagctatgaaccttccaccaaatcaagatgttgaaatcattgtaggaaggatgacgaaactgtgataagtatctctccaattctgttatcttttgatcttcacctaacataaagtgttcaaatgaatttagtttatcatagtcgatattcttcatatccttttcaccatttgaagtagagtaaagcattgtataatgctcatacaaattctccaaagtcttcctagccttttttgtcagttcatcagccaaaagctcatcgtcgcatatcaaaagcgacatgttttttaaacccttttccaagtagcgaggatcaagcaaaacagcaacaaacaacaaagggttgacatggttgatcatatttttccaatgcttctcacattttttccttaagttgtatgccatgttctttagatgcaaatctttactgttgcaccaagatttcaagcgtttgctaatccatgccacctgaaccacaactagattcaatgtcacataatagtcttcaaacaatactaatgatgaatcatacaatttcttcaggtttatgcaagcacgcgcaatcttccaatctgtgtcactaggagccctttctccatccacaaactcgcggaattgagtatcttcatttcccaaacgctcaaatgctttttcaaaggctacagctacattcaacattagacaagttgattcccaactgtttggaacgtctaagaagacaaaattctctgaaataatcttctcatgttcaatacaagtcttaaatttcttaaatcttgctgaagaggatgtaacatacctgatggcattgcggattctagatattgactcatggtaatatttcaaaccatctttgacaattaaaactggaatatcggagcaatatctcatttgcatgaactcaggcttcagaattggtgtcactctgttggacaagtatgcaacaactccatcagtagagcttgcattgttgactgtcacagtgaatattttcctaatgttccattctattaaagacttatcaactgtcttgccaattgtctcaaccttgtgatttggaacttgacaaaactttaagattctcttttgcaattcccagtcactatctacataatgtgcagcaaggcccatgtaactcaacttttgcttagatgtcaatgtagttatagataggcaaacactttgagttgactcaatcaaaacatcctttaacttgttcttttcttgcagataaagattcaaacaatcatcttgaaaattaacgggagatgggactttaaaccttggttctaagattctacaaaaatgctttaatctttcactctccacacattcaagattgagctcattacctataagcattttagcaattgcttctctaatattttcacttccacaaggattatccataccacataactcaacattgtctcgaaaatcatttggatcaccatgtaatttagaaattttagttgacactgatgagagagatctacaggcctttcttttactcacctttttcggttcagcagaatcatctgcacaatcatttaaaagggttgctacatctgctccaggttgttcatttgcagtgtccttagtattcatctgtttagaggtaaagaaaataatcaatatatgtcactcgagttagtctaatgcatttacctataaaagtaatgaatcacaacatgttgagcctaaaactagttgggtaagactaaaagttaccaactaagctagtacaatactttgaaattttgaaccaaataaacacttcagcatcatataaaatggagttgaccggctcctagtatctatagactaacaacctgtgtgtaataaaaataaattggccaattttaacttgcttatgcaattttgttgaccaaaacatagaaatggtatttgaaatttaactagacatttcagaaatctaatggctgcgaaattagacacccacccccattaaaatatcttgacttgatcatatttatttctatctttgccatcatgtaatgcaatacccatatttcataacacagtagtaattatcccaaatcagtagatttcttatgaatatattactactactagattgtggctcattttaagtttgagtgtctcacactccgtagtataaatacatataaagttatgaaaacataggatatgggtatttatccatacaaatatataatagatatataatttgggttggggacctggggtggtcgaatactgcaaaaaagaaaaacaagtatctagaaagattcctcttttgctttgcggcttcagcattgcgtttaagaattctccatacaagttttactcaccaaacgataaacgattaacatcgaataacccagaaaacatgtacagatcacatgagaaacattatgtatatatacataccttgtagtacttgtatatacagaagatgagagaaggaaaatatataagggcttgattgagaggagccttatcaaggaaaagttcttgcctccaaaaccttttcactaccttttttaatggaaaaaataggaaataataagaatacactaaattatattacaattgggaatgggagattagaactaaatagaagaacattataaccaaaaaaaaattaaaacaacaacaataacaatacataatctttaattaatactattataatattattaaggtaataacaaatacaatgagaaatattctctcaagaacaaagtgctttcttatttagtagattgatgagtgacaatgctcttatttgttttaagtgtattaatatacttaaaaaaaacacggtgatatggggtattgtgttaataaacttgacataaaacttatgatcaagcgaaatggttttttttactcacattatgcagaagttaggatttcgtaagagttggattggtaaggtaatggagtgtatttcctcgatcgaatactctatgttggattaaaaatcctatgtgggcacatatgtataatgtatatgctattataaagtgtgatacaaaattaagtgaccaattatgttatgggta

SEQ ID NO: 113225 - DNA, 2426 bp, Cannabis sativa
ttttcaaaatgtataaatttttaaaataattttttttttgcacattttttgtaattattttatttttgttgtacatttatggaaaaagcccttataaatatttgacgtacacaaattcataaaagattacgttaagagttgcaccaattgttttgatttttttttttcataataaaaatataactaaagctattttttatttgaataaatgcataaaatgaaaataatgttgaaaataatgcccccacacccgaaatgggaggatgccgaaagatttggtaggtgtttgtttgttttgtgttttggagggtagtgttattggccactgcagccttgttcctttgactcactcaccttacttcactaagtatgggcttgggctcatcattttctcaatacaactcctaacttagtgtcggtgaatatgaatcttttctatctataaatctttttaattttatattttctgaaaatgggaaatgaattcacaatcttgaggtagatcttgtctggaaaatggaaattttggtagctcttttattgtgagttggtcaaatttaatggcgcttctatccatgacaaaattaatgctcattattagttaaaatgataatggagcaaattcagttgagcccaaaaattgtgcttaatgctcattaatccatgttgtaatttagtataacccactaattatcaaataaaaacttttgagtaacttttgttaaactccaaagtggctaatcacatcgtgcttctcattaactagtggatgccaattgtcaagttcaatggaagataaagattattagtttaatttttttaggtgttagtcataattttggtcgtttagtagccaatcatacatttacaacttaattgtaaaaatcataaacatttatacacgttatctcataccaatgattgattaaaacttcaatactaaaaatatttagttagtaaagataaacgggacattttgttcatagattagtagtgtgcatgcttttttaatagataaaaatcttgtttagatagatgatatcttctttttttgaaatgttttttctcttgctaaatttatgcgacattattaatttcaatgaaattatttattcattgctgaaaaaaaaaaaacaataacaactcaacatatattgtaaagaaaaagatatatacaactaaataagaagaacaagtcatattgaaagggaactagaagttcaaattctaattcttgtaatgccttaaaaagtggcaagggtctcattttatcaattcgattgggctaattgtttggctgatcagtgatctgagtgtgaaatctgaatgtgttctcttaaatctttcatatgatttttcttcacaaatatttttattttattgttttttaactacaacttatttacttttgtatttataattataatattctatattttctagagcaaataaatatatacaaagtacaaaactatataaggttgtttcataccttggtggcacctgaaattgatgagaaaattgggattcgcgaaattttgagttggatcaaagataatccttggctacacgtgatcttggaaaatgattgtctttctgtggtgcaactgcaagccatacatagttttattgttatgatcttcatgtttagccaagtgattaatgattgtaagactttgttaagttttttgaaggatgtttatttattttgtaaatcgatcagttaatatggtgattcactcatttacaagagtttttatattatacttgattgtcatttcagtttggagaattttcctattgatttgttaccccttctagtaattgagtttaatggttaataaaatgctgattttctattaaaaaaataatatttcaaaaaaatgaaataaaactataatatcatatgttaaattaggatttttttttttaatttagcaaaaaaaaaatatattttggtttttttttcttccctttttctgaaaatgacaaagaatgatatcaatataaatggcataacaacacactaccgaatccgggcgtgatttatatggaatgatatcaatatattgactccatttttgcttcattattgagctttacagtacagtccagcaaagcccatttcccttaataggacctgtttcctgcgggccaaacaatccgaatcaccgaactgaatatattaacaaagcccattttcctttgagcacatcaaagtgctataataactaaattgtaaaaataattaaaaaaaaaatagttaagtgcttcaaattaattaatagctcattgaatagtggtgagctaaatatattgggaaatttagatagtatacaatttttgtcatttttttataaaaatactgtcaagcaaaatattttacttttttactgtgtttttttataagtttcatactgcagata

SEQ ID NO: 113226 - DNA, 5383 bp, Cannabis sativa
  modified_base (5302)..(5302): a, c, t, g, unknown or other
tatatatatattgtatattatgtaatgtaatatttatttaatctctttgttgatcattgtattatatttgcaatagagttgtaatgtcttaattttctttcattgtaataaaatctctaatatattatggaaagacttatgtgatctgagaaagaatgtgaactggctgctaatgggggacttcaatgatatcttagccaaggaagagaggattggacatagagttaaaacataccctgatacagagtttcaacaatgtgtaaatctctgtcagttggaggatgttaaagcaagtgggaactttttcacttggacaaataaacaacatggagaagatagaatcttttcgaagatagatgggataatggccaatcaagcatggatcaataaatatgaacttgctgaagctgtttttctcaatgaaggcctatttgaccacacacacctggtattttaactctctatcctggtttagtaagtggaaagaagcctttcaaatactttaagatgtggagaacacatcctaggtatgacacctatctgagggaagtttggaaacagcctgtagtaggtacaaaaatgtttcaagtagtcactaagatgaaacaatttaaactcagactcaaggagattaatagagagggattttcttatctacaaaattctgtcaccagggttaagttggacttggacctgctacagagccaaattcatcaatagcctcttgatcctaacttgcacctgcaggaaaaagagcttagagacaagttaatcaaagtgcaaggagactacacatctttcttgcagcagaaagctaaagctgcctggattcaaaatggggattgtaatactgccctattccatgcttgtatcaaacaaagactgagacaaaaccgtatcatacccattgagagacaggatgggagcagggttcatgaccctgctttgataacagaggcctttttggagttctacaaggggctgcttggttccaaattagagaagagaaggaagacagatgctggtataatggcaagaggtcttgtattaacaacagaacaagcaaatggccttattcagaagttcaccattgaagagatgaagaaagctgcttttagcatccctggaaacaaattcccaggtcctgatgggttctcaagtagcttctttcaagacaattgggagattataggggaggacatcagtggtgatgtgctatctttcttggaatcaggtaatattcttaaggagattaattttacgattattaccctggttccaaagtgcaaatgctctattaaggattttagactaatagcttgttgcaatgttatttataagattacaaccaagctattgagctctagaatcagtaacattcttcctgagataatatcccattcccaagggagttttattaaaggaagatttatagggcacaacataatgatataccaagatttggtaagacactattgcaggaaagcaaacaagccaagctgtatgatcaaactcgacctccaaaaagcctatgacaccattgagtgggagttcctggaggaagttctaacaggcttcaaattccctaagaagtttcatacatctaataatgaacagcattactactagtactcataagttctctcttatgttcaattgaaccttacatggtttctttgaatctaggagagggcttaggcaaggggatcctatgtcccctctattgtttgtattgggtatggaatacttctctaggctaatgcggaagattggtgagaaagaagactttcactttcatgacaggtgctctagtctcaaactaaatcatctagcttttgctgatgatgtgttactattcagttatggagacttcacaagtgtgttgtacatgttacaggcactaaagcttttctcccttacctcgggtttgtagcccaatgctagaaaaactgctatctactgcagtaatatgcagcaggggtgtgtgaacaagatcctacaactatctggatttatgaggcaagaacttccattcacatatttggaaattccaatttgtgcaaaaaagatctcagggaaagaaggtgagttgttggttgaaagaatgacaactagaattaaaacttagagctcaaggaatctctcatttgctggaagaatcacactaattaactcagttctcattgctatacaagcatactggagtcaaattgtgatcatgccaaaaagaattctgaagtccattgaagccatctgtacaacattcttatggaaggggcaggccctattccatggagctggggctgtttcttgggataatgtttgccaatcaaagtctacagggggttagggatcaaaaagcttgaagtttggaacaaggcagccatgaccaagtacatttgggctatctcaaataaccaagaaagcttatggcttagatgggtgcatagtgtatatatcaaagaccattcctggtggagttacaatgcttttattcactctagttggtactggaagaagcttgtatctctaaaaaaacaagatcagttccttaactatttatgctaaatttcagaggagcaaatataccatagcaaccggttacaaaatgtttagcactcctcaagaaaaaatggcttggagtaaaaaggtatgggctcggttgaatacaccaaaacatagtgtgattttattgcttgccatcttaacaagttgaagacaaaggatcggctggttaaatttggtattcagatacaacagaagtgcaacttatgtgataagttcaatgagaatggtcaacacttattctttgagtgcagtgtagttagccaatgtttggtggagatcaaaagttggctggagtggaaagcacaagttgtaactctgcagcagctaatccgatggattgggaaggcaaaagtgtcaaagttcaggaagttggtttactctgcagctgttgctgcactagtgtataatgtttggaaaacaagaaacgttgtaatatggtagggaggacaggtgaacatcagccgaattgttgaagatattaaatggagcataaggactcagatcaatgtattaataccaaagaaaataacaagtgtagataaagattggttttttgctttgttgttagaagaaagaaagacaaagaatacagagaagaatatgcaaattgtatagattgaggcctttgtgtgggtgatatcagtttgtgcaatacaactcattgatttatcaaaaaaaaaaaaaaattctaattatcaaaaagtttattccttttcaatggaagaggagattaatcaagattgtgagaatacaaagataagagattttacgtgaaaattatccttagatgagtatggtggtttttagttttatgttttattattttaaataatagtaatctatgtattaacatctttttttttttgttgaataagaaagttttatatgttaatatataaaaaattattatgatatacttatgtgagttatacatatgtatatgtatcatatatatgtgatcatgattttatatcatattgttatatatagtgatatagaatatgatatttaaatttataacatatttatatgtgtatatataaaaaatatataatatataacatatgaatatgagttatgtgtattgtatatatgatgacatataatatataatatatgaatatgagttatgtgtattgtatatatgataagatataatataatatacatatatattgtgagattaaatatgtaaaaataattattttctatgtatttatatgagacatgcatatatagtatatattatatattatgcatgtatattaaagtgtatataaatgttatatatgtatgaggtatgcaggatcggccctgaggtgagacgaaggaggtggccgccttaggccccccaccgctcagggtcccattttgaaaaaaaaaattaaaatatagttcgtaataaaataaataataatacttttaatactaaatatgtgttgcagcctagtggtaatttgattagtttaacaactaagaagttgagagttcaaatcccaacaatctcacttttacactgggccccaatttttacttttgccgaaggcctaaattatcatagggcagaccctggaagtatgtaacatatataattgtgtaattaatatatattatgtgtatatgatatatgatatatgatatatatatatgtatatatgttgcatgtatatatgtatatatattacatgtatatatgagatatgtaacatatgaatttaatattgatattatgtgtatggttacatatgagatattgattagtaacatacatattatattagttggcatataattattatttgagggatataattcatgcatcggagttatatattaattttgtacattaatatacaaattatataatatatataataataatattaatagtaatataatattgtttattactattgatgtggatattattatcatatatattgtggataaagagaatttgaaattctttttcaatagtaattttgagaaaagaaattgtaacttgtgagaagttacattctttaagaatttaaagtaataattatctcattttatgagataggaaaagtgaactatgagagttacacttatgagaattgtcttgtcatagcaagaacaaatgaattaaaagtagatccaaacttgtgaaatgagccataaattggaagagcaattttggactcaaagtaaatgaatcaatgtggattcaaaaattgtaaaaagataacaaaattggagaagtaatttagaattttaaataatcaaagtggtgaacaaaattgatgagaattttgttaattttagtgtaatatttgggttaatctcattgaggagataactttaaaataatgagtaaaaataatcacattattttgtaagcggtgatgtgagtttgatattttaattttgttgagaaaactaaaaatatcaaatggtattttcaaagtgactttaaagagccatttcaagagaaatacatacaaaagtgacattttgtatatactttatgctagaaatgtgggggtgagccacaaatttaatcaaaatgtattgagacattattgattaatttatttgatttttaattcatattctaaatcaagtttagcatgtgcatatgtgaaaattttgacatatttggtgtcaaatttttgtgaaaataatttcaagaaagaaattaaattttaaaaaaattatagagacaaaacagttttctatattttaaaatcaagantattgtcttgataatgaaatgtgaaagtgtgggggtgtatactccaatatgagaaagtttagacatacttggtgtctaaaa

SEQ ID NO: 113227 - DNA, 4097 bp, Cannabis sativa
  modified_base (4048)..(4051): a, c, t, g, unknown or other
tagccttattatggctagaattggctgggaattgggctgccgaatcgaggagagccacgagtcaatttgggatacaattcatagaatgagcatctcctacacgtcctttgtcagatccaagcccacactaacaatccccgccacgatgacctaagttacaatcaaccaaacttttgagcagcaacgtcaaaagtttcaagaatggatggactagaataactaggagatgaggcttctttcttggcttattcgaagtttcacttcgatttgaccctttctttcttattctgggaatgactcacattctattttgaaacttccatttgaggctttgactatctgggagtgatactacatctagtttgtgtcgctccatactgagaaaaatatgtttgtgtagctttttgcatggatgcagaaggtccatagatagttggggtatactgtgttttgggaacaagaacttgtgaggtgaattcagaagtagaagcaataggggttggtgtcggagagactccaaacgcttgttgataggcatcttccagattgataaatctttgtgctctttccatgaactgggacaatgtctcaacccttcttctttgcatctctctccataataaggagccaactacaagtacaaaatatagggccacaagtttcatgtcatcatacacccttatcttagtttctgcctccatagttttctcaataaatttctttaggctttttttagcctgctgtttgacattggtgatggatcccatttccatatcttagtcgcaggcgactatttcgaaaggcacactgcaatttctttcaggaatgaattgatctgggagccaatctttttacccaatcttcagtagacttattgagggtcagggaaaagcacaagcacttggatcttcacttactctagccacttgcatcgttttattatatctggccaggtgggctttgaatctctgtgcccatcatataattcaatatagggcattttgaagatctccaggagtggagcttttgtgatcctcctaaggcatggctctgggtcctcatcttcacagtcggtgagagccccacttttcttccagactaactttgtgagagcagcgatttgctcctttagcctcttggtgtcactgtctaggagatctcgtcaatagactttgtcatttaaatgactcctaaggtcattaccacatggcctcgccttctcactttttctctttttaatacttggcgttaagacgcctttaaagatctattgtagactaactgtcattgaaatattgttccctggtctcactgtccaagttagcagaatcactggagcagtttttccttcccatgggctttggtacttttgtaccagtccctttttgcgcaacagggcctaatagggcagaagggcgttcgagcttggaggcatcagtggccttctgcgcttgagaaggcttgttggctagattcatgtttttctgaggaggtacgaaagttgaagggttctgagggtcacctacttttgcttttcccattgtcttgtacatgagaaaaggttccagcatttgtatggtttttttttgttatttcttccgacacattcctctgaggggtcatcatttgaatctccctcttctagatttccaaacttagcttggagatgagccatgattctccccattctctaagaatatttctcttgatgggccaacttttgtttagtctcgagcaattctctagacactcaaactactttgaggtcctggtcattgtggtagcaatcatcgtaatatccatctttgacgtattctctatcgttatcttcctcctcattctcagcatctcggtcataatcgacgtcatcacactacttatcaaggttagcctctcggttgtaagagttagatgtatcccttctttttgaatcacaaggctgggcgagccctaaagccaaaggggttacatcaagccatgatagcgtcgagtaaaaaccatggtagcagcaacaccgtaggtttaagtctttcttcagctctcaatgaaagtaccaaaatatttaccaagattttcaaaaactaaatatttaagagcttaaaaaataataaaatacataaataaatgaaatggagatttttacgtggttcagatgttaattattcctactccatgagtaagtctattggcctcaaaaggcgtatgtgatatttttacagtgttttaggaggaaaccctaactctatattatgagtttctctttgcagaagaggatagtttagaataatattaccagagttttggctatttaggttgtgatcccccattcgaatggaaatagaaaggtatttataggctgtagagaaggtatggacatgcccatgacccacctagagtttttgtaaaaagcccactaatggggtaaatacatgcaaaaagagatgattgttgggcctcttggaaggaattgtgctcgtggcgttggagcagcttgacaataggggaccactgtacgtactggatgcatgttgccaaaagttttaaccttgaaaagtaaatgcctggaataatcatctagaaaaaaggtgtgagatgcgcgcactaccatgtctagacacaggagacttgatctaattctgtgtcagaaaaagcataactgttgatgggcaatccgggtttgtatccaaggtatacattcgcgatccttttggactatcaacgtccgcaataggccctttgagtactcgtctaggcattatttaggccgtctgtgagcttggaccagtccaggttccagagtggtaatatatctttcgtgtttgggaagctaaattaaggagaggtagactttcacatatctctcaatcttgacgtgtgtccagatgtatgaagtttctccgtgactggatcttattgagagattttaattagtgagattatgagactatctctcagtttttatgccatgtgtcacctgtttaaaaatacagatcacatcaaaaaaactgaaaccattcttcatatattaatcacacaatgtaatggcaccagaaacaaaaatagatatctaacccaaaacttagcacataaatatgccaaagcaaagtatacacagatacaaataatatcactgtatcacatatatacgccgaccaatataaataaaaataatcccatatatgtgtattgaataatataaattaatgcatcataaaaaaaagatagattccaagttgatgattttatatttgtcttataaatatgattaatttatgtagtagtatttttaaattgattttttaaattattgattagtgtgattttttttttttttttgaatattttaaagactaatcatgcatttggagtcttttggagggattttagcatatttttgttaaagatagtggaagtcggccagcttagttttacaaggcagaacttaattggaaattttgacaaccttaaaatcagaattggacttggagctcaacatgaaatttttatatctcgttcttagctttttggaacatcttgaatcgtccaatttcgagttgtattgaagaagttatgaccaaaatactaattaggtgacagaatttttttagcaggaagtcatgggcacgacgagctacctaatggtcccctttattacactattattgacaaagaacaagaataatactgctaagacagaacctaatcatctcaagattaagatcgttgatctaagatcagccattagagctttacctaaaaaagatattacggtaagtttacgatatctcttttgctgtaaatatcgatacagtctgatgtacagccaatatatctgatgctagtttactttactaatatcgtggaaaatacattccacttatccaagtgtaagtaaaccctatccctgatatcatgtcagtgtaaatctagtgcactaataaatcgtgggactaaataatttaaactatataatcataattattttctatcgtgataacatcacagtaactgtgtgttgggttttgtgccctaaataaaacccattacnnnntgattagttatcaatctaagaagtttgaagtgatttatgtttgcat

SEQ ID NO: 113228 - DNA, 5793 bp, Cannabis sativa
cataataataatctcacctattaagtaataatatttttttctttaattgttaattatattttttaaataaaataaaaaatacctaacataaaattagtatacgtgcatcgcacgtaaatttttactagtatacattaatgttgcgtacatacctttttgccacatttattttatgaggtgaatactattaactttatttatggcacttctaatgatgaaattcacatcaagcattttattttataagatctggaaaataccgtctatctcagtgtgtaacatcctcaaaaaggttcttggcaatggtgtcgtaatatcaagagttactaacaatagcatctaaattgacttttgaaacaacgacacactgtctctactttattttctaaaatatttcactaaaattttactttatttttttttattttaccgtatattaagttttctatctttcttgataaaagacgagaaattgagatataagactataagagttaagagattattttttttttcaaaaaaaaagagaaatattgttaaaataattttgaaaaatgaatagtatgctcaagatgtaaaaattgagttaaaatacacagagtaaatcattcgaaacttttgtgtaaattttttttagtttagctattatgagaaggctattgagctaagagtgctcaagaggagtattagacgaacatcaatggcgaaatcatacaatgaaatttaaagaatattaaatttaagattgcaggcagtttatgtcttaatccttactaaacatgtctggtttgaatcatggtttcaattcaagccagtatatggagaggaataaggatggttattttgatcgattgcttataagtgcttgtttgctttttgttttaaaatcaaaatcgattatctatttcaaatttgttaaaacgattcgtatcttattttttattactgaaaatcttaaaagaattaattctaatgaaaaaaaaaggttatattcttattagttttatttatttgaacaattcttactttattattaaactcataaaactatttgagtaaaaagaaagatcataactattagtaaacttgggaagcaagaatttggaaagtttgaaggattaattagatttgatttttgatcagcaagcaaataaacttgagcatcaagccatcaagttatgtagcaatttcatttttctgacagcacaagaaaatgaacacaagcctggcccattgcaaaaaatagcccatgaggcccaattactatcacgttatcttctcaaatccccataatccccataatccttagctggtggctcagaacgcataacagagaagcttactctttctctctcttttgagccttccttctcaggttttcttctccttttcgtttatcataaactcttttctgttttatatcttcatcacttcggattatattataatgtgtgtttgtgatactatttttgtgcgtgtttgttcatggatctaatcaaagtttaaccattttgcttttgcttcttggtagtctgatcttggctcttgacatatagaattttactttattatttgatgtggtgaccatttattttggagctctttattttgtagctaaagtgagtttatttaattgaatatatgtttctttactgagtaattgatgtgtaaatttatgatttttacaatggtgtagtagatatgttgctattttcatctaatgactaaatgttggaatgtcgtgagcattttattgcttaggtttattctaaaggtatatgatatataattatctgtttatttaatattttttttttggtgtctgcatattgcaggtgtaatactttcgttggtgatactcaaaaactagtcaagatggtaagatgtttttttaatttagtgatcttgaaggaattatttgctctatgcttgagaataatggacaaaaatattattgtttgtgcaggtgaaattcacagcagaggaattgagaagaattatggacaacaagcacaatatacggaatatgtccgttattgcccatgttgatcatggtatgtttatgttttactcaatttttccaagccctttctaagaaattgttaaaactagtgtagatgtataatgacgttagatttttatgggtctgtggttgaatagcatagtattggtcatttagtaataatctagcatttcaagttacatagtggaatttactcttcatttgagctttacttgatttgcttacttatctgaaatgtaatttcaggaaaatcaactcttaccgattctctggtggctgctgctggtatcattgctcaagaagttgctggtgatgtccggatgactgatactcgtcaggatgaggcagaacgtggcattacaattaagtctactggtatctctctctattatgagatgtctgatgaatctctgaagagttacgaaggaaagcgacaagggaatgagtacctcatcaatctcattgactcacctgggcatgttgacttttcatcagaagtcactgctgctcttcgtatcactgatggtgcacttgtggttgttgattgtattgagggtgtctgtgtccaaacagagactgtgcttcgtcaagcccttggtgaaaggattaggcctgtgttaactgttaacaagatggataggtgttttcttgagctgcaagttgatggggaagaagcttaccaaactttccaaagagttattgagaatgctaatgtgattatggctacctatgaagatcctcttcttggtgatgttcaggtctatcctgagaaaggcactgtagctttctctgctggtttgcatggttgggcttttactctgactaactttgccaagatgtatgcctccaagtttggtgttgatgagtcaaagatgatggagcgtctctggggtgaaaacttctttgatcctgctactaaaaaatggaccaccaagaatactggatctcctacttgcaagcgtggttttgttttgttctgttatgaacctatcaagcagattattagctcttgtatgaatgaccaaaaggataagttgtggccaatgctacagaagcttaatgtcaccatgaagtctgatgagaaagaactgttgggaaaggcattgatgaagcgtgtcatgcaaacatggcttcctgccagtgctgctctcttggaaatgatgatctttcatcttccttcccctgcaacggctcagaaatatcgtgttgagaacctgtatgaaggtcctcttgatgatgtttacgcaacagctatcagaaactgtgatccaaatggaccccttatgctctatgtatcaaagatgattccagcatctgataagggtaggttctttgcctttggtcgtgtctttgcaggcaaggtctctactggtatgaaggttaggattatgggtccaaactatgttcctggagagaagaaagatttgtatgtgaagagtgttcagagaactgtcatttggatgggaaagagacaagaaacagttgaggatgttccttgtggtaatacagttgctatggttggtttggatcagttcattaccaagaatgcaactttgacaaatgaaaaggaagttgatgctcatcctatccgagccatgaaattttcagtctcccctgttgtgcgtgtggccgtgcaatgcaaagttgcatctgaccttcccaaacttgttgaaggtctgaaacgtctggccaagtcagatcctatggtggtatgttctattgaagaatctggggagcacattgttgctggtgctggtgaacttcatcttgagatttgcttgaaggatctgcaagaggacttcatgggtggagctgaaattgtaaaatctgatccagttgtctcattccgtgagactgttcttgagaagtcaagccgcacagtgatgagcaagtcgcccaacaagcacaaccgtttgtacatggaggcaagacctttggaggatgggcttgctgaggccattgatgacggtcgtattggtccaagagatgatcctaaagttcgttccaagatattatccgaggagtttggttgggacaaggatcttgctaagaagatttggtgctttggccctgaaaccactggtccaaatatggttgtggacatgtgtaagggagtccaataccttaatgaaatcaaggactctgttgttgctggattccagtgggcctccaaggaaggagccttgtctgaagaaaacatgagaggtatttgctttgaaatttgtgatgttgttctccatgctgatactatccacagaggtggaggtcaacttatcccaactgcccggagggttatctatgcttctcagatcacggccaaaccaaggcttcttgaaccagtttacctggttgaaatccaagctccagaacaagctcttggtggtatctacagtgtcctcaaccagaaacgtgggcatgtgtttgaagaaatgcagaggcctggtactccactctacaacatcaaggcatacctaccagttatcgagtcattcggtttctcaagtactctaagagctgcaacatctggacaggctttccctcagtgtgtgttcgaccactgggatatgatgatgtctgaccctttggagcctggaactcaggcagccgcactggttgctgatattcgcaagagaaagggcttgaaggagcaaatgactccactttctgagtatgaagacaagctgtgagttcaatttcacatccattaaaagcctcaaagagcagattaatatgcttgaggataaactataagattaagtcaataatatctggaatagtagccagtgtgtattttttatggtgtcatcgtgtccttggtagttagtttatttaagttgcattggttttaaggagttgttatctttggatttggtgttataaactgcgtacgtcttgcatggtttatggatttggtgtcagctttggcgaaatatgtattctcctcagctaattatgggctatgttatatctatcgtattaataaataaaattgtttaaggtaagttattatttaagattgtttatcaattatgtttaacatcacttctaacttttcaccttgacaaatttatgcttttatagcattatcatatatgatagaaatagaattgttttaatttattggaatttattttctttttttcacccttaaaatctaattccaaattagaggaagatggtcgtaaaacacacaaaatcttcttcttcttctcgtaggagtgtggaaaggtatcaaagtccgttttctagattaatggtcattaaatcaattcatgtggatgcttcttttggatagttgttagggaattggcattgtctaagtttcaacaggtgagtgattgccttttgtttatggatttcattaacagactagctgttgtgtatgcagtatgctttatagagtaaagcctctgacttagtggattctattcctgcccgtaaagttgttttttcctaaacaaaacttccaaacttaacagctcttcactttctcccacccacctacgcctaattcctaatgagaaacttactgcagataggagccactttggtacttttcacaattactcaaatgtcattgttgatttgatttatatatatatatatatatatatatatatgtaataacaatgagttattaagtacgggacaattccactcaataaattattcttcttcacacatctttaggtaggggtgttcattagatcacatccaatggatttggacccatccaatccaatccaattatttattgaatattggatttt

SEQ ID NO: 113229 - DNA, 1026 bp, Cannabis sativa
  modified_base (961)..(961): a, c, t, g, unknown or other
agcctaaaacaaaaggaactcttggagagttcagtgtcatgcaaaggagcacgacccagctccctaaaggaaaaaaagaccctggcccaactccccacttgaattaagcacgtgacccataaccttctacgaagcattacccacagagtcaaggcccaacttaccctcaaaattaaaaccacgacccacagacatcccaaaagagtcatgacctagattcccataagacaacaaagcacgacccaacttcccactaggcaaaacatcacggttcaggtgctccctagatagatctccacagcccaaatccagttttgaataagaaccacaacccaccacctgctcagacccacaaatatcaaaagacaaataaggtgtcaagttgtcagaattattggcaaactagcacctcccacctcccacctttagcaaactagcaagaatctttccattatgcattgtctacttagaagaaaaattatcaggaatggccaacctcatagtagctctacatggcacagatggctccttgggcatccaaacttggctaggcctggagctacctcgacccatcattgtcgacctggactcaaagtttgagccgagaggtcggcacccctaagcagcctcaacaatcatagcactatgcttcaccaccatttctgacgatggtggccttagagatctcaactccagcgttgaaccaccattgctttttccaagacacgactcaacattttcgccaagaaacaactcgtgtaagaagatgagacattcatccaaggtccaaatagaggaccacttgcattgcatattatgattggaaactgaagcgaggaaccccttctttggcgacccaaccgcccacactgataacaaaaatttcctaatctttcatattttattttcacccagtaggcctacccatttgtgagtttaaatgtaacaccctaactatctnaggcgtattacgtgatttttgaacgtactgtgcagctcgttgctagtcaacgaggtttatggaaa

SEQ ID NO: 113230 - DNA, 5090 bp, Cannabis sativa
  modified_base (4408)..(4409): a, c, t, g, unknown or other
  modified_base (4476)..(4495): a, c, t, g, unknown or other
ggtaaaatatttccaacacttctatggtgaacctcagaggagtttgcatgggaattcatggagaataattagacaagtggctgaggagtcttctctcccatagtgtttattgggagatttgaacaatgttctgcaccataatgataaaagaggaggtcatccctatcctaattggttgattcaggggtttcaagatgtttctgactgcaactttattgatatggacctggtgggttacccgcacacttgagagaaggggaacgacatttctgcttgggttgaagtcagatgggaccgtgctctcatcactcgcgcttggaacatgttgttccctgatgcaaggttagaaaatttagagatttctgcttttgatcactgtcccattcggttgaatcttaatttgttcaaactggtggttagtttaaagaaattttattttaaaaatgcttggatccgttagcctatttgtcgtcaaattttgcaagataactgggatccctaataaataaagctttgaatataatagcctgctttcggagcctttcatataatgactccattcaattcacaacagtaaccggccctgcctgtacaacaggggcagaagccacaggcactacacaggtttagcaggagcaccctactgtctcaagtgtttgatctcttcatcttgttcattgattctggcttgcattgtggcaaacttgttctcctaattttgggcagcttgcggtgggttaacatttccccgtccgtgtgccctacctcttgggcctctgcctcgaccacaaatattcgggggaaactgaactccttaactgccactggatccaaccgaattaccctagcttctcgtgctccacctggcgtccattctaatagaatagcctgcaaaaccaagagctagcctagttagattgcgatcaacaataaattactaattaccacttacttgagaaaatgaaacatgtgcctaatcagctatcaggctactaacatgcttttcttataacatactagtaaaataaactattgaagcaataaaggcttactaaaccgtgagtcgagcttatctctgatgatgattgtacatatcgtgacgatctttgaaggaccacctggcggctttgatgccaaattataataccttactagtttaggcgtgttaccgtgattttatattaattatccaatctgttgctaattaacgagtttattgaaaatcgtgattaattaaaacattacttaattacccttaaattgaaagtaaacaactttttacatagtatgggatcccgtacttaaaatatttgcaaacgtaatataaaatactcgatacaaaagttgtcgcctagcgcccattcaaaatatagcctgctgtcctaaagatcgtacgcaccaggcctaaccgtcccgacatgtacaatcttcatctgctcgcactcactgttgtttagccttagctttgcccttatctacacatgaaaacaataactgtgagtcgatagactcagtaagaaaagcataatcataacatagatataaaccagattacaattaggcacccatacacccaatcattaccctatccctgcatcccacgtaatactgagtttagaatgttcgtacgatagtactattgaccataatattagcttatactcggtactctagtcgtaccgatgtgatagcgtcgattagtacttaagccaaacatacattcattagtatccattataactctatatatactgatactagtaatccaatgtaatctaacaggcaatcataacacatgcatactatgtattcacatatacatgtcattatacttgtcttacctcgattctgaattcaggtgtgccggtcaacttgagtggaattgctgctcgacggtttataggcatctaagtcacaatatacgtaaaactgataagtgatacactaaatcacttttcggggacattaaactcgaaactaaaagttttcctatcgatatctagcaagacaaagtcctaagcatcaagaaaataagagaaaaatcctaaaacagggaacctgcctaaaaagtaataggtcgtttccacagaaacgacctgtcatttttcactacagaaaaacaaagaccccccatttcgtaccaaaagtaccctaaactacaccataagcttcagaacacctaaatacaacataataaaccatttttaagtggtaaagtaaaaagtaacttgaaattacaaaatctaccatagttgagccaagtttgagttcttgaactcaaacttgctcagcaccaactacaacccttaaatctaactcaacaaagcctaaaccaactaaaattaacctcagaaaacacaatcaacataattcaaaaacctacagaaccctaatcctcaaaattgcatggatacaaagcttaaaaaccataaaaattgaaaggaaaggggggagggagcttgcttaccttgagttggttcttaatgatcctaccaaatctagctagaacacttaaaaattgagttgaaaacctaagctttctgctgggtttcttgagaggtagagagagagagggtgttggagagagagagagagagttttgatttttttttttctaattttgaataattgataaaaaaacttaatgtttatctaaaatattccctaataaattcagattattaactcaacaatgatccactaatggacaaaagccaacataaggcaaaagactattttgcccttgcttaatcaaaaagtaaccttgtcacttaaggtcattttgttcaaatttaaactacaaataatcccaatattctcaatgtatatctacattgtcccgctattctaaaagttactaaatcatactaaggtgactccataggccatacgtcacgtttcactgttatcgggcataaaaataatgagaaagcgtaaaattcatatataatataaatagcatacctagaatttaaatatatcttcgaaatcataaaaataataatttaaagtccactagtaaaattagaccctaattatctactaattctcatactaaaattaagcagtcattacactaaagttgaacatagggaatcaaatcatgatcatcattcgatggtgatcaatgtgaatgaaaatgagcggtcgagatcgagagtagtggaaaaattgccaaggtcacactcgacgggttactcattgatttaacttcgagagtatacataggggtacatgataagaatactaaaagaagtgaggagacaactaaagattaagagtggaaataagctgcaactgaaaattgaagtggggagtgttttgactaaataactcttttttttttcctatatatttcaatgaatttttcttttaaaaaaataacaaatataaataataaataaataaaagacgggggcaagtcaagtccgacctccttaacttgggtcacctttttttttatttatttattatttgtattcttttatttttttttaaagaaacattcattaaaatataccaaaaaaagaaaaaaaaaagttatttagtcaaaacactcatctaagggtgttcaacaaaatttataaaccgttaaaccgaataaaccgcccaaaccaaaccgaataaaccgataaaaaatacaacccgaaataatacaataaaaattcaaaccgcccaataaatatattaggtggtttacaaattattctaaaccgcccaattaacctgaataaatagaattaaaccgatgtatatatatatttttaataaaagtgtatatattatattacgtaaattatatttattagtcaaattattttgtatttaaactttagacattttagtgtttaacttaaaatttaaactttatagttaatagcttttattgtatttggatattgaagttgaagcttaaaatttatcatattattacttttttttattattattttattcagctattttatgtttactcaattatatttattttattttaaagtttttaaaattaatttaaactatagcattttttaacttgaaatataaataatatatttttatttttttaaatctgattatttgaatactaaaaactaacaataataattatataaaaaaaagtgaataacgatttggacgggttaacccgaccaaacccacgaaattattagacgggttgaactttttctaattattaattgggtgggttaagattaaatatttgcaaaccgatattcatattgggttaataaaaatatactataaatcgaccaaaccgaccaacgtacacttcgacttcagcttattcccattcttaggtggcgtttggttagaaggaatgaaaatataagaatgagaatgggaataggaatagaaataggaattgaatggaataaaatttaaaatnnataaaaaaaattgataaaaaaattcttaatttttttattatcatacattggaatggtctttccttcnnnnnnnnnnnnnnnnnnnnattccaccaaaatggtagaaagaccattccattaaaatgacattccaacactttaatatgcagtcaaacaaaataatagaataaagattgtttcctttcaattctatttcattacctccaaccaaacgtcaccttaatctttagctgtctcctcacttcttttggtataatgcttaaccccggtcaaacctgacccgttcgattcaagagagctattgggccaggctagatcaggccaaattgttagggaaacttacaaaaatactgaaatttgggttaacttttacaaaaatactgtcacacaaaaatcttttcaaaaatactgtatttttataaaacaccagtaaaacactagtagaacatcagtgaaaacttaacacagtatactgcagacacagtaaaaaagtaaaaaatactgcctggcattatttttgtaaaaaaatggcaaaagttagtataccatgtaaattccccaatgaggaaattatgtagaatattgatttttttcttcaagtttgataaatatggagaaattatgattttacttaatctatggcttttttctaatttaagttagttgtgtggaattatattt

SEQ ID NO: 113231 - DNA, 1973 bp, Cannabis sativa
agattagattgtaatgggttttatttagggcataaaatcccaacagtcttctactcctagcctttctcatatcctctaaattggtctctgatttcgaatgataaaggaaacgtagctccaactttatagacaaaatttgagaagtttcccgttttttttttcacaacagtcgcgacatttgatagagagtcgcgactctctcatttttttttatttcctactgcgatgatagatattattttcgccataactctctccatgtaactcagaattggatgattcaagttgttttggaaatttgaaagagatatctagaactttcattctgaaagtttttcctagaagtgaatggatcatagttcaaaattagcttgaagcttcagactttattttttatcacaaacggggcatgttgaacgtccaaaacatacaacttttcgcccattcacttcaaaaaaacagacaatctcagcaccccaatcttgaaagttctatgtgtctttgccgagatagagtcaattctcggcaatttccataataactgatgagatagaaggtaatttaaaaacaaaataaaaaaagtgagaaattgggccaatctcgacaggtgcagtgtaaattgtcgagataagatgctacgtaccatatcttgacggtttacaatggagtcatcgagattggcccaaataatatagctaaacgtaatcttgcctagttatctaacccacacacacaccgttcttcttcttctcctccttatctgcgattttatttctccttcgctacaattttcttctccatctagcttctgcatctgattttctttttctttttcaacaagcttctcttacgcaattcattctcgcaactgcaaattgaaaaacttgttctccctcaaaaatgggttttccaaaccaccctttctcctttgcaacctccatatatctccttcgaagctttcatttcaggtatgggtaaaatatttatgtgtatatatatttcttttatatattttaaaatattctcaatctctcagatttgagattagattcatcttcgtaaatatataggtattggcactactacaaaactgctttttcttgatatttttaaatagtcatgtaaagtatttccatctgtttatataaccattgcctatacgaccgtcgtaaaatgagcagaataagcaaaaattagaaatagtcaccaatttgaagttctcgactattttaaatcgtgccatatagtacaggtgacgatttttaagtttaaactgtattttttagtgacagtttttttttttctgacgttacattagaaaaataggagagatatgcagatattctgctattttttcccctacattaatatttaaattttttacaaatctactaacgcttatataatctaaatatatttaaaaatctatatagtaacaataattaaactaaagctaatatcatctaaatttatttaaaaatttgtatagtaacaatcattaaactaatgctaataatcatctaaatatatttacatatgtatatagtaacaataaattgagatagttacactgatcagtatggcaatcgttgtcgctccacttctactttcacgtgaagaatctaccgatcacgcataacatttatcttgttatttacgtacaacgtggagaacttacctcataaaataaagttatatattaattagtaaaggcctgttatcatacactatttaataaagaataatatttattataacaattattaactattttaccggttgtgtcaattttggtattggatctttcacggtcatgaaactttcattgaatttcatgacgtaatatccacattatttaccgtctggttgttctggacatatacgctattttttactctctctcaacataattgaatttcatccatgattttatgttcaaaagtttaattctcatgatttgtcagttcactgga

SEQ ID NO: 113232 - DNA, 1673 bp, Cannabis sativa
aaaataatttccaacacttccaacatctaattatgacaggtatgagacgaattttttgaaaggaaatgcttggcctctcatcacacgattggctagtttctcttaactgcttcgattccacaactaaatgcaagacctcccccaagtccaaaggctctattaattggagaatcctcgactgagaatgttagcaaaggtcttcagaaagtttcaaccaaggaagtctccatgcaaagtctaactccctcagttctcaatcactcatctttctccactataaatgctcatgtgtcattatcactcttgttgtaaccactttcaatctgttggtccctcgaaatcaatcacaaggccaatagaatcattcaacaattaacttcgctgatgtttttgctcttgatattggagaatttcaaatatcataactaattgctagttttcctcctgatccatcattgacaacccctaagaacagtcacaatttaacattgtcaaatcccactgctgcctactacacaacaacgacaactcccatcattgctactacttttcaaaatggtttgatgttcaattctacctagttggacaatcaagagaacttacaccccaatcgtctattcaacctccatttcgacaatacttctgtacggtaaacgcttaaacaatgtcgtgtaattgattcttccttttcgtctgtggaagtgaatcacaactataatgtttttgtcaagatgtttgattcatcttgttggcatgcacggggtttggagaatccaagtgcattctgttgatttcatttgctcgtgtgtgagaaaactcctcaagtattgtttcttattgaaatgaaaactactgctagtgtacttactcgttttaagaaatctttaaattttaataatagtttagaagctctttgtgtttgtttgaaatggggctaatattgttatggcatgataatattgatgtaaccctcttatgtatgaatataaataactttgactattacttgtcttttgataatggcccaagatggaatttttcttcaatttatggttttcttgaagctagaaacaaaaagcatacatgggaattgattaaacgtttggctgatgtatctccccttgatccatggctgctcataggagattttaacgagattttttcacaagataacaaaaatggagggcctctttgacatgataatcagatgcaggttttttatactatcattaatcgatgtttcttaattgaagtgacttactcaggatcttattttacatggcccaaaaatagaaagaacccaaatgccttggaggaacgaatttattggtgtttcaccaataatatttggaatgacactttggctcctcctaaagtttctcacttggattattatggttttgatcatagagccatttttgctgatattaattttgctcccaactctgaaccataacgtcgacaatcttggtttcgttttaaaaaattatggttgaaggaaaatgattgtgctgacattatttctagctaatggcaatatgattgaacttgtttcttgcttggatgagggtgctactagttgacttcgcttttagccaacgaaaatgagtctattttataagcgataaatgatttataataatagatatacgataaagcaatataaagacaca

SEQ ID NO: 113233 - DNA, 2147 bp, Cannabis sativa
ctggtaaaataaatttcaacaatttgttcttatgaccataagaattcttggaattcttaaaatctttcttgtcatttcttccttgaaccatcaaaccttctccactagtctcacccttctcttccgacttcttttgagtttctttagagttgagagcagttttcacttctgccatggttaattagtgtatcctttccatacagtatattgttaacaaaatgctcataagatttaaggagagaaatgacaagaattatactttgatcttcctcatcaattttcactccaatgttggacatttctaggataattctattgaaatcgtccaagtgcttcctcatctcctctatctcatctattcagagtcagtctaactttttccttagatatagcttgtttgctaaagatttcttaaggtagatcgaggccaatttgtcccacagtgtagcaatagtttcttcatgagagacttctctcaaaacttcatcaccaaggctcaaaagaattgcactatatgctttgctctttgtatctttctttgtcttttcatcttatatgttgttcaatttagctacactcaaagcttcagagattccttcatgaacaaaaagagctttcattttgattctccacaaatcaaaattattttctccaatgaacttgtccacctcgcatcgttcagatgacattgtcgtgtttcttgatctttaaagaacaagttcttgatttttttttaatatcccttggctttgatatcacttgtagtgaatgtaattactctcaagaacaagatctaggaaacataacaccaaacaaattacggatttagaggacaataaaaaaaaacagtttgtaatctaaattgtgatgagaacaaatacaaattaaatgcaaaactagaattgaattgcaatcgacattaacagcaaagagactcttatttgatgattgaaactagtacatgagaggactgaacaagaagagttgctaatctgaaattacacaaaaactcactctgagggatcaagatcatacacacttgatcccttacaagcctcaaaacacattgtattcatctcgctcttacacttggatttctaatctcaatcataagaataaaatatgtttacaaagtctaatttatagtaatgggacagtcagaatagcaactaactaaccctataaagagagttgttaaaaattgttaatgacacatcaacagggaaaaacttaaaaatgactaaactaaccacgattatgaaatattgcgtcttgttatgtaataaaaaaatataaatataattgactttagcataaaaaaataacaaataagagttgtgattgacaaagaagtgaaaagaaaagaatgtatcaaagaaaaaataatttattttaattttaaaataattataatatgtgtaccaatataaataagtatgtgatcacgtatacaagagtgtacacatagtccttcatgttagtaattaattgtatggtaaatcgatgatatcttaaatttgctaacggtttagtagttcaaaaaatttactactaaaatttgagcttagaggattaaatgcaagttaaatgatagtttgaaatgatttgaccgccaaaaactctattattatattctatttttgctaaaattttcctacaaaaatattattatatgttattttttgaaaaatataaatttaaattattatttaacaaaataaaaaatctaattaataatttttccaaaatactatatactcttaattatattaatatactataaaaaattattgtatagctcttttactagatgtatcaccttaatgaaaacaaaaaaaaaatggaaatttaggtaatcagctaggtcattataaatactaataaacaaatatttatgatcacaataatcaatgtaatcatatatatatatatatagtatgaaattatgtaattttatgtggtaaatattattagatatgtttttttttttttgagtaaaagtagaaacttcattaattcaaatcttccgaaactaaggaaacaattacaaaaggtaaagataaactattaaaagtacgatcagcctcaagaagagaggaccgcgccaaacaatgcgcaaccctattagcagaccgcttaacaaaact

SEQ ID NO: 113234 - DNA, 4319 bp, Cannabis sativa
ctcatatccaaacacaccttgtattttaaaatatagtgtaattactaaattgtgtaattaccaccctagtaatcaccctacctagtaattacacagttacttccaaacacaccctaagtgtttcacaagattctctctttgagtgttctctctctgaatgaattttgtgtccttgaatagtgagatgagcccactatttataggaactaattacatcaaaatagtttccctcaatcaataagagataaaatgggaagttagcttattttctataattaattacttaggtagattttcctttcttctctaatgatatgaacttatctcatgaatttagggatagtgctgtgacttgcaagcatggagatatataagatatatctctgaaattgctaactcgcatcccctggttagtgcatgtgaaccacctacttaatggaagctagtaaactgtctatgcaaactatgcacggatgtcacaacttctatctgtgaccttgagaattaacccttcctgtacgactcactaagagtaggattgtccgtcttggttatagaatgtcttccatgtgtcacctacatggatgttgcatcatcgtgcagaaatttggataacatttacctccaaatttgcgggggatcttcttaatcgcacacgaacttactcggccacgaagctaatcagatgggtgacacgtgtctggttatcatctttgatacgacatgactaatcgaatgtctcttcgatgtttgagatatttaatacatgtcttgaaagctgtgttggtttttatggtccatatgaaagttagaaaagcagaagcagatttgatataaataatttttatccaatattaaccataggcctaaggatctcaacataatatatatagattaaatctagactaatgaaaaggaaataatacctcctgtagcctatcaggagatcctcgctatcatttagtatgattacgatcatccaatcaaagaactattattgaagaattcacactgcaatcttccaagccagtctcaacaccgaggaatagagtgggctattagattctataggatgaacaaatttatgtattactgtgtattctcaattcatgagacactgtaattgagatagggtagatcacaatctcacaccacacttaatggtgttaggctgtgagatgaggagatagagagtggcgtgcaagatagagaatgagggagtgaaattcaattcctattttctctcaacttgttactgtatatctgaggttaagttgtcttgtttctttattataacatatatcatatatataatgttataaattaacttttttaaaataaaaaaataactcatttgatttgaattcaaatatcaaatttaaatataaatatttaataactgattaatataatcaattaaatctttttattttcttattatctttttaattaaataaattattcaataatatatttaatttaataatggaaagataattaatcaatttaatttgaattattttaactgataaaataatcaaataaaattaacacaggcctttatatgtcaccctatacgtatgggctaggcctacatgtgtgggctatattttaaggtccaaaattgatttatcaattttgccatattaacacgggcctttatatgtcacccttggttcgtggaagcccttcagctatagagcaaaattaaaggacttcaatcgaaggaggattaatttggcattctccattaaatgccatgtgtcatatcttgcagaaacacaaataatatttaccccaagctctcgagacgtactacggtccaggagcttgtagtactctcccgcttatgcatgaaaaattcttgacacgtggtgctggttgggattgcttctaatcccacaagctgtcgtcagttaatgggtcaattactgattactgcatgtgttattagcatggcacatggacggtgctttaactgttgttgttggcagtactcacgcgtgggagcgtgtttcttgggaggagttacgacgacgacaagttgattgagatgacccttctttaaataagtgcattacacgagacatgcaatgacgaacgttaaatttttaggctgatcattgaatgcaacctttttaactcccagtccattggatcaaaagattcttcttggtaggagtgatttgggccatttatttcaaattgcaaagacttcaaccgacgtacaaataagtttcatgagcctattcaccccctttcatcaccttcaaccttttgaaatccctctgcatcttctaaccagagcacgtaaatcctaatttgcttcaccccatttcagacgataactctagcggtcaggctagctataattgcgcgatagactgggtacaacacacctgagccaactcgcacgacatccttctctatttttttccactatctagtaagtacctcaacactcttttgactttgtgcaatttcgtatctaggacagaaatgctaaattctagttgagtttagtacatacgacatgtttgattgatagaatgttttttgtagaattatcaggctggctcaactcctccatacttgttaagagttattaaggatttgagggggtctaacccttctgtcaagacggaggagacgtaagagaaaagtgcggcaacatactggaatgcgagtgcactgagggcaagtcctttcggaaggggtgacctactcttctgtgtgtgcactctcagaggtctgccattgcctgctatataatcttcctgactttataatttcgtaatggttcgcttatccagtgttggttgtgcttgcatgtactctttgaagcgagaatgctgggctcagtgagagagattgggtcaaaaagcttcactaatggaggaggtcccggaggaaaaaggaaaagacaggacgacatgttccaattgtgtctcctaaaggagatggtgatcctcggcgagccaacatttcaactccacccaatcagtcgttgtttgtccaacaatatcccatcaacgctaccgccaagagcaccaacaataataacgaaacccgcatcaacaataccaaagcaccaaaaatttattttcctgcctgagatcccttttgtgggctttaaattccctatgaagactgttccccataccttgctactatgcagagagcgggggaggccgagaatgccttggagaagtggcacgaggaggaaaggaggattttgcagaagagagctaacatgctctcgaccgtgaagagggccaagacttttgatggcctctttgcaaccatcccaactgggttgatggtagacatcgaggctctacagaagtgactagcagccaagttggggagagaaactataccttttactgctaaactcttagacgaagtggatagtagtgcattcgggctgtccttggaggcatgggcaacttgcagtagtgttgatgcatttaccttgacccatgccgctaaacaacaagcaatgggggtaaactatgactcttccttccttgttcccgctgttgtatattattttcttatatttcattattgtatcaggtggccttgatggcagagaagaccactaaagaagtaggcacctcgcggggtccattttgcaacgcttctgtcatactcttcgcacgttaggatctatgttcaagcgatgacacataacattaggtagtatttcgaccatatttgaatgcttttgaagacatctagattttgtttaagaaaagttacaagcttttctcactgctgaaaagttagtttagagccaatttttaacactttaaagttattagaagaatcgattggtacctcaattgtttcctctacggcttgcgcagtgttggtatagtcaaggattctagggtccaaattgagtttctccacatgcggtactttctcggttctgaatgattcatgtcgaggtggagaggccttgagcaagtaattgacatttattggttttttcttttctgtaactttcaacgcagtattataacattccctcaaatctgcctataccctttgcactgatccatacttgcgggggtagggaatttcatagtgagtcggtaaattgaggtgactattttcatctccttcaaaattgggtaacctattactgcattataagcagaatgctaatcaattacttggggtgttcatcaaattgctcaaaccactcaaaccgcctgcaccaaaccgcaccgcaccgtaaaaaatatacagtttgaaattctttgcggtgcggtcacggtttgaatttttcctaaaccgcgtggtgcggt

SEQ ID NO: 113235 - DNA, 2577 bp, Cannabis sativa
tatggtataacatttaggtttagaaaaataatattagggtttattatgtatagaattttaaatttccctattttaactaacgaaaccggctatagtggttaatatggaaaagagagagaagaaattgaataaaatgtattcttattactgaattaatgagcttcagttctatatataaatataggttcaatataatgtaggttgaactaaactaaaatttaaaacagttacaactaataacggtacaaaacaaatttcctaattaattctaactaacaaacaaacaatttaacaacctttacaaactgagttgagataaggaagctagactcagtttatctcttaaacacttgaaacaaggggcagagagagctttatttggttaggacattatttgctatttgatcttgagctggagtatgcttgacaagaagttgctgattgagaattcattctcgaatgaaatacaggtcaagttcaacgtgcttagttttcgagtgaagcatatgatttgcaaacatgagaattttgctttgattatcacaccatatggtgaaaactagaagtttttggagaccaacttcagcaagcaaagattgaagccatacgatctctacagtagcattggctagccttctatatttagcttcggtagtacttgatctagagactattttctgcttctttgagctccatgaaaccatattcaatcctaagtatatgtataaaccagcggtacatcttttatcatcagagttcgaagctcaatccatatcacaaaagcctatgagaactagtgttgaaggttttaagtgtaatccatagtgatctagagctccctttagataccttaagattttcttggccacctttaagtgagattctagaggtttatgcttgaattgggaaaccttattaacaacatatgcgatttctaaccttgtgatgacaggatattgcaatgctcttgctatgctgcggtattgatgaggatcaacaacatagacactgtcataccccgataactagaatttgtacagtccatctttgcacgacataacagatccataatatacttcttttgacacacatgcagacagtgtcaagattatgaacttgaatataccaaggaagtaattaatggtcttttaatgcaaaagttgcattaagatctttgataagagtgttagaattcccactaaacttcatgttatcagaatgtcatccacatatacatgaaaaggaactgatcagctcccgcagaagtgaatctaaaagattacagagcacgtctaagcttgtcaaatcaggcccttggagcttgtttcagtccatacatggccttggttaatttgcataccaaactaggagagtcgtgattaatgaattttagaggttgagtcatatagacctctttagttagctctctatttaaaaatatattgtttacatctaattctcttattgccatccattagataagacaattattaaaatgactcttatggttccttgcttaatgactagactaaggatgtgtttggaaggaggaagacatggtggatggagagggaaggagggagaagggtggtgggagatgaaaattcatttgtttggcatagaggattgtcggagggagaggagaggtagaatatttacagtccatttgggcccaccattttgaatccttcctcaaatggaaggatttatactcttctttctaatttattttaaaattacaaatacactatcataaaaaaaattataaaaaaataaataaatggataataaaatgattttataagtatatagtaatttatccctccacctctccatctttctttccaaacaacttgaaaggataactaccatactctccctcccttgtattccttatcctccctcaactctccaccatttattctctccatccatctcaccaaacatagtgtaaaggttttagtaaagtcgtactgttgccagaaactggcctttagcaactagtcttgttttgtattaagctactatgccatctggattttctttctccctaaacacccacttacagcctatgccctatcagctaaagtttatgctttaaaaaatctctaaagacattttaattataaatagtagttgaacattttaatatatacttgaatgttaaattattaatatttcatattgaataatttatatatattagaaaattcattattcataactgaggttgtaacttgtattgtacagagaattaagattacttagctatgaataaaataatcatcaacctatgctccaatatatgttcagttttctttcgttgttctactgttatttttttgttaatctgcttctttttatttttgatgccttctcttgcatttgctgcatttgttatattgtttcttttcacaactctccacatttactgtatttgttatgttgtttcttttgtcagtcagcttccatctttttttttggctgttgtgatattttgcacacgcaagtgcacgtatcatgacaagtagtaaactcaccaagagtgaggtcgatcccataaggattgtagttaag

SEQ ID NO: 113236 - DNA, 3144 bp, Cannabis sativa
  modified_base (2378)..(2384): a, c, t, g, unknown or other
  modified_base (3082)..(3097): a, c, t, g, unknown or other
tttttttttttttagataaaacaagctgctaaactcgtgaaatagaagtttgacagcgtgggatgagagattagtatttagtagttttttttctttcaagaaatagtatttagtagttgagccacgtaatcatgtaacacgagttttaagattagaaatgatgacgtggcgaccacaggcgataaaggcagagagagagagagagagagagagaacacgctatggatgagcatttaacgggcggtggatgacttaaggtagaccaaaagtatgtaacgtatctgacccgttttgtacaacaataaaactttcaccaatcatatctcaccacgtcatcactttccactagacaataatgtcctcacatgtcaacccctaaattaccaaaatatccttaatgaatataagattgagaatttggtcagtagtagaaagaaatgtgtgtgagtaaatgagcagtgtgtgagctataaagagcttatttcattacctcaacaccttcctcctctgccttataaccttcttctatcctcttcaacttttttttctggttttagagagagaaagatgggaaattgtcaagccattgatgcagcaacactagtgatacaacacccaaatgggaaagtagagaaattgtactgtcctgttagtgctagtgagataatgaagactaacccaggtcactatgttgctctactcatctccaccactttgtgtcccacaaaaccaaccactgacaagaatactactactagtaccaccacaaccaccaccggcgccggaaccgggaccggcggtaacggctctgtcaggttgacacgcattaaacttctcaggccaactgatactcttgctcttggtcaagtttatagactcatcacaactttttttttttattattttactataatgttgtgtttatttattttttttcttttggttcagttggtgggtttgggttataatttgttatttcgtttggtgcagaggttatgaaaggattatgggcaaagaaacaagcgaagttgaagagaaacttaagccagtcagatggagatatgagagtagagattgttggtagagaaaaaccaggttcagtgccaatggagaagaacaatcaggtgagttttcataaaaaaaaaaaaaatcattatcttaatttctctagattgatgccttatggtgtttgtttaagcacagattagtttattttagttcttcattaaccccatcttgtgtgttttacttgaaattaaactcctgcatttatttgccataattaagtttctgactaattttaagaaggtttacacaataaacaagaaacttttattttggggtctaaatttaattattaatgaatcagcataatatcagggataataattattagtcctccttcctatagtaacggcttgataataaattaaaaaaaagatactaaaaaattaataatgaatgctccagctatctcaagttgtgctaatatattagtaaatgatgaataaaaagaatcaataatatgattgattgagtcagatattcctttacttactactattttcattcattcatgaatatgaaaagaaacaataccaaggtctgaatctgtgttttcaggtaataaaacatgagagacaccgaccaagatcagcatcatcaggaacagcctctgctattgccagcaagccaagaacatggcaaccctcattgcatagcatctcagaaggaggaactccaagcctacagatgagaagaaaccaaacaaccccttcttcttcttcttcttcttcttcttcaaatagttgaattgttaaaaaaggacgaataattttagtgtcgttttatcaatccaaggaagagactgtcatggcagatatttgcaggagaacacagaaagagtacttgagtacttatactgagtgagtgagtgagtgagagagagagagagatatgaagagggtcttaaaaactctgtgttgttgatgaggttgcagatctgagtgtgagttgaatagttaattgtgcataggaaagagtgtcattcagtttccaaaactaaaatatgaacaaaaaagactgaaatcaacactatactactggctttcatctcatacttggatggatttgttgtcctttctagtttgtgaaccttttcttttttgtgtgtatattttgagctatgattaattagagcattcaaactgtaatccagataggttactcactgctacaaatgtttaaagattgcaaattcaatcttgacaaaaatatagtaattcagattagagatgtgttttctaagtaacactgttgaaagatcataaaaaagtactgacttgagcaagtgtaattctctcttttttttttttttnnnnnnntttctttttttttttttttgggtggggggaaagaacactaaactgcatttgttttcaaaccaccataatctatctcaatgtttacaacctcttgttttatggaaattgttttcaagaactataaatattatttatttctaccatattcaatcgttgtagaatctattacgtttttgtgcaactccagtaaataaatatcacatcatatatgacacttaataaaaatagtctgcttataaaatttcctattttatattattaacattaataactaatttatgctacaaaaaaacattaataactaatttataataatataattatagtcaacaaagaattacaaattaaaaaaatagttaaaatgaaaaggaaaagttattggagtaaaatgatgttaacatgtgaaaattccacacgagttgcactaaaatacctctaaaagagtaagtttccttgtaaactaaacattgcattttatcaagagtctatggattgattctcacatttttcactaataaataataaaaaatataattttttagttaaattttttctcatagtcatgtacgttatagttatttaagatatcctgtaaaattttaaaaaatttagaaagtttaacccgccgaaaaatatgttcaaacggtgtgttgcacgagtaactattttattttatatgcgtgtaaaatagactgttnnnnnnnnnnnnnnnntattgtaaattattctgaattttacaaaattttgtaggttatcttat

SEQ ID NO: 113237 - DNA, 5160 bp, Cannabis sativa
aaaagaaaagtgattaccatcatcatcaaacatttgacacttgtttcttctttgaacaacatagaaggccactaaagcagacaaaaagcttaaaatgaaagccccaacaatgatccccacaatcatactagtttgattcttctttttgcttaaagctggagaaatgtcactcacagtaggtgtgaaatctgtatcaaaataacaatactaatattcaaatacatgttatgatagtcctatcattgtattaatccaaattttcaaaacttgcttatttccttttcttctcttcatatatcttttttgttttctcttcaattagttttgatatcaaagcttggtttaggtgattagtttaaacatagcaacaagatttattgtattactacatcaaatcaatattttttcttcaaactagctttatgatatttaatttgaattgcaattttagaatttcatctgatttggcaaaatgacaaattaataccccttaatgaggcgagcaaacgcaaacaaaagccaatagatcagcaaagaatggcacacgcgccaagctatggttgtcgaaaaatgccaaactattagaaatagtaggcaaatagctaaatctatggtatcccacacacgggaaaccaatcccacatgagagaatatgatatgaatctcatgcaacgaactttatataaaagaaaaataatattagtgctagatttataacctttgaaacaataatatgtataaagttaaattaacattaatacttgaaaactttggagggatgatgaattagattgttgtaatcacaaaaaatgggtttttgattttatagtgttgtttattgagaaaaattgtaaaagagtaatattcttcttaatttgcaaaatgcaataaaatagtacattttcatctctttgtgttttctcctaaatttgttagataaatatcacttataagtatcaaaccacctgcatttgcttctataaataaattatcagatcatgttgttacctggtataacactgatggctgaaatggagggtccataagtaccatagtttggtatgcaacaagttccttttccagcccataaaagatggatctcaaggtagttttgcgaaacccgagccttaaattccttctggactgccctgaaagatattccacctgcctcttttctgatatcaaaattttgtattacacggtttccctgtcataaatttgcactacaattagtcctgaaaaggttgacaaaaaagaaagaaatacattagtttaagttgaaaagaaaattaaaaaagaaatcttagaccctcattacttggatataaatatcaaatatacgtctgccaagacttttccaggtgcgagaattttcgaaagcagtttctgcaaagtggagtttgacagtgtagttaccattctcaagccccagaccatagtatctcaatgatgaagaagaaagccttacagtctggaataatcctgagtctaaagtactagtaactttggatgatgaagtacttgtatagctataagaattaggattgacatcagtccatgagaagagtccaacattgcttactgcccatcttttggagctggtcacaaaatgagtagctggaccaagagcctcatcatctttctcatacacaataccatttgaagaggaaatttgttcaccaccacagttaatcccaaagttagaatctgcagaagaaaagctaacttcatgtttggtttgatgaactcctaattctaatagaatcatctttacaattccattgtctggttttgttttgaaaacatcttaatgtctttacaatataggcctcattacaccttttctcttcttttagtataaaaatttaacatagggaatatttatgaatacattattttcattccattccattactactattataccattaccattctcattccattacactaaaccaaaacccacctcagtctttatcacaaagtaccaagtattcataatttttgcaatccattatgtaatagtacaataatgaatgaaagttaaagacatttaatagcaatttctaatgtagtctagcttaattaatcaaaataaataaaataaacaaattgttcaaactctacttacagagcggacggtctcggttacatggaaaatttctttgaaggcaattcaatcctaacagaagagtactagaaaaaccaagaataaattagatgtaaataatgcagagataactttgattagtatcttgcactcaatgcttctagaaaaaaaaataatacctgttgcttgaattatctatagtcaaattgttgccaaccaagttactgtatcaaaaaggtgaagtataaaattagtaatagtgtcttatattcatataagcttgtctttacttttctgtagaaaatgcatgaaatattgaaaaacataatacaaaagtttgtcattttaagaatgaaactgaaccatatatttttaaagacatacagttgtaaattttgttgattgttgatccaagaaggaatgtttcccactaaattattgtatgatagatctctgcaatcataatatacaatatatatagcattaatttcatagttattaacatcaggcagaccaaagccaattgtgagccttgagcaaaaagttacaattggacctttttctattaacttacacaatgagaagtgatgcactgatcttctgctgaggcaatgtaccatttaggctattgtttccaagaaacctggttaattaaacagaattacttgctttaatatttactatataatagtagctattatgatatgatcatgcaattaaagtgagataataatatattattacaaagcagaaagtgaactcatgttgaaaagagagtctgggatctgtccatttaacttgttgaagctcaaatccctataaataaaaaagtgcaatttcatagttagaagatagtgcaaagttgggtagttttttgagtaccttaatgagcttacaaatgtgtcaactttgtgaatttgttaatattcgatggaattgagccaatgatttcgctattcctcagttctctgcaagttttattatgagttattatttgattacagtccaaaagattatgtctaggctatatgattatgtgttgaaaacttgttacttacaagaatgatagagacttcatattggtgacaaatgcaagagttgaacttgcattagatatttcactcaatcgcctacatgtgtttatatagcttaagattattaacttagcttaaatatttgtaaatagacttctatttattgagcatgttactcacaattctgttaaagaagttagatttgcaaaagttgatgggataggtccttgtaaagaatttccttgaaatgccctgcattaatataaacaagtagttaattattaacaatgataacatagaaaagggaaaatctgcagtacactccctaaaggaggagtgcttcggtacacctccaatttgtttcggtatttaagagagcttttcaatttaacttttttacatgattgtgtatgtactattgtagttatttttagcattgttaattattcgaaattttttgaaaatttacagatagttctaaacaactacaacttacacaatcataataaaaattagactaaaaaactctactacatgccaaaacagatagaaaatgcattgaaacatctctttaaaagggtgtcctatagacttaccctatacaaaatatagatgttgcaatgttataaatgtatagatatatgttcaacttgtcttacaagttagtaagatttgaccaacttcctatgaaatcaggtatcttgcctatgagttcattatcttgagcccacctacaagttaaagatgccaattagacaaagaaacttatattttcttacttctttcttctcatataatagtatccctatgatcatgaggtagaagaaatagtttacaatatttgcatgctttggagatttgcaaatgttgaaggaatcttcccactaactccagaactcgcaataatcctatcaaattaaaaataatgaaaaccaaaaaacaaatcatgatgggaccaatgtacaactgcaatcacaaccattaagtttgaatagaaaaaactcaatgaaattcatgttaccaacttacaaatattgtaatttttttaaattccctagttccggcggcagtgtaccagagaaattgttctctgaaaagagcctacacacaaaattatttggaataattaaggtcaatattaccataattaactatcaatggaaacttcataaagatgcctataacttacaaacttagtagctgagtaagtaatcccaattcttttggtaactctcctgacagtgcatttccagctaaagatctagtgtaatatccccaagaaaagtgagaaaagatgagaaatatttttaacataattatactaaatcttgtttattcaaagcttaagttttaggaatgcttacaagtatttcatgttaatgagggttccaattgatggggaaacagaacctgtcaagaaattgtagcccaaattcctacaatagagagattaaactaaatatactaacaaagtgacaataacttaaatttgggaagaggtgttatgataaccatgagaggtccaataaacacatacagataggagagaaaggtcagagtccacagctcttctggaatcggaccaacagcatccatttgataaactttcctgcattgtgattatataaccaaaattaaatcacaaatcaaagttattaatggagcattaaccacataccttatttaaaagaaaatgattggggcaattaggcggggcgttgttagcgagtctaatgtgttggaatataataacattgttgtatgatttgtctcaactaagctattgccacatcatcatactatcttatctttgacactggttagttaagttagttatacaatcttgacacctaagcatacctaactacttaattcataaccaatgcctataaaaaagaaaggcaccaaggctgctgttgacagttagtccaatccgagcctctcacctagaattctctctctttctctctaatttttgtaccaatcttgtgagtgtttaggagggttgtaaaagta
